(19) United States
(12) Patent Application Publication
(10) Pub. No.: US 2015/0125456 A1
(43) Pub. Date: May 7, 2015

(54) COLON DISEASE TARGETS AND USES THEREOF

(71) Applicants: Yeounjin KIM, Germantown, MD (US); Tao HE, Acton, MA (US); Steve RUBEN, Brookville, MD (US)

(72) Inventors: Yeounjin KIM, Germantown, MD (US); Tao HE, Acton, MA (US); Steve RUBEN, Brookville, MD (US)

(73) Assignee: CELERA CORPORATION, Alameda, CA (US)

(21) Appl. No.: 14/520,533

(22) Filed: Oct. 22, 2014

Related U.S. Application Data
(62) Division of application No. 13/621,466, filed on Sep. 17, 2012, now abandoned.
Application No. 13/621,466 is a division of application No. 12/911,617, filed on Oct. 25, 2010, now abandoned.
Application No. 12/911,617 is a division of application No. 12/070,716, filed on Feb. 19, 2008, now Pat. No. 7,842,466.
Application No. 12/070,716 is a division of application No. 11/490,374, filed on Jul. 21, 2006, now abandoned.
(60) Provisional application No. 60/701,057, filed on Jul. 21, 2005.
(60) Provisional application No. 60/717,208, filed on Sep. 16, 2005.
(60) Provisional application No. 60/763,348, filed on Jan. 31, 2006.
(60) Provisional application No. 60/781,313, filed on Mar. 13, 2006.

(51) Int. Cl. C07K 16/18; A61K 39/00; G01N 33/50; C12N 15/113; G01N 33/574

(52) U.S. Cl. CPC C07K 16/18; C12N 15/113; G01N 33/57419; G01N 33/5011; A61K 39/0011; C07K 2317/55; C07K 2317/54; C07K 2317/56; C07K 2317/732; C07K 2317/734; C12N 2310/14; A61K 2039/55; G01N 2500/00
USPC 424/139.1; 530/350; 424/185.1; 536/23.5; 536/24.5; 530/387.9; 530/387.3; 435/252.33; 435/235.1; 435/252.35; 435/252.3; 435/254.2; 435/331; 435/419; 530/391.3; 530/391.7; 435/375; 436/501; 435/6.11; 435/6.13; 435/7.1; 435/7.92; 506/9; 436/86

(57) ABSTRACT

The present invention provides a method for diagnosing and detecting diseases associated with colon. The present invention provides one or more proteins or fragments thereof, peptides or nucleic acid molecules differentially expressed in colon diseases (CCAT) and antibodies binds to CCAT. The present invention provides that CCAT is used as targets for screening agents that modulates the CCAT activities. Further the present invention provides methods for treating diseases associated with colon.

### CROSS-REFERENCE TO RELATED APPLICATIONS

[0001] This application is a divisional application of U.S. non-provisional application Ser. No. 13/621,466, filed Sep. 17, 2012, which is a divisional application of U.S. non-provisional application Ser. No. 12/911,617, filed Oct. 25, 2010, which is a divisional application of U.S. non-provisional application Ser. No. 12/070,716, filed Feb. 19, 2008 (issued as U.S. Pat. No. 7,842,466 on Nov. 30, 2010), which is a divisional application of U.S. non-provisional application Ser. No. 11/490,374, filed Jul. 21, 2006, which claims priority to U.S. provisional application Ser. No. 60/701,057, filed Jul. 21, 2005, and U.S. provisional application Ser. No. 60/717,208, filed Sep. 16, 2005, and U.S. provisional application Ser. No. 60/763,348, filed Jan. 31, 2006, and U.S. provisional application Ser. No. 60/781,313, filed Mar. 13, 2006, the contents of each of which are hereby incorporated by reference into this application.

### FIELD OF THE INVENTION

[0002] This invention relates to the fields of molecular biology and oncology. Specifically, the invention provides a molecular marker and a therapeutic agent for use in the diagnosis and treatment of colon diseases.

### BACKGROUND OF THE INVENTION

[0003] Cancer currently constitutes the second most common cause of death in the United States. Carcinomas of the colon are the eighth most prevalent form of cancer and fourth among the most common causes of cancer deaths in this country. The incidence of colon cancer has been increasing steadily in the past twenty years in most industrialized countries, exhibiting the characteristics of a growing epidemiological problem. In the year 2000, for example, an estimated 28,600 deaths will be ascribed to this type of cancer and approximately 28,600 new cases will be diagnosed.

[0004] Colon cancer is the second most frequently diagnosed malignancy in the United States as well as the second most common cause of cancer death. The five-year survival rate for patients with colorectal cancer detected in an early localized stage is 92%; unfortunately, only 37% of colorectal cancer is diagnosed at this stage. The survival rate drops to 64% if the cancer is allowed to spread to adjacent organs or lymph nodes, and to 7% in patients with distant metastases.

[0005] The prognosis of colon cancer is directly related to the degree of penetration of the tumor through the bowel wall and the presence or absence of nodal involvement, consequently, early detection and treatment are especially important. Currently, diagnosis is aided by the use of screening assays for fecal occult blood, sigmoidoscopy, colonoscopy and double contrast barium enemas. Treatment regimens are determined by the type and stage of the cancer, and include surgery, radiation therapy and/or chemotherapy. Recurrence following surgery (the most common form of therapy) is a major problem and is often the ultimate cause of death. In spite of considerable research into therapies for the disease, colon cancer remains difficult to diagnose and treat. In spite of considerable research into therapies for these and other cancers, colon cancer remains difficult to diagnose and treat effectively. Accordingly, there is a need in the art for improved methods for detecting and treating such cancers. The present invention fulfills these needs and further provides other related advantages.

[0006] In spite of considerable research into therapies for these and other cancers, colon cancer remains difficult to diagnose and treat effectively. Accordingly, there is a need in the art for improved methods for detecting and treating such cancers. The present invention fulfills these needs and further provides other related advantages such as other colon diseases.

### SUMMARY OF THE INVENTION

[0007] The present invention is based on the identification of certain cell surface proteins, cytosolic proteins, and/or secreted proteins that are differentially expressed in colon cancer. A malignant cell often differs from a normal cell by a differential expression of one or more proteins. These differentially expressed proteins, and the fragments thereof, are important markers for the diagnosis of colon disease. The differentially expressed proteins of the present invention and the nucleic acids encoding said proteins and the fragments of said proteins are referred to herein as colon cancer associated target, CCAT proteins or CCAT nucleic acids or CCAT peptides, respectively.

[0008] The present invention provides peptides and protein differentially expressed in colon diseases (hereinafter CCAT). Based on the site of protein localization, e.g., surface or cytosolic, and protein characterization, e.g. receptor or enzyme, specific uses of these CCATs are provided. Some of the CCATs of the present invention serve as targets for one or more classes of therapeutic agents, while others may be suitable for antibody therapeutics.

[0009] Accordingly, the present invention provides a method for diagnosing or detecting colon disease in a subject comprising: determining the level of one or more CCAT proteins, or any fragment(s) thereof, in a test sample from said subject, wherein said CCAT protein comprises a sequence selected from a group consisting of SEQ ID NOS:1-1233; wherein a differential level of said CCAT protein(s) or fragment(s) in said sample relative to the level of said protein(s) or fragment(s) in a test sample from a healthy subject, or the level established for a healthy subject, is indicative of colon disease.

[0010] The present invention also provides a method for detecting colon cancer in a subject comprising: determining the level of one or more CCAT peptide(s) comprising a peptide sequence selected from a group consisting of SEQ ID NOS:2228-2638 in a test sample from said subject, wherein a differential level of said CCAT peptide(s) in said sample to the level of said CCAT peptide(s) in a test sample from a healthy subject, or the level of said CCAT peptide(s) established for a healthy subject, is indicative of colon disease.

[0011] The present invention further provides a method for detecting colon disease in a subject comprising: determining the level of one or more CCAT nucleic acid(s), or any fragment(s) thereof, in a test sample from said subject, wherein said CCAT nucleic acid(s) encode a CCAT protein sequence selected from a group consisting of SEQ ID NOS:1-1233; wherein a differential level of said CCAT nucleic acids or fragment(s) in said sample relative to the level of said protein(s) or fragment(s) in a test sample from a healthy subject, or the level established for a healthy subject, is indicative of colon disease.

[0012] The invention also provides methods for detecting the CCAT peptides, gene or mRNA in a test sample for use in diagnosing the presence, absence or progression of a disease. The test sample includes but is not limited to a biological sample such as tissue, blood, serum or biological fluid.

[0013] The present invention further provides a purified antibody that binds specifically to a protein molecule, or any fragment thereof, selected from a group consisting of SEQ ID NOS:1-1233.

[0014] The present invention further provides a composition comprising an antibody that binds to a protein selected from a group consisting of SEQ ID NOS:1-1233 and an acceptable carrier.

[0015] The present invention further provides a method for treating colon disease, comprising administering to a patient in need of said treatment a therapeutically effective amount of one or more antibody(ies) of this invention.

[0016] The present invention further provides a method for treating colon disease comprising (i) identifying a subject having colon disease and (ii) administering to a said patient a therapeutically effective amount of one or more antibody(ies) of this invention.

[0017] The present invention further provides a method to screen for agents that modulate CCAT protein activity, comprising the steps of (i) contacting a test agent with a CCAT protein and (ii) assaying for CCAT protein activity, wherein a change in said activity in the presence of said agent relative to CCAT protein activity in the absence of said agent indicates said agent modulates said CCAT protein activity.

[0018] The present invention further provides a method to screen for agents that bind to CCAT protein, comprising the steps of (i) contacting a test agent with a CCAT protein and (ii) measuring the level of binding of agent to said CCAT protein.

[0019] The invention also provides diagnostic methods for human disease, in particular for colon diseases, its metastatic stage, and therapeutic potential.

[0020] The present invention further provides diagnostic method for epithelial-cell related cancers. In particular pancreas, lung, colon, prostate, ovarian, breast, bladder renal, hepatocellular, pharyngeal, and gastric cancer.

[0021] The invention also provides a method for monitoring the disease progression and the treatment progress.

[0022] The invention further provide a method of diagnosis by an array, wherein the array is immobilized with two or more CCAT proteins, peptides or nucleic acid molecules. The proteins, peptides or nucleic acid molecules include but are not limited to the SEQ ID NOS: 1-2638.

[0023] The invention also provides monoclonal or polyclonal antibodies and composition thereof reactive with antigentic portion of CCAT protein, peptides or fragments thereof in a form for use in colon diseases diagnosis.

[0024] The invention further provides an immunogenic antibody for treating colon diseases disease or diseases associated with colon diseases.

[0025] The present invention provides a method for screening agents that modulate CCAT activity, comprising the steps of (a) contacting a sample comprising CCAT with an agent; and (b) assaying for CCAT activity, wherein a change in said CCAT activity in the presence of said agent relative to CCAT activity in the absence of said compound indicates said agent modulates CCAT. The agents include but are not limited to protein, peptide, antibody, nucleic acid such as antisense RNA, RNAi fragments, small molecules.

[0026] The present invention further provides a method for treating colon diseases, comprising: administering to a patient one or more agents in a therapeutically effective amount to treat colon diseases.

[0027] The present invention provides a method for treating colon diseases, comprising: identifying a subject having colon diseases; and administering to a patient to one or more antibodies in a therapeutically effective amount to treat colon diseases.

[0028] The present invention further provides therapeutic potential for epithelial-cell related cancers. In particular pancreas, lung, colon, prostate, ovarian, breast, bladder renal, hepatocellular, pharyngeal and gastric cancer.

### Description of the Files Contained on the CD-R Named CL001615CDR

[0029] The CD-R named CL001615CDR contains the following three text (ASCII) files:

1) File SEQLIST_{—}1615.txt provides the Sequence Listing. The Sequence Listing provides the protein sequences (SEQ ID NOS:1-1233); transcript sequences (SEQ ID NOS:1234-2227) and peptide sequences (SEQ ID NOS:2228-2638) as shown in Table 1. File SEQLIST_{—}1615.txt is 11,250 KB in size.
2) File TABLE1_{—}1615.txt provides Table 1. File TABLE1_{—}1615 is 402 KB in size.
3) File TABLE2_{—}1615.txt provides Table 2. File TABLE2_{—}1615 is 5 KB in size.

[0030] The material contained on the CD-R labeled CL001615CDR is hereby incorporated by reference pursuant to 37 CFR 1.77(b)(4).

LENGTHY TABLES
The patent application contains a lengthy table section. A copy of the table is available in electronic form from the USPTO web site (http://seqdata.uspto.gov/?pageRequest=docDetail&DocID=US20150125456A1). An electronic copy of the table will also be available from the USPTO upon request and payment of the fee set forth in 37 CFR 1.19(b)(3).

### Description of Table 1

[0031] Table 1 (provided on the CD-R) discloses the peptides which correspond to the protein in the colon cancer tumor, the expression information, and the ratio compare to the control sample. The expression is based on measuring the level of the peptides. “N/A” represents the number of overexpression by more than two, whereas numerical representation of overexpression is also indicated. “S” which is overexpressed singleton indicates that the peptide peak in diseased sample was detected and there was no peak detected in control samples.

[0032] Table 1 also discloses the CCAT proteins, transcripts, and peptides.

[0033] The transcript/protein information includes:

[0034] a protein number (1 through 1233)

[0035] a Celera protein internal identification number for the protein encoded by the Celera transcript (hCP and/or UID)

[0036] a public protein accession number (Genbank e.g., RefSeq NP number, Swiss-prot, or Derwent) for the protein

[0037] an art-known gene/protein name

[0038] a Celera transcript internal identification number (hCT and/or UID)

[0039] a public transcript accession number (Genbank e.g., RefSeq NM number, or Derwent)

[0040] a Celera hCG and UID internal identification numbers for the gene

[0041] an art-known gene symbol

[0042] Celera genomic axis position (indicating start nucleotide position-stop nucleotide position)

[0043] the chromosome number of the chromosome on which the gene is located

[0044] an OMIM (Online Mendelian Inheritance in Man; Johns Hopkins University/NCBI) public reference number for obtaining further information regarding the medical significance of each gene

[0045] alternative gene/protein name(s) and/or symbol(s) in the OMIM entry

### Description of Table 2

[0046] Table 2 discloses tumor staging information as follows (all tumor staging designations in Table 2 are those which are typically used in the art): Sample ID Number, sample type (labeled “Sample”), cancer type (labeled “Type”), Lymph Nodes (the “N” in the TNM staging system, for Node, which designates the spread of a tumor to the lymph nodes), Distant Metastasis (the “M” in the TNM staging system, for Metastasis, which designates the extent of tumor metastasis), Extent of Invasion (the “T” in the TNM staging system, for Tumor, which designates the size and location of a primary tumor), and AJCC Stage (which is assigned based on a combination of the T, N, and M classifications).

[0047] The Lymph Nodes (“N”) stages are as follows: “NX”=the regional lymph nodes cannot be assessed, “N0”=the cancer has not spread into the regional lymph nodes, “N1”=the cancer has spread to one to three regional lymph nodes, and “N2”=the cancer has spread to four or more regional lymph nodes.

[0048] The Distant Metastasis (“M”) stages are as follows: “MX”=distant spread cannot be assessed, “M0”=the disease has not metastasized, and “M1”=there is metastasis to another part of the body beyond the colon or rectum.

[0049] The Extent of Invasion (“T”) stages are as follows: “TX”=the primary tumor cannot be evaluated, “TO”=there is no evidence of a primary tumor in the colon or rectum, “T is”=carcinoma in situ (cancer cells are present only in the epithelium or lamina propria), “T1”=the tumor extends into the submucosa of the colon, “T2”=the tumor has invaded the muscularis propria, “T3”=the tumor has grown through the muscularis propria and into the subserosa or into tissues surrounding the colon or rectum, and “T4”=the tumor has invaded other organs beyond the colon or rectum or has caused a perforation in the wall of the colon or rectum.

[0050] The AJCC Stages are as follows: “0”=carcinoma in situ, “I”=the cancer has grown through the mucosa and has invaded the muscular layer of the colon or rectum but has not spread into nearby tissues or lymph nodes (T1 or T2, N0, M0), “IIA”=the cancer has spread through the wall of the colon or rectum and may have spread to nearby tissues but has not spread to the nearby lymph nodes (T3, N0, M0), “IIB”=the cancer has spread through the colon or rectum to nearby organs but has not spread to the nearby lymph nodes (T4, N0, M0), “IIIA”=the cancer has grown through the inner lining or into the muscle layers of the intestine and to one to three lymph nodes, but has not spread to other parts of the body (T1 or T2; N1, M0), “IIIB”=the cancer has grown through the bowel wall or to surrounding organs and into one to three lymph nodes, but has not spread to other parts of the body (T3 or T4, N1, M0), “IIIC”=the cancer (which can be of any size) has spread to four or more lymph nodes, but not to other distant parts of the body (any T, N2, M0), “IV”=the cancer has metastasized to distant parts of the body (e.g., liver or lungs) (any T, any N, M1), and “Recurrent”=the cancer has returned to the colon or rectum or another part of the body following treatment.

### DETAILED DESCRIPTION OF THE PREFERRED EMBODIMENTS

### General Description

[0051] While the broadest definition of this invention is set forth in the Summary of the Invention, certain nucleic acids, peptides or proteins are preferred. For example a preferred method for detecting colon disease by determining the level of one or more CCAT protein(s) or any fragment(s) thereof is wherein the level of CCAT protein(s) are determined by contacting one or more antibody(ies) that specifically bind to the antigenic regions of the CCAT protein(s). Further preferred is a method wherein the level of two or more proteins are determined, more preferred wherein the level of four or more proteins are determined and most preferred wherein the level of eight or more proteins are determined.

[0052] A preferred method for detecting colon disease by determining the level of one or more CCAT peptide(s) is wherein the level of CCAT peptides(s) are determined by contacting one or more antibody(ies) that specifically bind to the antigenic regions of the CCAT peptide(s). Further preferred is a method wherein the level of five or more peptides are determined, more preferred wherein the level of ten or more peptides are determined and most preferred wherein the level of fifteen or more peptides are determined.

[0053] A preferred method for detecting colon disease by determining the level of one or more CCAT nucleic acid(s) is wherein the level of said CCAT nucleic acid(s) is determined by contacting one or more probes that specifically hybridize to said nucleic acid(s). Further preferred is a method wherein the level of two or more nucleic acids are determined, more preferred wherein the level of four or more nucleic acids are determined and most preferred wherein the level of eight or more nucleic acids are determined.

[0054] The methods for detecting colon disease provided by the present invention may be used for diagnosing the presence of disease in a patent, monitoring the presence of colon disease in patients undergoing treatment and testing for the reoccurrence of colon disease in patients that were successfully treated for colon disease; preferably wherein the colon disease is colon cancer. The test sample may be, but is not limited to, a biological sample such as tissue, blood, serum or biological fluid.

[0055] The present invention is based on the discovery of protein(s) and peptide(s) that are differentially expressed in colon cancer samples versus normal colon diseases samples. These proteins and peptide, and the encoding nucleic acid molecules are associated with colon diseases, hereinafter the CCAT protein, peptide or nucleic acids.

[0056] The discovery of disease specific target proteins is base on discoveries made using proteomics techniques. The method uses on MALDI-TOF TOF LC/MS analyses platform to generate protein expression profiles from colon diseases tissues or cell lines in an effort to discover and identify novel molecules associated with the disease.

[0057] Based on these discoveries, the present invention provides proteins, peptides, nucleic acids that are differential in colon diseases, as well as antibodies binds to the proteins or peptides. The present invention also provides methods for detection, monitoring, diagnosis, prognosis, preventive and treatment of colon diseases. The present invention provides a detection reagent, markers for colon diseases at various stages, comprises CCAT sequences isolated from human colon diseases tissue, sera, cell lines, blood or biological fluids.

[0058] The present invention provides a method for treating colon diseases targeting at CCAT. The treatment includes administration of a therapeutically effective amount of composition comprise, but not limit to, an antibody, an immunogentic peptide which induces T cell response, a small molecule, a protein or a nucleic acid molecule. The composition further comprises an agonist or antigonist to CCAT. A “Colon or colorectal disease” includes but not limited to colon cancer, colon tumor, diverticulosis, diverticulitis, Crohn's disease, ulcerative colitis, irritable bowel syndrome, inflammatory bowel disease, hemorrhoids, and anal fissure.

[0059] The present invention may further provide a diagnostic or therapeutic potential for epithelial-cell related cancers, which include but are not limited to pancreas, lung, colon, prostate, ovarian, breast, bladder renal, hepatocellular, pharyngeal and gastric cancers.

[0060] The present invention further provides the target for screening an agent for CCAT, wherein the agent is compounds of small molecules, proteins, peptides, nucleic acids, antibodies or other agonists or antigonists.

### CCAT Peptide/Proteins and Peptides

[0061] The present invention provides isolated CCAT peptide and protein molecules that consisting of, consisting essentially of, or comprising the amino acid sequences of the CCAT peptides and proteins disclosed in Table 1, (encoded by the nucleic acid molecule shown in Table 1), as well as all obvious variants of these peptides that are within the art to make and use. Some of these variants are described in detail below.

[0062] In one embodiment CCAT peptides include, but are not limited to, the amino acid sequence of SEQ ID NOS:2228-2638 and variants thereof. A CCAT protein includes, but is not limited to, the amino acid sequence of SEQ ID NOS:1-1233 and variants thereof. CCAT proteins may be differentially expressed in colon cell line, blood, tissue, serum or body fluids.

[0063] The peptide or protein or fragment thereof, to which the invention pertains, however, are not to be construed as encompassing peptide, protein or fragment that may be disclosed publicly prior to the present invention.

[0064] The CCAT proteins and peptides of the present invention can be purified to homogeneity or other degrees of purity. The level of purification will be based on the intended use. The critical feature is that the preparation allows for the desired function of the peptide, even if in the presence of considerable amounts of other components (the features of an isolated nucleic acid molecule is discussed below).

[0065] As used herein, a “peptide” is defined as amino acid sequences between 5-20 amino acids derived from CCAT proteins such as SEQ ID NOS:1-1233 or variants thereof. The peptide differentially expressed in either colon diseases cell line, blood, tissue, serum or body fluids. In one embodiment peptides include, but are not limited to, the amino acid sequence of SEQ ID NOS:2228-2638, or variants thereof.

[0066] As used herein, a “protein” is full-length protein differentially expressed in colon diseases cell line, tissue, blood, serum or body fluids. A protein includes, but is not limited to, the amino acid sequence of SEQ ID NOS:1-1233.

[0067] A peptide is said to be “isolated” or “purified” when it is substantially free of cellular material or free of chemical precursors or other chemicals. The peptides of the present invention can be purified to homogeneity or other degrees of purity. The level of purification will be based on the intended use. The critical feature is that the preparation allows for the desired function of the peptide, even if in the presence of considerable amounts of other components (the features of an isolated nucleic acid molecule are discussed below).

[0068] In some uses, “substantially free of cellular material” includes preparations of the peptide having less than about 30% (by dry weight) other proteins (i.e., contaminating protein), less than about 20% other proteins, less than about 10% other proteins, or less than about 5% other proteins. When the peptide is recombinantly produced, it can also be substantially free of culture medium, i.e., culture medium represents less than about 20% of the volume of the protein preparation.

[0069] The language “substantially free of chemical precursors or other chemicals” includes preparations of the peptide in which it is separated from chemical precursors or other chemicals that are involved in its synthesis. In one embodiment, the language “substantially free of chemical precursors or other chemicals” includes preparations of the CCAT peptide having less than about 30% (by dry weight) chemical precursors or other chemicals, less than about 20% chemical precursors or other chemicals, less than about 10% chemical precursors or other chemicals, or less than about 5% chemical precursors or other chemicals.

[0070] The isolated CCAT proteins and peptide can be purified from cells that naturally express it, purified from cells that have been altered to express it (recombinant), or synthesized using known protein synthesis methods. Sambrook et al., Molecular Cloning: A Laboratory Manual. 3rd. ed., Cold Spring Harbor Laboratory Press, Cold Spring Harbor, N.Y., (2001). Experimental data as provided in Table 1 indicates expression in human colon tumor tissues. For example, a nucleic acid molecule encoding the CCAT protein or peptide is cloned into an expression vector, the expression vector introduced into a host cell and the protein expressed in the host cell. The protein or peptide can then be isolated from the cells by an appropriate purification scheme using standard protein purification techniques. Many of these techniques are described in detail below.

[0071] A CCAT peptide or protein can be attached to heterologous sequences to form chimeric or fusion proteins. Such Schimeric and fusion proteins comprise a peptide operatively linked to a heterologous protein having an amino acid sequence not substantially homologous to the peptide. “Operatively linked” indicates that the peptide and the heterologous protein are fused in-frame. The heterologous protein can be fused to the N-terminus or C-terminus of the peptide.

[0072] In some uses, the fusion protein does not affect the activity of the peptide or protein per se. For example, the fusion protein can include, but is not limited to, fusion proteins, for example beta-galactosidase fusions, yeast two-hybrid GAL fusions, poly-His fusions, MYC-tagged, HI-tagged and Ig fusions. Such fusion proteins, particularly poly-His fusions, can facilitate the purification of recombinant CCAT proteins or peptides. In certain host cells (e.g., mammalian host cells), expression and/or secretion of a protein can be increased by using a heterologous signal sequence.

[0073] A chimeric or fusion CCAT protein or peptide can be produced by standard recombinant DNA techniques. For example, DNA fragments coding for the different protein sequences are ligated together in-frame in accordance with conventional techniques. In another embodiment, the fusion gene can be synthesized by conventional techniques including automated DNA synthesizers. Alternatively, PCR amplification of gene fragments can be carried out using anchor primers which give rise to complementary overhangs between two consecutive gene fragments which can subsequently be annealed and re-amplified to generate a chimeric gene sequence (see Ausubel et al., Current Protocols in Molecular Biology, 1992). Moreover, many expression vectors are commercially available that already encode a fusion moiety (e.g., a GST protein). A CCAT-encoding nucleic acid can be cloned into such an expression vector such that the fusion moiety is linked in-frame to the CCAT protein or peptide.

[0074] As mentioned above, the CCAT peptide or the CCAT protein has obvious variants of the amino acid sequence, such as naturally occurring mature forms of the CCAT, allelic/sequence variants of the CCAT, non-naturally occurring recombinantly derived variants of the CCATs, and orthologs and paralogs of the CCAT proteins or peptides. Such variants can readily be generated using art-known techniques in the fields of recombinant nucleic acid technology and protein biochemistry.

[0075] It is understood, however, that CCAT and variants exclude any amino acid sequences disclosed prior to the invention.

[0076] Such variants can readily be identified/made using molecular techniques and the sequence information disclosed herein. Further, such variants can readily be distinguished from other peptides based on sequence and/or structural homology to the CCAT peptides of the present invention. The degree of homology/identity present will be based primarily on whether the peptide is a functional variant or non-functional variant, the amount of divergence present in the paralog family and the evolutionary distance between the orthologs.

[0077] To determine the percent identity of two amino acid sequences or two nucleic acid sequences, the sequences are aligned for optimal comparison purposes (e.g., gaps can be introduced in one or both of a first and a second amino acid or nucleic acid sequence for optimal alignment and non-homologous sequences can be disregarded for comparison purposes). In a preferred embodiment, at least 30%, 40%, 50%, 60%, 70%, 80%, or 90% or more of the length of a reference sequence is aligned for comparison purposes. The amino acid residues or nucleotides at corresponding amino acid positions or nucleotide positions are then compared. When a position in the first sequence is occupied by the same amino acid residue or nucleotide as the corresponding position in the second sequence, then the molecules are identical at that position (as used herein amino acid or nucleic acid “identity” is equivalent to amino acid or nucleic acid “homology”). The percent identity between the two sequences is a function of the number of identical positions shared by the sequences, taking into account the number of gaps, and the length of each gap, which need to be introduced for optimal alignment of the two sequences.

[0078] The comparison of sequences and determination of percent identity and similarity between two sequences can be accomplished using a mathematical algorithm. (Computational Molecular Biology, Lesk, A. M., ed., Oxford University Press, New York, 1988; Biocomputing: Informatics and Genome Projects, Smith, D. W., ed., Academic Press, New York, 1993; Computer Analysis of Sequence Data, Part 1, Griffin, A. M., and Griffin, H. G., eds., Humana Press, New Jersey, 1994; Sequence Analysis in Molecular Biology, von Heinje, G., Academic Press, 1987; and Sequence Analysis Primer, Gribskov, M. and Devereux, J., eds., M Stockton Press, New York, 1991). In a preferred embodiment, the percent identity between two amino acid sequences is determined using the Needleman and Wunsch (J. Mol. Biol. (48):444-453 (1970)) algorithm which has been incorporated into the GAP program in the GCG software package, using either a Blossom 62 matrix or a PAM250 matrix, and a gap weight of 16, 14, 12, 10, 8, 6, or 4 and a length weight of 1, 2, 3, 4, 5, or 6. In yet another preferred embodiment, the percent identity between two nucleotide sequences is determined using the GAP program in the GCG software package (Devereux, J., et al., Nucleic Acids Res. 12(1):387 (1984)), using a NWSgapdna.CMP matrix and a gap weight of 40, 50, 60, 70, or 80 and a length weight of 1, 2, 3, 4, 5, or 6. In another embodiment, the percent identity between two amino acid or nucleotide sequences is determined using the algorithm of E. Myers and W. Miller (CABIOS, 4:11-17 (1989)) which has been incorporated into the ALIGN program (version 2.0), using a PAM120 weight residue table, a gap length penalty of 12 and a gap penalty of 4.

[0079] The nucleic acid and protein sequences of the present invention can further be used as a “query sequence” to perform a search against sequence databases to, for example, identify other family members or related sequences. Such searches can be performed using the NBLAST and XBLAST programs (version 2.0) of Altschul, et al. (J. Mol. Biol. 215:403-10 (1990)). BLAST nucleotide searches can be performed with the NBLAST program, score=100, wordlength=12 to obtain nucleotide sequences homologous to the nucleic acid molecules of the invention. BLAST protein searches can be performed with the XBLAST program, score=50, wordlength=3 to obtain amino acid sequences homologous to the proteins of the invention. To obtain gapped alignments for comparison purposes, Gapped BLAST can be utilized as described in Altschul et al. (Nucleic Acids Res. 25(17):3389-3402 (1997)). When utilizing BLAST and gapped BLAST programs, the default parameters of the respective programs (e.g., XBLAST and NBLAST) can be used.

[0080] Full-length pre-processed forms, as well as mature processed forms, of proteins that comprise one of the peptides of the present invention can readily be identified as having complete sequence identity to one of the CCAT peptides of the present invention as well as being encoded by the same genetic locus as the CCAT peptide provided herein (see Table 1).

[0081] Allelic variants of a CCAT peptide can readily be identified as being a human protein having a high degree (significant) of sequence homology/identity to at least a portion of the CCAT peptide as well as being encoded by the same genetic locus as the CCAT peptide provided herein. Genetic locus can readily be determined based on the genomic information provided in Table 1, such as the genomic sequence mapped to the reference human. As used herein, two proteins (or a region of the proteins) have significant homology when the amino acid sequences are typically at least about 70-80%, 80-90%, and more typically at least about 90-95% or more homologous. A significantly homologous amino acid sequence, according to the present invention, will be encoded by a nucleic acid sequence that will hybridize to a CCAT peptide encoding nucleic acid molecule under stringent conditions as more fully described below.

[0082] Paralogs of a CCAT peptide can readily be identified as having some degree of significant sequence homology/identity to at least a portion of the CCAT peptide, as being encoded by a gene from humans, and as having similar activity or function. Two proteins will typically be considered paralogs when the amino acid sequences are typically at least about 60% or greater, and more typically at least about 70% or greater homology through a given region or domain. Such paralogs will be encoded by a nucleic acid sequence that will hybridize to a CCAT peptide encoding nucleic acid molecule under moderate to stringent conditions as more fully described below.

[0083] Orthologs of a CCAT peptide can readily be identified as having some degree of significant sequence homology/identity to at least a portion of the CCAT peptide as well as being encoded by a gene from another organism. Preferred orthologs will be isolated from mammals, preferably primates, for the development of human therapeutic targets and agents. Such orthologs will be encoded by a nucleic acid sequence that will hybridize to a CCAT peptide encoding nucleic acid molecule under moderate to stringent conditions, as more fully described below, depending on the degree of relatedness of the two organisms yielding the proteins.

[0084] Non-naturally occurring variants of the CCAT peptides of the present invention can readily be generated using recombinant techniques. Such variants include, but are not limited to deletions, additions and substitutions in the amino acid sequence of the CCAT peptide. For example, one class of substitutions is conserved amino acid substitution. Such substitutions are those that substitute a given amino acid in a CCAT peptide by another amino acid of like characteristics. Typically seen as conservative substitutions are the replacements, one for another, among the aliphatic amino acids Ala, Val, Leu, and Ile; interchange of the hydroxyl residues Ser and Thr; exchange of the acidic residues Asp and Glu; substitution between the amide residues Asn and Gln; exchange of the basic residues Lys and Arg; and replacements among the aromatic residues Phe and Tyr. Guidance concerning which amino acid changes are likely to be phenotypically silent are found in Bowie et al., Science 247:1306-1310 (1990).

[0085] Variant CCAT peptides can be fully functional or can lack function in one or more activities, e.g. ability to bind substrate, ability to phosphorylate substrate, ability to mediate signaling, etc. Fully functional variants typically contain only conservative variation or variation in non-critical residues or in non-critical regions.

[0086] Non-functional variants typically contain one or more non-conservative amino acid substitutions, deletions, insertions, inversions, or truncation or a substitution, insertion, inversion, or deletion in a critical residue or critical region.

[0087] Amino acids that are essential for function can be identified by methods known in the art, such as site-directed mutagenesis or alanine-scanning mutagenesis (Cunningham et al., Science 244:1081-1085 (1989)). The latter procedure introduces single alanine mutations at every residue in the molecule. The resulting mutant molecules are then tested for biological activity such as CCAT activity or in assays such as an in vitro proliferative activity. Sites that are critical for binding partner/substrate binding can also be determined by structural analysis such as crystallization, nuclear magnetic resonance or photoaffinity labeling (Smith et al., J. Mol. Biol. 224:899-904 (1992); de Vos et al. Science 255:306-312 (1992)).

[0088] The present invention further provides fragments of the CCATs, in addition to proteins and peptides that comprise and consist of such fragments, particularly those comprising the residues identified in Table 1. As used herein, a fragment comprises at least 8, 10, 12, 14, 16, 18, 20 or more contiguous amino acid residues from a CCAT. Such fragments can be chosen based on the ability to retain one or more of the biological activities of the CCAT or could be chosen for the ability to perform a function, e.g. bind a substrate or act as an immunogen. Particularly important fragments are biologically active fragments, peptides that are, for example, about 8 or more amino acids in length. Such fragments will typically comprise a domain or motif of the CCAT, e.g., active site, a transmembrane domain or a substrate-binding domain. Further, possible fragments include, but are not limited to, domain or motif containing fragments, soluble peptide fragments, and fragments containing immunogenic structures. Predicted domains and functional sites are readily identifiable by computer programs well known and readily available to those of skill in the art (e.g., PROSITE analysis).

[0089] Polypeptides often contain amino acids other than the 20 amino acids commonly referred to as the 20 naturally occurring amino acids. Further, many amino acids, including the terminal amino acids, may be modified by natural processes, such as processing and other post-translational modifications, or by chemical modification techniques well known in the art. Common modifications that occur naturally in CCATs are described in basic texts, detailed monographs, and the research literature, and they are well known to those of skill in the art.

[0090] Known modifications include, but are not limited to, acetylation, acylation, ADP-ribosylation, amidation, covalent attachment of flavin, covalent attachment of a heme moiety, covalent attachment of a nucleotide or nucleotide derivative, covalent attachment of a lipid or lipid derivative, covalent attachment of phosphotidylinositol, cross-linking, cyclization, disulfide bond formation, demethylation, formation of covalent crosslinks, formation of cystine, formation of pyroglutamate, formylation, gamma carboxylation, glycosylation, GPI anchor formation, hydroxylation, iodination, methylation, myristoylation, oxidation, proteolytic processing, phosphorylation, prenylation, racemization, selenoylation, sulfation, transfer-RNA mediated addition of amino acids to proteins such as arginylation, and ubiquitination.

[0091] Such modifications are well known to those of skill in the art and have been described in great detail in the scientific literature. Several particularly common modifications, glycosylation, lipid attachment, sulfation, gamma-carboxylation of glutamic acid residues, hydroxylation and ADP-ribosylation, for instance, are described in most basic texts, such as Proteins—Structure and Molecular Properties, 2nd Ed., T. E. Creighton, W. H. Freeman and Company, New York (1993). Many detailed reviews are available on this subject, such as by Wold, F., Posttranslational Covalent Modification of Proteins, B. C. Johnson, Ed., Academic Press, New York 1-12 (1983); Seifter et al. (Meth. Enzymol. 182: 626-646 (1990)) and Rattan et al. (Ann. N.Y. Acad. Sci. 663:48-62 (1992)).

[0092] Accordingly, the CCATs of the present invention also encompass derivatives or analogs in which a substituted amino acid residue is not one encoded by the genetic code, in which a substituent group is included, in which the mature CCAT is fused with another compound, such as a compound to increase the half-life of the CCAT (for example, polyethylene glycol), or in which the additional amino acids are fused to the mature CCAT, such as a leader or secretory sequence or a sequence for purification of the mature CCAT or a pro-protein sequence.

### Protein/Peptide Uses

[0093] The proteins of the present invention can be used in substantial and specific assays related to the functional information provided in Table 1; to raise antibodies or to elicit another immune response; as a reagent (including the labeled reagent) in assays designed to quantitatively determine levels of the protein (or its binding partner or ligand) in biological fluids; and as markers for tissues in which the corresponding protein is preferentially expressed (either constitutively or at a particular stage of tissue differentiation or development or in a disease state). Where the protein binds or potentially binds to another protein or ligand (such as, for example, in a CCAT-effector protein interaction or CCAT-ligand interaction), the protein can be used to identify the binding partner/ligand so as to develop a system to identify inhibitors of the binding interaction. Any or all of these uses are capable of being developed into reagent grade or kit format for commercialization as commercial products.

[0094] Methods for performing the uses listed above are well known to those skilled in the art. References disclosing such methods include “Molecular Cloning: A Laboratory Manual”, Sambrook, J., E. F. Fritsch and T. Maniatis eds., 3rd. ed., Cold Spring Harbor Laboratory Press, Cold Spring Harbor, N.Y., (2001) and “Methods in Enzymology: Guide to Molecular Cloning Techniques”, Academic Press, Berger, S. L. and A. R. Kimmel eds., 1987.

[0095] The potential uses of the peptides of the present invention are based primarily on the source of the protein as well as the class/action of the protein. For example, CCATs isolated from humans and their human/mammalian orthologs serve as targets for identifying agents for use in mammalian therapeutic applications, e.g. a human drug, particularly in modulating a biological or pathological response in a cell or tissue that expresses the CCAT. Experimental data as provided in Table 1 indicate that the CCAT of the present invention are overexpressed in colon tumor tissue. A large percentage of pharmaceutical agents are being developed that modulate the activity of CCAT proteins, particularly members of the CCAT subfamily (see Background of the Invention). The structural and functional information provided in the Background and Figures provide specific and substantial uses for the molecules of the present invention, particularly in combination with the expression information provided in Table 1. Experimental data as provided in Table 1 indicates expression in human colon tumor tissues. Such uses can readily be determined using the information provided herein, that which is known in the art, and routine experimentation.

[0096] The proteins of the present invention (including variants and fragments that may have been disclosed prior to the present invention) are useful for biological assays related to CCATs that are related to members of the CCAT subfamily. Such assays involve any of the known CCAT functions or activities or properties useful for diagnosis and treatment of CCAT-related conditions that are specific for the subfamily of CCATs that the one of the present invention belongs to, particularly in cells and tissues that express the CCAT. Experimental data as provided in Table 1 indicate that the CCAT of the present invention are overexpressed in colon tumor tissue

[0097] The proteins of the present invention are also useful in drug screening assays, in cell-based or cell-free systems. Cell-based systems can be native, i.e., cells that normally express the CCAT, as a biopsy or expanded in cell culture. Experimental data as provided in Table 1 indicates expression in human colon tumor tissues. In an alternate embodiment, cell-based assays involve recombinant host cells expressing the CCAT protein.

[0098] The polypeptides can be used to identify compounds or agents that modulate CCAT activity of the protein in its natural state or an altered form that causes a specific disease or pathology associated with the CCAT. Both the CCATs of the present invention and appropriate variants and fragments can be used in high-throughput screens to assay candidate compounds for the ability to bind to the CCAT. These compounds can be further screened against a functional CCAT to determine the effect of the compound on the CCAT activity. Further, these compounds can be tested in animal or invertebrate systems to determine activity/effectiveness. Compounds can be identified that activate (agonist) or inactivate (antagonist) the CCAT to a desired degree.

[0099] Further, the proteins of the present invention can be used to screen a compound or an agent for the ability to stimulate or inhibit interaction between the CCAT protein and a molecule that normally interacts with the CCAT protein, e.g. a substrate or or an extracellular binding ligand or a component of the signal pathway that the CCAT protein normally interacts (for example, a cytosolic signal protein or another CCAT). Such assays typically include the steps of combining the CCAT protein with a candidate compound under conditions that allow the CCAT protein, or fragment, to interact with the target molecule, and to detect the formation of a complex between the protein and the target or to detect the biochemical consequence of the interaction with the CCAT protein and the target, such as any of the associated effects of signal transduction such as protein phosphorylation, cAMP turnover, and adenylate cyclase activation, etc.

[0100] Candidate compounds or agents include, for example, 1) peptides such as soluble peptides, including Ig-tailed fusion peptides and members of random peptide libraries (see, e.g., Lam et al., Nature 354:82-84 (1991); Houghten et al., Nature 354:84-86 (1991)) and combinatorial chemistry-derived molecular libraries made of D- and/or L-configuration amino acids; 2) phosphopeptides (e.g., members of random and partially degenerate, directed phosphopeptide libraries, see, e.g., Songyang et al., Cell 72:767-778 (1993)); 3) antibodies (e.g., polyclonal, monoclonal, humanized, anti-idiotypic, chimeric, and single chain antibodies as well as Fab, F(ab′)2, Fab expression library fragments, and epitope-binding fragments of antibodies); and 4) small organic and inorganic molecules (e.g., molecules obtained from combinatorial and natural product libraries).

[0101] One candidate compound or agent is a soluble fragment of the CCAT that competes for substrate binding. Other candidate compounds include mutant CCATs or appropriate fragments containing mutations that affect CCAT function and thus compete for substrate. Accordingly, a fragment that competes for substrate, for example with a higher affinity, or a fragment that binds substrate but does not allow release, is encompassed by the invention.

[0102] The invention further includes other end point assays to identify compounds that modulate (stimulate or inhibit) CCAT activity. The assays typically involve an assay of events in the signal transduction pathway that indicate CCAT activity. Thus, the phosphorylation of a substrate, activation of a protein, a change in the expression of genes that are up- or down-regulated in response to the CCAT protein dependent signal cascade can be assayed.

[0103] Any of the biological or biochemical functions mediated by the CCAT can be used as an endpoint assay. These include all of the biochemical or biochemical/biological events described herein, in the references cited herein, incorporated by reference for these endpoint assay targets, and other functions known to those of ordinary skill in the art or that can be readily identified using the information provided in Table 1. Specifically, a biological function of a cell or tissues that expresses the CCAT can be assayed. Experimental data as provided in Table 1 indicate that the CCAT of the present invention are overexpressed in colon tumor tissue.

[0104] Binding and/or activating compounds can also be screened by using chimeric CCAT proteins in which the amino terminal extracellular domain, or parts thereof, the entire transmembrane domain or subregions, such as any of the seven transmembrane segments or any of the intracellular or extracellular loops and the carboxy terminal intracellular domain, or parts thereof, can be replaced by heterologous domains or subregions. For example, a substrate-binding region can be used that interacts with a different substrate then that which is recognized by the native CCAT. Accordingly, a different set of signal transduction components is available as an end-point assay for activation. This allows for assays to be performed in other than the specific host cell from which the CCAT is derived.

[0105] The proteins of the present invention are also useful in competition binding assays in methods designed to discover compounds that interact with the CCAT (e.g. binding partners and/or ligands). Thus, a compound is exposed to a CCAT polypeptide under conditions that allow the compound to bind or to otherwise interact with the polypeptide. Soluble CCAT polypeptide is also added to the mixture. If the test compound interacts with the soluble CCAT polypeptide, it decreases the amount of complex formed or activity from the CCAT. This type of assay is particularly useful in cases in which compounds are sought that interact with specific regions of the CCAT. Thus, the soluble polypeptide that competes with the target CCAT region is designed to contain peptide sequences corresponding to the region of interest.

[0106] To perform cell free drug screening assays, it is sometimes desirable to immobilize either the CCAT protein, or fragment, or its target molecule to facilitate separation of complexes from uncomplexed forms of one or both of the proteins, as well as to accommodate automation of the assay.

[0107] Techniques for immobilizing proteins on matrices can be used in the drug screening assays. In one embodiment, a fusion protein can be provided which adds a domain that allows the protein to be bound to a matrix. For example, glutathione-S-transferase fusion proteins can be adsorbed onto glutathione sepharose beads (Sigma Chemical, St. Louis, Mo.) or glutathione derivatized microtitre plates, which are then combined with the cell lysates (e.g., ³⁵S-labeled) and the candidate compound, and the mixture incubated under conditions conducive to complex formation (e.g., at physiological conditions for salt and pH). Following incubation, the beads are washed to remove any unbound label, and the matrix immobilized and radiolabel determined directly, or in the supernatant after the complexes are dissociated. Alternatively, the complexes can be dissociated from the matrix, separated by SDS-PAGE, and the level of CCAT-binding protein found in the bead fraction quantitated from the gel using standard electrophoretic techniques. For example, either the polypeptide or its target molecule can be immobilized utilizing conjugation of biotin and streptavidin using techniques well known in the art. Alternatively, antibodies reactive with the protein but which do not interfere with binding of the protein to its target molecule can be derivatized to the wells of the plate, and the protein trapped in the wells by antibody conjugation. Preparations of a CCAT-binding protein and a candidate compound are incubated in the CCAT protein-presenting wells and the amount of complex trapped in the well can be quantitated. Methods for detecting such complexes, in addition to those described above for the GST-immobilized complexes, include immunodetection of complexes using antibodies reactive with the CCAT protein target molecule, or which are reactive with CCAT protein and compete with the target molecule, as well as CCAT-linked assays which rely on detecting an enzymatic activity associated with the target molecule.

[0108] Agents that modulate one of the CCATs of the present invention can be identified using one or more of the above assays, alone or in combination. It is generally preferable to use a cell-based or cell free system first and then confirm activity in an animal or other model system. Such model systems are well known in the art and can readily be employed in this context.

[0109] Modulators of CCAT protein activity identified according to these drug screening assays can be used to treat a subject with a disorder mediated by the CCAT pathway, by treating cells or tissues that express the CCAT. Experimental data as provided in Table 1 indicates expression in human colon tumor tissues. These methods of treatment include the steps of administering a modulator of CCAT activity in a pharmaceutical composition to a subject in need of such treatment, the modulator being identified as described herein.

[0110] In yet another aspect of the invention, the CCAT proteins can be used as “bait proteins” in a two-hybrid assay or three-hybrid assay (see, e.g., U.S. Pat. No. 5,283,317; Zervos et al. (1993) Cell 72:223-232; Madura et al. (1993) J. Biol. Chem. 268:12046-12054; Bartel et al. (1993) Biotechniques 14:920-924; Iwabuchi et al. (1993) Oncogene 8:1693-1696; and Brent WO94/10300), to identify other proteins, which bind to or interact with the CCAT and are involved in CCAT activity. Such CCAT-binding proteins are also likely to be involved in the propagation of signals by the CCAT proteins or CCAT targets as, for example, downstream elements of a CCAT-mediated signaling pathway. Alternatively, such CCAT-binding proteins are likely to be CCAT inhibitors.

[0111] The two-hybrid system is based on the modular nature of most transcription factors, which consist of separable DNA-binding and activation domains. Briefly, the assay utilizes two different DNA constructs. In one construct, the gene that codes for a CCAT protein is fused to a gene encoding the DNA binding domain of a known transcription factor (e.g., GAL-4). In the other construct, a DNA sequence, from a library of DNA sequences that encode an unidentified protein (“prey” or “sample”) is fused to a gene that codes for the activation domain of the known transcription factor. If the “bait” and the “prey” proteins are able to interact, in vivo, forming a CCAT-dependent complex, the DNA-binding and activation domains of the transcription factor are brought into close proximity. This proximity allows transcription of a reporter gene (e.g., LacZ) which is operably linked to a transcriptional regulatory site responsive to the transcription factor. Expression of the reporter gene can be detected and cell colonies containing the functional transcription factor can be isolated and used to obtain the cloned gene which encodes the protein which interacts with the CCAT protein.

[0112] This invention further pertains to novel agents identified by the above-described screening assays. Accordingly, it is within the scope of this invention to further use an agent identified as described herein in an appropriate animal model. For example, an agent identified as described herein (e.g., a CCAT-modulating agent, an antisense CCAT nucleic acid molecule, an CCAT-RNAi fragment, a CCAT-specific antibody, or a CCAT-binding partner) can be used in an animal or other model to determine the efficacy, toxicity, or side effects of treatment with such an agent. Alternatively, an agent identified as described herein can be used in an animal or other model to determine the mechanism of action of such an agent. Furthermore, this invention pertains to uses of novel agents identified by the above-described screening assays for treatments as described herein.

[0113] The CCAT proteins of the present invention are also useful to provide a target for diagnosing a disease or predisposition to disease mediated by the peptide. Accordingly, the invention provides methods for detecting the presence, or levels of, the protein (or encoding mRNA) in a cell, tissue, or organism. Experimental data as provided in Table 1 indicates expression in human colon tumor tissues. The method involves contacting a biological sample with a compound capable of interacting with the CCAT protein such that the interaction can be detected. Such an assay can be provided in a single detection format or a multi-detection format such as an antibody chip array.

[0114] One agent for detecting a protein in a sample is an antibody capable of selectively binding to protein. A biological sample includes tissues, cells and biological fluids isolated from a subject, as well as tissues, cells and fluids present within a subject.

[0115] The peptides of the present invention also provide targets for diagnosing active protein activity, disease, or predisposition to disease, in a patient having a variant peptide, particularly activities and conditions that are known for other members of the family of proteins to which the present one belongs. Thus, the peptide can be isolated from a biological sample and assayed for the presence of a genetic mutation that results in aberrant peptide. This includes amino acid substitution, deletion, insertion, rearrangement, (as the result of aberrant splicing events), and inappropriate post-translational modification. Analytic methods include altered electrophoretic mobility, altered tryptic peptide digest, altered CCAT activity in cell-based or cell-free assay, alteration in substrate or antibody-binding pattern, altered isoelectric point, direct amino acid sequencing, and any other of the known assay techniques useful for detecting mutations in a protein. Such an assay can be provided in a single detection format or a multi-detection format such as an antibody chip array.

[0116] In vitro techniques for detection of peptide include enzyme linked immunosorbent assays (ELISAs), Western blots, immunoprecipitations and immunofluorescence using a detection reagent, such as an antibody or protein binding agent. Alternatively, the peptide can be detected in vivo in a subject by introducing into the subject a labeled anti-peptide antibody or other types of detection agent. For example, the antibody can be labeled with a radioactive marker whose presence and location in a subject can be detected by standard imaging techniques. Particularly useful are methods that detect the allelic variant of a peptide expressed in a subject and methods which detect fragments of a peptide in a sample.

[0117] The peptides are also useful in pharmacogenomic analysis. Pharmacogenomics deal with clinically significant hereditary variations in the response to drugs due to altered drug disposition and abnormal action in affected persons. See, e.g., Eichelbaum, M. (Clin. Exp. Pharmacol. Physiol. 23(10-11):983-985 (1996)), and Linder, M. W. (Clin. Chem. 43(2):254-266 (1997)). The clinical outcomes of these variations result in severe toxicity of therapeutic drugs in certain individuals or therapeutic failure of drugs in certain individuals as a result of individual variation in metabolism. Thus, the genotype of the individual can determine the way a therapeutic compound acts on the body or the way the body metabolizes the compound. Further, the activity of drug metabolizing enzymes affects both the intensity and duration of drug action. Thus, the pharmacogenomics of the individual permit the selection of effective compounds and effective dosages of such compounds for prophylactic or therapeutic treatment based on the individual's genotype. The discovery of genetic polymorphisms in some drug metabolizing enzymes has explained why some patients do not obtain the expected drug effects, show an exaggerated drug effect, or experience serious toxicity from standard drug dosages. Polymorphisms can be expressed in the phenotype of the extensive metabolizer and the phenotype of the poor metabolizer. Accordingly, genetic polymorphism may lead to allelic protein variants of the CCAT protein in which one or more of the CCAT functions in one population are different from those in another population. The peptides thus allow a target to ascertain a genetic predisposition that can affect treatment modality. Thus, in a ligand-based treatment, polymorphism may give rise to amino terminal extracellular domains and/or other substrate-binding regions that are more or less active in substrate binding, and CCAT activation. Accordingly, substrate dosage would necessarily be modified to maximize the therapeutic effect within a given population containing a polymorphism. As an alternative to genotyping, specific polymorphic peptides could be identified.

[0118] The peptides are also useful for treating a disorder characterized by an absence of, inappropriate, or unwanted expression of the protein. Experimental data as provided in Table 1 indicates expression in human colon tumor tissues. Accordingly, methods for treatment include the use of the CCAT protein or fragments.

### Antibodies

[0119] The present invention provides antibodies specifically bind to CCAT proteins or fragments thereof, peptides, or antigenic portion thereof.

[0120] The invention also provides antibodies that selectively bind to one of the peptides of the present invention, a protein comprising such a peptide, as well as variants and fragments thereof as describe above.

[0121] The antibody of present invention selectively binds a target CCAT when it binds the target domain and does not significantly bind to unrelated proteins. An antibody is still considered to selectively bind a peptide even if it also binds to other proteins that are not substantially homologous with the target peptide so long as such proteins share homology with a fragment or domain of the peptide target of the antibody. In this case, it would be understood that antibody binding to the peptide is still selective despite some degree of cross-reactivity.

[0122] The term “antibody” is used in the broadest sense, and specifically covers monoclonal antibodies (including full length monoclonal antibodies), polyclonal antibodies, multispecific antibodies (e.g., bispecific antibodies), humanized antibody and antibody fragments (e.g., Fab, F(ab′).sub.2 and Fv) so long as they exhibit the desired biological activity. Antibodies (Abs) and immunoglobulins (Igs) are glycoproteins having the same structural characteristics. While antibodies exhibit binding specificity to a specific antigen, immunoglobulins include both antibodies and other antibody-like molecules that lack antigen specificity.

[0123] As used herein, antibodies are usually heterotetrameric glycoproteins of about 150,000 daltons, composed of two identical light (L) chains and two identical heavy (H) chains. Each light chain is linked to a heavy chain by one covalent disulfide bond, while the number of disulfide linkages varies between the heavy chains of different immunoglobulin isotypes. Each heavy and light chain also has regularly spaced intrachain disulfide bridges. Each heavy chain has at one end a variable domain (VH) followed by a number of constant domains. Each light chain has a variable domain at one end (VL) and a constant domain at its other end. The constant domain of the light chain is aligned with the first constant domain of the heavy chain, and the light chain variable domain is aligned with the variable domain of the heavy chain. Particular amino acid residues are believed to form an interface between the light and heavy chain variable domains. Chothia et al., J. Mol. Biol. 186, 651-63 (1985); Novotny and Haber, Proc. Natl. Acad. Sci. USA 82 4592-4596 (1985).

[0124] An “isolated” antibody is one which has been identified and separated and/or recovered from a component of the environment in which is produced. Contaminant components of its production environment are materials that would interfere with diagnostic or therapeutic uses for the antibody, and may include enzymes, hormones, and other proteinaceous or nonproteinaceous solutes. In preferred embodiments, the antibody will be purified as measurable by at least three different methods: 1) to greater than 95% by weight of antibody as determined by the Lowry method, and most preferably more than 99% by weight; 2) to a degree sufficient to obtain at least 15 residues of N-terminal or internal amino acid sequence by use of a spinning cup sequentator; or 3) to homogeneity by SDS-PAGE under reducing or non-reducing conditions using Coomasie blue or, preferably, silver stain. Isolated antibody includes the antibody in situ within recombinant cells since at least one component of the antibody's natural environment will not be present. Ordinarily, however, isolated antibody will be prepared by at least one purification step.

[0125] An “antigenic region” or “antigenic determinant” or an “epitope” includes any protein determinant capable of specific binding to an antibody. This is the site on an antigen to which each distinct antibody molecule binds. Epitopic determinants usually consist of active surface groupings of molecules such as amino acids or sugar side chains and usually have specific three-dimensional structural characteristics, as well as charge characteristics.

[0126] “Antibody specificity,” is an antibody, which has a stronger binding affinity for an antigen from a first subject species than it has for a homologue of that antigen from a second subject species. Normally, the antibody “bind specifically” to a human antigen (i.e., has a binding affinity (Kd) value of no more than about 1×10⁻⁷ M, preferably no more than about 1×10⁻⁸ M and most preferably no more than about 1×10⁻⁹ M) but has a binding affinity for a homologue of the antigen from a second subject species which is at least about 50 fold, or at least about 500 fold, or at least about 1000 fold, weaker than its binding affinity for the human antigen. The antibody can be of any of the various types of antibodies as defined above, but preferably is a humanized or human antibody (Queen et al., U.S. Pat. Nos. 5,530,101, 5,585,089; 5,693,762; and 6,180,370).

[0127] The present invention provides an “antibody variant,” which refers to an amino acid sequence variant of an antibody wherein one or more of the amino acid residues have been modified. Such variant necessarily have less than 100% sequence identity or similarity with the amino acid sequence having at least 75% amino acid sequence identity or similarity with the amino acid sequence of either the heavy or light chain variable domain of the antibody, more preferably at least 80%, more preferably at least 85%, more preferably at least 90%, and most preferably at least 95%. Since the method of the invention applies equally to both polypeptides, antibodies and fragments thereof, these terms are sometimes employed interchangeably.

[0128] The term “variable” in the context of variable domain of antibodies refers to the fact that certain portions of the variable domains differ extensively in sequence among antibodies and are used in the binding and specificity of each particular antibody for its particular antigen. However, the variability is not evenly distributed through the variable domains of antibodies. It is concentrated in three segments called complementarity determining regions (CDRs) also known as hypervariable regions both in the light chain and the heavy chain variable domains. There are at least two techniques for determining CDRs: (1) an approach based on cross-species sequence variability (i.e., Kabat et al., Sequences of Proteins of Immunological Interest (National Institute of Health, Bethesda, Md. 1987); and (2) an approach based on crystallographic studies of antigen-antibody complexes (Chothia, C. et al. (1989), Nature 342: 877). The more highly conserved portions of variable domains are called the framework (FR). The variable domains of native heavy and light chains each comprise four FR regions, largely adopting a .beta.-Sheet configuration, connected by three CDRs, which form loops connecting, and in some cases forming part of, the .beta.-sheet structure. The CDRs in each chain are held together in close proximity by the FR regions and, with the CDRs from the other chain, contribute to the formation of the antigen-binding site of antibodies (see Kabat et al.) The constant domains are not involved directly in binding an antibody to an antigen, but exhibit various effector functions, such as participation of the antibody in antibody-dependent cellular toxicity.

[0129] The term “antibody fragment” refers to a portion of a full-length antibody, generally the antigen binding or variable region. Examples of antibody fragments include Fab, Fab′, F(ab′)₂ and Fv fragments. Papain digestion of antibodies produces two identical antigen binding fragments, called the Fab fragment, each with a single antigen binding site, and a residual “Fc” fragment, so-called for its ability to crystallize readily. Pepsin treatment yields an F(ab′)₂ fragment that has two antigen binding fragments which are capable of crosslinking antigen, and a residual other fragment (which is termed pFc′). Additional fragments can include diabodies, linear antibodies, single-chain antibody molecules, and multispecific antibodies formed from antibody fragments. As used herein, “functional fragment” with respect to antibodies, refers to Fv, F(ab) and F(ab′)₂ fragments.

[0130] An “Fv” fragment is the minimum antibody fragment that contains a complete antigen recognition and binding site. This region consists of a dimer of one heavy and one light chain variable domain in a tight, non-covalent association (V_{H}-V_{L} dimer). It is in this configuration that the three CDRs of each variable domain interact to define an antigen-binding site on the surface of the V_{H}-V_{L} dimer. Collectively, the six CDRs confer antigen-binding specificity to the antibody. However, even a single variable domain (or half of an Fv comprising only three CDRs specific for an antigen) has the ability to recognize and bind antigen, although at a lower affinity than the entire binding site.

[0131] The Fab fragment [also designated as F(ab)] also contains the constant domain of the light chain and the first constant domain (CH1) of the heavy chain. Fab′ fragments differ from Fab fragments by the addition of a few residues at the carboxyl terminus of the heavy chain CH1 domain including one or more cysteines from the antibody hinge region. Fab′-SH is the designation herein for Fab′ in which the cysteine residue(s) of the constant domains have a free thiol group. F(ab′) fragments are produced by cleavage of the disulfide bond at the hinge cysteines of the F(ab′)₂ pepsin digestion product. Additional chemical couplings of antibody fragments are known to those of ordinary skill in the art.

[0132] The present invention further provides monoclonal antibody, polyclonal antibody as well as humanized antibody. In general, to generate antibodies, an isolated peptide is used as an immunogen and is administered to a mammalian organism, such as a rat, rabbit or mouse. The full-length protein, an antigenic peptide fragment or a fusion protein of the CCAT protein can be used. Particularly important fragments are those covering functional domains, some but not all the examples of the domains are identified in Table 1. Many methods are known for generating and/or identifying antibodies to a given target peptide. Several such methods are described by Harlow, Antibodies, Cold Spring Harbor Press, (1989).

[0133] The term “monoclonal antibody” as used herein refers to an antibody obtained from a population of substantially homogeneous antibodies, i.e., the individual antibodies comprising the population are identical except for possible naturally occurring mutations that may be present in minor amounts. Monoclonal antibodies are highly specific, being directed against a single antigenic site. Furthermore, in contrast to conventional (polyclonal) antibody preparations which typically include different antibodies directed against different determinants (epitopes), each monoclonal antibody is directed against a single determinant on the antigen. In additional to their specificity, the monoclonal antibodies are advantageous in that they are synthesized by the hybridoma culture, uncontaminated by other immunoglobulins. The modifier “monoclonal” antibody indicates the character of the antibody as being obtained from a substantially homogeneous population of antibodies, and is not to be construed as requiring production of the antibody by any particular method. For example, the monoclonal antibodies to be used in accordance with the present invention may be made by the hybridoma method first described by Kohler and Milstein, Nature 256, 495 (1975), or may be made by recombinant methods, e.g., as described in U.S. Pat. No. 4,816,567. The monoclonal antibodies for use with the present invention may also be isolated from phage antibody libraries using the techniques described in Clackson et al. Nature 352: 624-628 (1991), as well as in Marks et al., J. Mol. Biol. 222: 581-597 (1991). For detailed procedure for making a monoclonal antibody, see the Example below.

[0134] “Humanized” forms of non-human (e.g. murine or rabbit) antibodies are chimeric immunoglobulins, immunoglobulin chains or fragments thereof (such as Fv, Fab, Fab′, F(ab′).sub.2 or other antigen-binding subsequences of antibodies) which contain minimal sequence derived from non-human immunoglobulin. For the most part, humanized antibodies are human immunoglobulins (recipient antibody) in which residues from a complementary determining region (CDR) of the recipient are replaced by residues from a CDR of a non-human species (donor antibody) such as mouse, rat or rabbit having the desired specificity, affinity and capacity. In some instances, Fv framework residues of the human immunoglobulin are replaced by corresponding non-human residues. Furthermore, humanized antibody may comprise residues, which are found neither in the recipient antibody nor in the imported CDR or framework sequences. These modifications are made to further refine and optimize antibody performance. In general, the humanized antibody will comprise substantially all of at least one, and typically two, variable domains, in which all or substantially all of the CDR regions correspond to those of a non-human immunoglobulin and all or substantially all of the FR regions are those of a human immunoglobulin consensus sequence. The humanized antibody optimally also will comprise at least a portion of an immunoglobulin constant region (Fc), typically that of a human immunoglobulin. For further details, see: Jones et al., Nature 321, 522-525 (1986); Reichmann et al., Nature 332, 323-327 (1988) and Presta, Curr. Op. Struct. Biol. 2, 593-596 (1992).

[0135] Polyclonal antibodies may be prepared by any known method or modifications of these methods including obtaining antibodies from patients. For example, a complex of an immunogen such as CCAT protein, peptides or fragments thereof and a carrier protein is prepared and an animal is immunized by the complex according to the same manner as that described with respect to the above monoclonal antibody preparation and the description in the Example. A serum or plasma containing the antibody against the protein is recovered from the immunized animal and the antibody is separated and purified. The gamma globulin fraction or the IgG antibodies can be obtained, for example, by use of saturated ammonium sulfate or DEAE Sephadex, or other techniques known to those skilled in the art.

[0136] The antibody titer in the antiserum can be measured according to the same manner as that described above with respect to the supernatant of the hybridoma culture. Separation and purification of the antibody can be carried out according to the same separation and purification method of antibody as that described with respect to the above monoclonal antibody and in the Example.

[0137] The protein used here in as the immunogen is not limited to any particular type of immunogen. In one aspect, antibodies are preferably prepared from regions or discrete fragments of the CCAT proteins. Antibodies can be prepared from any region of the peptide as described herein. In particular, they are selected from a group consisting of SEQ ID NOS:2228-2638 and fragments of SEQ ID NOS:1-1233. An antigenic fragment will typically comprise at least 8 contiguous amino acid residues. The antigenic peptide can comprise, however, at least 10, 12, 14, 16 or more amino acid residues. Such fragments can be selected on a physical property, such as fragments correspond to regions that are located on the surface of the protein, e.g., hydrophilic regions or can be selected based on sequence uniqueness.

[0138] Antibodies may also be produced by inducing production in the lymphocyte population or by screening antibody libraries or panels of highly specific binding reagents as disclosed in Orlandi et al. (1989; Proc Natl Acad Sci 86:3833-3837) or Winter et al. (1991; Nature 349:293-299). A protein may be used in screening assays of phagemid or B-lymphocyte immunoglobulin libraries to identify antibodies having a desired specificity. Numerous protocols for competitive binding or immunoassays using either polyclonal or monoclonal antibodies with established specificities are well known in the art. Smith G. P., 1991, Curr. Opin. Biotechnol. 2: 668-673.

[0139] The antibodies of the present invention can also be generated using various phage display methods known in the art. In phage display methods, functional antibody domains are displayed on the surface of phage particles which carry the polynucleotide sequences encoding them. In a particular, such phage can be utilized to display antigen-binding domains expressed from a repertoire or combinatorial antibody library (e.g., human or murine). Phage expressing an antigen binding domain that binds the antigen of interest can be selected or identified with antigen, e.g., using labeled antigen or antigen bound or captured to a solid surface or bead. Phage used in these methods are typically filamentous phage including fd and M13 binding domains expressed from phage with Fab, Fv or disulfide stabilized Fv antibody domains recombinantly fused to either the phage gene III or gene VIII protein. Examples of phage display methods that can be used to make the antibodies of the present invention include those disclosed in Brinkman et al., J. Immunol. Methods 182:41-50 (1995); Ames et al., J. Immunol. Methods 184:177-186 (1995); Kettleborough et al., Eur. J. Immunol. 24:952-958 (1994); Persic et al., Gene 187 9-18 (1997); Burton et al., Advances in Immunology 57:191-280 (1994); PCT application No. PCT/GB91/01134; PCT publications WO 90/02809; WO 91/10737; WO 92/01047; WO 92/18619; WO 93/11236; WO 95/15982; WO 95/20401; and U.S. Pat. Nos. 5,698,426; 5,223,409; 5,403,484; 5,580,717; 5,427,908; 5,750,753; 5,821,047; 5,571,698; 5,427,908; 5,516,637; 5,780,225; 5,658,727; 5,733,743 and 5,969,108; each of which is incorporated herein by reference in its entirety.

[0140] Antibody can be also made recombinantly. When using recombinant techniques, the antibody variant can be produced intracellularly, in the periplasmic space, or directly secreted into the medium. If the antibody variant is produced intracellularly, as a first step, the particulate debris, either host cells or lysed fragments, is removed, for example, by centrifugation or ultrafiltration. Carter et al., Bio/Technology 10: 163-167 (1992) describe a procedure for isolating antibodies which are secreted to the periplasmic space of E. coli. Briefly, cell paste is thawed in the presence of sodium acetate (pH 3.5), EDTA, and phenylmethylsulfonylfluoride (PMSF) over about 30 minutes. Cell debris can be removed by centrifugation. Where the antibody variant is secreted into the medium, supernatants from such expression systems are generally first concentrated using a commercially available protein concentration filter, for example, an Amicon or Millipore Pellicon ultrafiltration unit. A protease inhibitor such as PMSF may be included in any of the foregoing steps to inhibit proteolysis and antibiotics may be included to prevent the growth of adventitious contaminants.

[0141] The antibodies or antigen binding fragments may also be produced by genetic engineering. The technology for expression of both heavy and light chain genes in E. coli is the subject the following PCT patent applications; publication number WO 901443, WO901443, and WO 9014424 and in Huse et al., 1989 Science 246:1275-1281. The general recombinant methods are well known in the art.

[0142] The antibody composition prepared from the cells can be purified using, for example, hydroxylapatite chromatography, gel elecrophoresis, dialysis, and affinity chromatography, with affinity chromatography being the preferred purification technique. The suitability of protein A as an affinity ligand depends on the species and isotype of any immunoglobulin Fc domain that is present in the antibody. Protein A can be used to purify antibodies that are based on human .delta.1, .delta.2 or .delta.4 heavy chains (Lindmark et al., J. Immunol. Meth. 62: 1-13 (1983)). Protein G is recommended for all mouse isotypes and for human .delta.3 (Guss et al., EMBO J. 5: 1567-1575 (1986)). The matrix to which the affinity ligand is attached is most often agarose, but other matrices are available. Mechanically stable matrices such as controlled pore glass or poly(styrenedivinyl)benzene allow for faster flow rates and shorter processing times than can be achieved with agarose. Where the antibody comprises a CH3 domain, the Bakerbond ABX™ resin (J. T. Baker, Phillipsburg, N.J.) is useful for purification. Other techniques for protein purification such as fractionation on an ion-exchange column, ethanol precipitation, Reverse Phase HPLC, chromatography on silica, chromatography on heparin SEPHAROSE™ chromatography on an anion or cation exchange resin (such as a polyaspartic acid column), chromatofocusing, SDS-PAGE, and ammonium sulfate precipitation are also available depending on the antibody to be recovered.

[0143] Following any preliminary purification step(s), the mixture comprising the antibody of interest and contaminants may be subjected to low pH hydrophobic interaction chromatography using an elution buffer at a pH between about 2.5-4.5, preferably performed at low salt concentrations (e.g., from about 0-0.25M salt).

### Antibody Uses

[0144] The antibodies can be used to isolate one of the proteins of the present invention by standard techniques, such as affinity chromatography or immunoprecipitation. The antibodies can facilitate the purification of the natural protein from cells and recombinantly produced protein expressed in host cells. In addition, such antibodies are useful to detect the presence of one of the proteins of the present invention in cells or tissues to determine the pattern of expression of the protein among various tissues in an organism and over the course of normal development. Experimental data as provided in Table 1 indicate that the CCAT of the present invention are overexpressed in colon tumor tissue. Further, such antibodies can be used to detect protein in situ, in vitro, or in a cell lysate or supernatant in order to evaluate the abundance and pattern of expression. Also, such antibodies can be used to assess abnormal tissue distribution or abnormal expression during development or progression of a biological condition. Antibody detection of circulating fragments of the full length protein can be used to identify turnover.

[0145] Further, the antibodies can be used to assess expression in disease states such as in active stages of the disease or in an individual with a predisposition toward disease related to the protein's function. When a disorder is caused by an inappropriate tissue distribution, developmental expression, level of expression of the protein, or expressed/processed form, the antibody can be prepared against the normal protein. Experimental data as provided in Table 1 indicates expression in human colon tumor tissues. If a disorder is characterized by a specific mutation in the protein, antibodies specific for this mutant protein can be used to assay for the presence of the specific mutant protein.

[0146] The antibodies can also be used to assess normal and aberrant subcellular localization of cells in the various tissues in an organism. Experimental data as provided in Table 1 indicates expression in human colon tumor tissues. The diagnostic uses can be applied, not only in genetic testing, but also in monitoring a treatment modality. Accordingly, where treatment is ultimately aimed at correcting expression level or the presence of aberrant sequence and aberrant tissue distribution or developmental expression, antibodies directed against the protein or relevant fragments can be used to monitor therapeutic efficacy. More detection and diagnosis methods are described in detail below.

[0147] Additionally, antibodies are useful in pharmacogenomic analysis. Thus, antibodies prepared against polymorphic proteins can be used to identify individuals that require modified treatment modalities. The antibodies are also useful as diagnostic tools as an immunological marker for aberrant protein analyzed by electrophoretic mobility, isoelectric point, tryptic peptide digest, and other physical assays known to those in the art.

[0148] The antibodies are also useful for tissue typing. Experimental data as provided in Table 1 indicates expression in human colon tumor tissues. Thus, where a specific protein has been correlated with expression in a specific tissue, antibodies that are specific for this protein can be used to identify a tissue type.

[0149] The antibodies are also useful for inhibiting protein function, for example, blocking the binding of the CCAT peptide to a binding partner such as a substrate or another antibody. These uses can also be applied in a therapeutic context in which treatment involves inhibiting the protein's function. An antibody can be used, for example, to block binding, thus modulating (agonizing or antagonizing) the peptides activity. Antibodies can be prepared against specific fragments containing sites required for function or against intact protein that is associated with a cell or cell membrane. More therapeutics methods are described in detail below.

[0150] The invention also encompasses kits for using antibodies to detect the presence of a protein in a biological sample. The kit can comprise antibodies such as a labeled or labelable antibody and a compound or agent for detecting protein in a biological sample; means for determining the amount of protein in the sample; means for comparing the amount of protein in the sample with a standard; and instructions for use. Such a kit can be supplied to detect a single protein or epitope or can be configured to detect one of a multitude of epitopes, such as in an antibody detection array. Arrays are described in detail below for nucleic acid arrays and similar methods have been developed for antibody arrays.

### Nucleic Acid Molecules

[0151] The present invention further provides isolated nucleic acid molecules that encode a CCAT peptide or protein of the present invention. Such nucleic acid molecules will consist of, consist essentially of, or comprise a nucleotide sequence that encodes one of the CCAT peptides of the present invention, an allelic variant thereof, or an ortholog or paralog thereof. The nucleic acid molecules and the fragments thereof of the present invention pertains, however, are not to be construed as encompassing fragments that may be disclosed publicly prior to the present invention.

[0152] As used herein, an “isolated” nucleic acid molecule is one that is separated from other nucleic acid present in the natural source of the nucleic acid. Preferably, an “isolated” nucleic acid is free of sequences which naturally flank the nucleic acid (i.e., sequences located at the 5′ and 3′ ends of the nucleic acid) in the genomic DNA of the organism from which the nucleic acid is derived. However, there can be some flanking nucleotide sequences, for example up to about 5 KB, 4 KB, 3 KB, 2 KB, or 1 KB or less, particularly contiguous peptide encoding sequences and peptide encoding sequences within the same gene but separated by introns in the genomic sequence. The important point is that the nucleic acid is isolated from remote and unimportant flanking sequences such that it can be subjected to the specific manipulations described herein such as recombinant expression, preparation of probes and primers, and other uses specific to the nucleic acid sequences.

[0153] Moreover, an “isolated” nucleic acid molecule, such as a transcript/cDNA molecule, can be substantially free of other cellular material, or culture medium when produced by recombinant techniques, or chemical precursors or other chemicals when chemically synthesized. However, the nucleic acid molecule can be fused to other coding or regulatory sequences and still be considered isolated.

[0154] For example, recombinant DNA molecules contained in a vector are considered isolated. Further examples of isolated DNA molecules include recombinant DNA molecules maintained in heterologous host cells or purified (partially or substantially) DNA molecules in solution. Isolated RNA molecules include in vivo or in vitro RNA transcripts of the isolated DNA molecules of the present invention. Isolated nucleic acid molecules according to the present invention further include such molecules produced synthetically.

[0155] The present invention further provides nucleic acid molecules that comprise the nucleotide sequences shown in Table 1, (SEQ ID NOS:1234-2227), or any nucleic acid molecule that encodes a protein provided in Table 1, (SEQ ID NOS:1-1233). A nucleic acid molecule comprises a nucleotide sequence when the nucleotide sequence is at least part of the final nucleotide sequence of the nucleic acid molecule. In such a fashion, the nucleic acid molecule can be only the nucleotide sequence or have additional nucleic acid residues, such as nucleic acid residues that are naturally associated with it or heterologous nucleotide sequences. Such a nucleic acid molecule can have a few additional nucleotides or can comprise several hundred or more additional nucleotides. A brief description of how various types of these nucleic acid molecules can be readily made/isolated is provided below.

[0156] In Table 1, human transcript sequences are provided. As discussed below, some of the non-coding regions, particularly gene regulatory elements such as promoters, are useful for a variety of purposes, e.g. control of heterologous gene expression, target for identifying gene activity modulating compounds, and are particularly claimed as fragments of the genomic sequence provided herein.

[0157] The isolated nucleic acid molecules can encode the mature protein plus additional amino or carboxyl-terminal amino acids, or amino acids interior to the mature peptide (when the mature form has more than one peptide chain, for instance). Such sequences may play a role in processing of a protein from precursor to a mature form, facilitate protein trafficking, prolong or shorten protein half-life or facilitate manipulation of a protein for assay or production, among other things. As generally is the case in situ, the additional amino acids may be processed away from the mature protein by cellular enzymes.

[0158] As mentioned above, the isolated nucleic acid molecules include, but are not limited to, the sequence encoding the CCAT peptide alone, the sequence encoding the mature peptide and additional coding sequences, such as a leader or secretory sequence (e.g., a pre-pro or pro-protein sequence), the sequence encoding the mature peptide, with or without the additional coding sequences, plus additional non-coding sequences, for example introns and non-coding 5′ and 3′ sequences such as transcribed but non-translated sequences that play a role in transcription, mRNA processing (including splicing and polyadenylation signals), ribosome binding and stability of mRNA. In addition, the nucleic acid molecule may be fused to a marker sequence encoding, for example, a peptide that facilitates purification.

[0159] Isolated nucleic acid molecules can be in the form of RNA, such as mRNA, or in the form DNA, including cDNA and genomic DNA obtained by cloning or produced by chemical synthetic techniques or by a combination thereof. The nucleic acid, especially DNA, can be double-stranded or single-stranded. Single-stranded nucleic acid can be the coding strand (sense strand) or the non-coding strand (anti-sense strand).

[0160] The invention further provides nucleic acid molecules that encode fragments of the peptides of the present invention as well as nucleic acid molecules that encode obvious variants of the CCAT proteins of the present invention that are described above. Such nucleic acid molecules may be naturally occurring, such as allelic variants (same locus), paralogs (different locus), and orthologs (different organism), or may be constructed by recombinant DNA methods or by chemical synthesis. Such non-naturally occurring variants may be made by mutagenesis techniques, including those applied to nucleic acid molecules, cells, or organisms. Accordingly, as discussed above, the variants can contain nucleotide substitutions, deletions, inversions and insertions. Variation can occur in either or both the coding and non-coding regions. The variations can produce both conservative and non-conservative amino acid substitutions.

[0161] The present invention further provides non-coding fragments of the nucleic acid molecules provided in Table 1. Preferred non-coding fragments include, but are not limited to, promoter sequences, enhancer sequences, gene modulating sequences and gene termination sequences. Such fragments are useful in controlling heterologous gene expression and in developing screens to identify gene-modulating agents. A promoter can readily be identified as being 5′ to the ATG start site in the genomic sequence.

[0162] A fragment comprises a contiguous nucleotide sequence greater than 12 or more nucleotides. Further, a fragment could at least 30, 40, 50, 100, 250 or 500 nucleotides in length. The length of the fragment will be based on its intended use. For example, the fragment can encode epitope bearing regions of the peptide, or can be useful as DNA probes and primers. Such fragments can be isolated using the known nucleotide sequence to synthesize an oligonucleotide probe. A labeled probe can then be used to screen a cDNA library, genomic DNA library, or mRNA to isolate nucleic acid corresponding to the coding region. Further, primers can be used in PCR reactions to clone specific regions of gene.

[0163] A probe/primer typically comprises substantially a purified oligonucleotide or oligonucleotide pair. The oligonucleotide typically comprises a region of nucleotide sequence that hybridizes under stringent conditions to at least about 12, 20, 25, 40, 50 or more consecutive nucleotides.

[0164] Orthologs, homologs, and allelic variants can be identified using methods well known in the art. As described in the Peptide Section, these variants comprise a nucleotide sequence encoding a peptide that is typically 60-70%, 70-80%, 80-90%, and more typically at least about 90-95% or more homologous to the nucleotide sequence shown in Table 1 or a fragment of this sequence. Such nucleic acid molecules can readily be identified as being able to hybridize under moderate to stringent conditions, to the nucleotide sequence shown in the Figure sheets or a fragment of the sequence. Allelic variants can readily be determined by genetic locus of the encoding gene.

[0165] As used herein, the term “hybridizes under stringent conditions” is intended to describe conditions for hybridization and washing under which nucleotide sequences encoding a peptide at least 60-70% homologous to each other typically remain hybridized to each other. The conditions can be such that sequences at least about 60%, at least about 70%, or at least about 80% or more homologous to each other typically remain hybridized to each other. Such stringent conditions are known to those skilled in the art and can be found in Current Protocols in Molecular Biology, John Wiley & Sons, N.Y. (1989), 6.3.1-6.3.6. One example of stringent hybridization conditions are hybridization in 6× sodium chloride/sodium citrate (SSC) at about 45 C, followed by one or more washes in 0.2×SSC, 0.1% SDS at 50-65 C. Examples of moderate to low stringency hybridization conditions are well known in the art.

### Nucleic Acid Molecule Uses

[0166] The nucleic acid molecules of the present invention are useful for probes, primers, chemical intermediates, and in biological assays. The nucleic acid molecules are useful as a hybridization probe for messenger RNA, transcript/cDNA and genomic DNA to isolate full-length cDNA and genomic clones encoding the peptide described in Table 1 and to isolate cDNA and genomic clones that correspond to variants (alleles, orthologs, etc.) producing the same or related peptides shown in Table 1.

[0167] The probe can correspond to any sequence along the entire length of the nucleic acid molecules provided in Table 1. Accordingly, it could be derived from 5′ noncoding regions, the coding region, and 3′ noncoding regions. However, as discussed, fragments are not to be construed as encompassing fragments disclosed prior to the present invention.

[0168] The nucleic acid molecules are also useful as primers for PCR to amplify any given region of a nucleic acid molecule and are useful to synthesize antisense molecules of desired length and sequence.

[0169] The nucleic acid molecules are also useful for constructing recombinant vectors. Such vectors include expression vectors that express a portion of, or all of, the peptide sequences. Vectors also include insertion vectors, used to integrate into another nucleic acid molecule sequence, such as into the cellular genome, to alter in situ expression of a gene and/or gene product. For example, an endogenous coding sequence can be replaced via homologous recombination with all or part of the coding region containing one or more specifically introduced mutations.

[0170] The nucleic acid molecules are also useful for expressing antigenic portions of the proteins.

[0171] The nucleic acid molecules are also useful as probes for determining the chromosomal positions of the nucleic acid molecules by means of in situ hybridization methods.

[0172] The nucleic acid molecules are also useful in making vectors containing the gene regulatory regions of the nucleic acid molecules of the present invention.

[0173] The nucleic acid molecules are also useful for designing ribozymes corresponding to all, or a part, of the mRNA produced from the nucleic acid molecules described herein. The nucleic acid molecules are also useful for making vectors that express part, or all, of the peptides.

[0174] The nucleic acid molecules are also useful for constructing host cells expressing a part, or all, of the nucleic acid molecules and peptides.

[0175] The nucleic acid molecules are also useful for constructing transgenic animals expressing all, or a part, of the nucleic acid molecules and peptides.

[0176] The nucleic acid molecules are also useful as hybridization probes for determining the presence, level, form and distribution of nucleic acid expression. Experimental data as provided in Table 1 indicate that the CCAT of the present invention are overexpressed in colon tumor tissue. Accordingly, the probes can be used to detect the presence of, or to determine levels of, a specific nucleic acid molecule in cells, tissues, and in organisms. The nucleic acid whose level is determined can be DNA or RNA. Accordingly, probes corresponding to the peptides described herein can be used to assess expression and/or gene copy number in a given cell, tissue, or organism. These uses are relevant for diagnosis of disorders involving an increase or decrease in CCAT protein expression relative to normal results.

[0177] In vitro techniques for detection of mRNA include Northern hybridizations and in situ hybridizations. In vitro techniques for detecting DNA include Southern hybridizations and in situ hybridization.

[0178] Probes can be used as a part of a diagnostic test kit for identifying cells or tissues that express a CCAT protein, such as by measuring a level of a CCAT-encoding nucleic acid in a sample of cells from a subject e.g., mRNA or genomic DNA, or determining if a CCAT gene has been mutated. Experimental data as provided in Table 1 indicate that the CCAT of the present invention are overexpressed in colon tumor tissue. More detection and diagnosis methods are described in detail below.

[0179] Nucleic acid expression assays are useful for drug screening to identify compounds that modulate CCAT nucleic acid expression.

[0180] The invention thus provides a method for identifying a compound that can be used to treat a disorder associated with nucleic acid expression of the CCAT gene, particularly biological and pathological processes that are mediated by the CCAT in cells and tissues that express it. Experimental data as provided in Table 1 indicates expression in human colon tumor tissues. The method typically includes assaying the ability of the compound to modulate the expression of the CCAT nucleic acid and thus identifying a compound that can be used to treat a disorder characterized by undesired CCAT nucleic acid expression. The assays can be performed in cell-based and cell-free systems. Cell-based assays include cells naturally expressing the CCAT nucleic acid or recombinant cells genetically engineered to express specific nucleic acid sequences.

[0181] The assay for CCAT nucleic acid expression can involve direct assay of nucleic acid levels, such as mRNA levels, or on collateral compounds involved in the signal pathway. Further, the expression of genes that are up- or down-regulated in response to the CCAT protein signal pathway can also be assayed. In this embodiment the regulatory regions of these genes can be operably linked to a reporter gene such as luciferase.

[0182] Thus, modulators of CCAT gene expression can be identified in a method wherein a cell is contacted with a candidate compound or agent and the expression of mRNA determined. The level of expression of CCAT mRNA in the presence of the candidate compound or agent is compared to the level of expression of CCAT mRNA in the absence of the candidate compound or agent. The candidate compound can then be identified as a modulator of nucleic acid expression based on this comparison and be used, for example to treat a disorder characterized by aberrant nucleic acid expression. When expression of mRNA is statistically significantly greater in the presence of the candidate compound than in its absence, the candidate compound is identified as a stimulator of nucleic acid expression. When nucleic acid expression is statistically significantly less in the presence of the candidate compound than in its absence, the candidate compound is identified as an inhibitor of nucleic acid expression.

[0183] The invention further provides methods of treatment, with the nucleic acid as a target, using a compound or an agent identified through drug screening as a gene modulator to modulate CCAT nucleic acid expression in cells and tissues that express the CCAT. Experimental data as provided in Table 1 indicate that the CCAT of the present invention are overexpressed in colon tumor tissue. Modulation includes both up-regulation (i.e. activation or agonization) or down-regulation (suppression or antagonization) or nucleic acid expression.

[0184] Alternatively, a modulator for nucleic acid expression can be a small molecule or drug identified using the screening assays described herein as long as the drug or small molecule inhibits the CCAT nucleic acid expression in the cells and tissues that express the protein. Experimental data as provided in Table 1 indicates expression in human colon tumor tissues.

[0185] The nucleic acid molecules are also useful for monitoring the effectiveness of modulating compounds or agents on the expression or activity of the CCAT gene in clinical trials or in a treatment regimen. Thus, the gene expression pattern can serve as a barometer for the continuing effectiveness of treatment with the compound, particularly with compounds to which a patient can develop resistance. The gene expression pattern can also serve as a marker indicative of a physiological response of the affected cells to the compound. Accordingly, such monitoring would allow either increased administration of the compound or the administration of alternative compounds to which the patient has not become resistant. Similarly, if the level of nucleic acid expression falls below a desirable level, administration of the compound could be commensurately decreased.

[0186] The nucleic acid molecules are also useful in diagnostic assays for qualitative changes in CCAT nucleic acid expression, and particularly in qualitative changes that lead to pathology. The nucleic acid molecules can be used to detect mutations in CCAT genes and gene expression products such as mRNA. The nucleic acid molecules can be used as hybridization probes to detect naturally occurring genetic mutations in the CCAT gene and thereby to determine whether a subject with the mutation is at risk for a disorder caused by the mutation. Mutations include deletion, addition, or substitution of one or more nucleotides in the gene, chromosomal rearrangement, such as inversion or transposition, modification of genomic DNA, such as aberrant methylation patterns or changes in gene copy number, such as amplification. Detection of a mutated form of the CCAT gene associated with a dysfunction provides a diagnostic tool for an active disease or susceptibility to disease when the disease results from overexpression, underexpression, or altered expression of a CCAT protein.

[0187] Individuals carrying mutations in the CCAT gene can be detected at the nucleic acid level by a variety of techniques. Genomic DNA can be analyzed directly or can be amplified by using PCR prior to analysis. RNA or cDNA can be used in the same way. In some uses, detection of the mutation involves the use of a probe/primer in a polymerase chain reaction (PCR) (see, e.g. U.S. Pat. Nos. 4,683,195 and 4,683,202), such as anchor PCR or RACE PCR, or, alternatively, in a ligation chain reaction (LCR) (see, e.g., Landegran et al., Science 241:1077-1080 (1988); and Nakazawa et al., PNAS 91:360-364 (1994)), the latter of which can be particularly useful for detecting point mutations in the gene (see Abravaya et al., Nucleic Acids Res. 23:675-682 (1995)). This method can include the steps of collecting a sample of cells from a patient, isolating nucleic acid (e.g., genomic, mRNA or both) from the cells of the sample, contacting the nucleic acid sample with one or more primers which specifically hybridize to a gene under conditions such that hybridization and amplification of the gene (if present) occurs, and detecting the presence or absence of an amplification product, or detecting the size of the amplification product and comparing the length to a control sample. Deletions and insertions can be detected by a change in size of the amplified product compared to the normal genotype. Point mutations can be identified by hybridizing amplified DNA to normal RNA or antisense DNA sequences.

[0188] Alternatively, mutations in a CCAT gene can be directly identified, for example, by alterations in restriction enzyme digestion patterns determined by gel electrophoresis.

[0189] Further, sequence-specific ribozymes (U.S. Pat. No. 5,498,531) can be used to score for the presence of specific mutations by development or loss of a ribozyme cleavage site. Perfectly matched sequences can be distinguished from mismatched sequences by nuclease cleavage digestion assays or by differences in melting temperature.

[0190] Sequence changes at specific locations can also be assessed by nuclease protection assays such as RNase and S1 protection or the chemical cleavage method. Furthermore, sequence differences between a mutant CCAT gene and a wild-type gene can be determined by direct DNA sequencing. A variety of automated sequencing procedures can be utilized when performing the diagnostic assays (Naeve, C. W., (1995) Biotechniques 19:448), including sequencing by mass spectrometry (see, e.g., PCT International Publication No. WO 94/16101; Cohen et al., Adv. Chromatogr. 36:127-162 (1996); and Griffin et al., Appl. Biochem. Biotechnol. 38:147-159 (1993)).

[0191] Other methods for detecting mutations in the gene include methods in which protection from cleavage agents is used to detect mismatched bases in RNA/RNA or RNA/DNA duplexes (Myers et al., Science 230:1242 (1985)); Cotton et al., PNAS 85:4397 (1988); Saleeba et al., Meth. Enzymol. 217:286-295 (1992)), electrophoretic mobility of mutant and wild type nucleic acid is compared (Orita et al., PNAS 86:2766 (1989); Cotton et al., Mutat. Res. 285:125-144 (1993); and Hayashi et al., Genet. Anal. Tech. Appl. 9:73-79 (1992)), and movement of mutant or wild-type fragments in polyacrylamide gels containing a gradient of denaturant is assayed using denaturing gradient gel electrophoresis (Myers et al., Nature 313:495 (1985)). Examples of other techniques for detecting point mutations include selective oligonucleotide hybridization, selective amplification, and selective primer extension.

[0192] The nucleic acid molecules are also useful for testing an individual for a genotype that while not necessarily causing the disease, nevertheless affects the treatment modality. Thus, the nucleic acid molecules can be used to study the relationship between an individual's genotype and the individual's response to a compound used for treatment (pharmacogenomic relationship). Accordingly, the nucleic acid molecules described herein can be used to assess the mutation content of the CCAT gene in an individual in order to select an appropriate compound or dosage regimen for treatment.

[0193] Thus nucleic acid molecules displaying genetic variations that affect treatment provide a diagnostic target that can be used to tailor treatment in an individual. Accordingly, the production of recombinant cells and animals containing these polymorphisms allow effective clinical design of treatment compounds and dosage regimens.

[0194] The nucleic acid molecules are thus useful as antisense constructs to control CCAT gene expression in cells, tissues, and organisms. A DNA antisense nucleic acid molecule is designed to be complementary to a region of the gene involved in transcription, preventing transcription and hence production of CCAT protein. An antisense RNA or DNA nucleic acid molecule would hybridize to the mRNA and thus block translation of mRNA into CCAT protein.

[0195] The nucleic acid of the present invention may also be used to specifically suppress gene expression by methods such as RNA interference (RNAi), which may also include cosuppression and quelling. This and antisense RNA or DNA of gene suppression are well known in the art. A review of this technique is found in Science 288:1370-1372, 2000. RNAi also operates on a post-transcriptional level and is sequence specific, but suppresses gene expression far more efficiently than antisense RNA. RNAi fragments, particularly double-stranded (ds) RNAi, can be also used to generate loss-of-function phenotypes.

[0196] The present invention relates to isolated RNA molecules (double-stranded; single-stranded) of from about 21 to about 25 nucleotides which mediate RNAi. As used herein, about 21 to about 25 nt includes nucleotides 17, 18, 19, 20, 21, 22, 23, 24, 25, 26, 27, 28 and 29 nucleotides in length. The isolated RNAs of the present invention mediate degradation of mRNA, the transcriptional product of a gene. Such mRNA is also referred to herein as mRNA to be degraded. As used herein, the terms RNA, RNA molecule(s), RNA segment(s) and RNA fragment(s) are used interchangeably to refer to RNA that mediates RNA interference. These terms include double-stranded RNA, single-stranded RNA, isolated RNA (partially purified RNA, essentially pure RNA, synthetic RNA, recombinantly produced RNA), as well as altered RNA that differs from naturally occurring RNA by the addition, deletion, substitution and/or alteration of one or more nucleotides. Such alterations can include addition of non-nucleotide material, such as to the end(s) of the 21-25 nt RNA or internally (at one or more nucleotides of the RNA). Nucleotides in the RNA molecules of the present invention can also comprise non-standard nucleotides, including non-naturally occurring nucleotides or deoxyribonucleotides. Collectively, all such altered RNAs are referred to as analogs or analogs of naturally-occurring RNA. RNA of 21-25 nucleotides of the present invention need only be sufficiently similar to natural RNA that it has the ability to mediate RNAi. As used herein the phrase “mediates RNAi” refers to the ability to distinguish which RNAs are to be degraded by the RNAi machinery or process. RNA that mediates RNAi interacts with the RNAi machinery such that it directs the degradation of particular mRNAs. Such RNA may include RNAs of various structure, including short hairpin RNA.

[0197] In one embodiment, the present invention relates to RNA molecules of about 21 to about 25 nucleotides that direct cleavage of specific mRNA to which their sequence corresponds. It is not necessary that there be perfect correspondence of the sequences, but the correspondence must be sufficient to enable the RNA to direct RNAi cleavage of the target mRNA (Holen et al. (2005) Nucleic Acids Res. 33, 4704-4710). In a particular embodiment, the 21-25 nt RNA molecules of the present invention comprise a 3′ hydroxyl group.

[0198] The present invention relates to 21-25 nt RNAs of specific genes, produced by chemical synthesis or recombinant DNA techniques, that mediate RNAi. As used herein, the term isolated RNA includes RNA obtained by any means, including processing or cleavage of dsRNA; production by chemical synthetic methods; and production by recombinant DNA techniques. The invention further relates to uses of the 21-25 nt RNAs, such as for therapeutic or prophylactic treatment and compositions comprising 21-25 nt RNAs that mediate RNAi, such as pharmaceutical compositions comprising 21-25 nt RNAs and an appropriate carrier.

[0199] The present invention also relates to a method of mediating RNA interference of genes of a patient. In one embodiment, RNA of about 21 to about 25 nt which targets the specific mRNA to be degraded is introduced into a patient's cells. The cells are maintained under conditions allowing degradation of the mRNA, resulting in RNA-mediated interference of the mRNA of the gene in the cells of the patient. Treatment of patients with cancer with the RNAi will inhibit the growth and spread of the cancer and reduce the tumor. Treatment of patients using RNAi can also be in combination with other anti-cancer compounds. The RNAi may be used in combination with other treatment modalities, such as chemotherapy, cryotherapy, hyperthermia, radiation therapy, and other similar treatments. In one embodiment, a chemotherapy agent was combined with the RNAi. In another embodiment, a chemotherapy named Gemzar was used.

[0200] Treatment of cancer or tumors in patients requires introduction of the RNA into the cancer or tumor cells. RNA may be directly introduced into the cell, or introduced extracellularly into a cavity, interstitial space, into the circulation of a patient, or introduced orally. Methods for oral introduction include direct mixing of the RNA with food, as well as engineered approaches in which a species that is used as food is engineered to express the RNA and then ingested. Physical methods of introducing nucleic acids, for example, injection directly into the cell or extracellular injection into the patient, may also be used. Vascular or extravascular circulation, the blood or lymph system, and the cerebrospinal fluid are sites where the RNA may be introduced. RNA may be introduced into an embryonic stem cell, or another multipotent cell derived from the patient. Physical methods of introducing nucleic acids include injection of a solution containing the RNA, bombardment by particles covered by the RNA, soaking cells or tissue in a solution of the RNA, or electroporation of cell membranes in the presence of the RNA. A viral construct packaged into a viral particle may be used to introduce an expression construct into the cell, with the construct expressing RNA. Other methods known in the art for introducing nucleic acids to cells may be used, such as lipid-mediated carrier transport, chemical-mediated transport, and the like. Thus the RNA may be introduced along with components that perform one or more of the following activities: enhance RNA uptake by the cell, promote annealing of the duplex strands, stabilize the annealed strands, or otherwise increase inhibition of the target gene. The RNAi may be used in combination with other treatment modalities, such as chemotherapy, cryotherapy, hyperthermia, radiation therapy, and the like.

[0201] The present invention may be used alone or as a component of a kit having at least one of the reagents necessary to carry out the in vitro or in vivo introduction of RNA to tissue or patients. Preferred components are the dsRNA and a vehicle that promotes introduction of the dsRNA. Such a kit may also include instructions to allow a user of the kit to practice the invention.

[0202] Alternatively, a class of antisense molecules can be used to inactivate mRNA in order to decrease expression of CCAT nucleic acid. Accordingly, these molecules can treat a disorder characterized by abnormal or undesired CCAT nucleic acid expression. This technique involves cleavage by means of ribozymes containing nucleotide sequences complementary to one or more regions in the mRNA that attenuate the ability of the mRNA to be translated. Possible regions include coding regions and particularly coding regions corresponding to the catalytic and other functional activities of the CCAT protein, such as substrate binding.

[0203] The nucleic acid molecules also provide vectors for gene therapy in patients containing cells that are aberrant in CCAT gene expression. Thus, recombinant cells, which include the patient's cells that have been engineered ex vivo and returned to the patient, are introduced into an individual where the cells produce the desired CCAT protein to treat the individual.

[0204] The invention also encompasses kits for detecting the presence of a CCAT nucleic acid in a biological sample. Experimental data as provided in Table 1 indicate that the CCAT of the present invention are overexpressed in colon tumor tissue. For example, the kit can comprise reagents such as a labeled or labelable nucleic acid or agent capable of detecting CCAT nucleic acid in a biological sample; means for determining the amount of CCAT nucleic acid in the sample; and means for comparing the amount of CCAT nucleic acid in the sample with a standard. The compound or agent can be packaged in a suitable container. The kit can further comprise instructions for using the kit to detect CCAT protein mRNA or DNA.

### Vectors/Host Cells

[0205] The invention also provides vectors containing the nucleic acid molecules described herein. The term “vector” refers to a vehicle, preferably a nucleic acid molecule, which can transport the nucleic acid molecules. When the vector is a nucleic acid molecule, the nucleic acid molecules are covalently linked to the vector nucleic acid. With this aspect of the invention, the vector includes a plasmid, single or double stranded phage, a single or double stranded RNA or DNA viral vector, or artificial chromosome, such as a BAC, PAC, YAC, OR MAC.

[0206] A vector can be maintained in the host cell as an extrachromosomal element where it replicates and produces additional copies of the nucleic acid molecules. Alternatively, the vector may integrate into the host cell genome and produce additional copies of the nucleic acid molecules when the host cell replicates.

[0207] The invention provides vectors for the maintenance (cloning vectors) or vectors for expression (expression vectors) of the nucleic acid molecules. The vectors can function in prokaryotic or eukaryotic cells or in both (shuttle vectors). Expression vectors contain cis-acting regulatory regions that are operably linked in the vector to the nucleic acid molecules such that transcription of the nucleic acid molecules is allowed in a host cell. The nucleic acid molecules can be introduced into the host cell with a separate nucleic acid molecule capable of affecting transcription. Thus, the second nucleic acid molecule may provide a trans-acting factor interacting with the cis-regulatory control region to allow transcription of the nucleic acid molecules from the vector. Alternatively, a trans-acting factor may be supplied by the host cell. Finally, a trans-acting factor can be produced from the vector itself. It is understood, however, that in some embodiments, transcription and/or translation of the nucleic acid molecules can occur in a cell-free system.

[0208] The regulatory sequences to which the nucleic acid molecules described herein can be operably linked include promoters for directing mRNA transcription. These include, but are not limited to, the left promoter from bacteriophage, the lac, TRP, and TAC promoters from E. coli, the early and late promoters from SV40, the CMV immediate early promoter, the adenovirus early and late promoters, and retrovirus long-terminal repeats.

[0209] In addition to control regions that promote transcription, expression vectors may also include regions that modulate transcription, such as repressor binding sites and enhancers. Examples include the SV40 enhancer, the cytomegalovirus immediate early enhancer, polyoma enhancer, adenovirus enhancers, and retrovirus LTR enhancers.

[0210] In addition to containing sites for transcription initiation and control, expression vectors can also contain sequences necessary for transcription termination and, in the transcribed region a ribosome binding site for translation. Other regulatory control elements for expression include initiation and termination codons as well as polyadenylation signals. The person of ordinary skill in the art would be aware of the numerous regulatory sequences that are useful in expression vectors. Such regulatory sequences are described, for example, in Sambrook et al., Molecular Cloning: A Laboratory Manual. 3rd. ed., Cold Spring Harbor Laboratory Press, Cold Spring Harbor, N.Y., (2001).

[0211] A variety of expression vectors can be used to express a nucleic acid molecule. Such vectors include chromosomal, episomal, and virus-derived vectors, for example vectors derived from bacterial plasmids, from bacteriophage, from yeast episomes, from yeast chromosomal elements, including yeast artificial chromosomes, from viruses such as baculoviruses, papovaviruses such as SV40, Vaccinia viruses, adenoviruses, poxviruses, pseudorabies viruses, and retroviruses. Vectors may also be derived from combinations of these sources such as those derived from plasmid and bacteriophage genetic elements, e.g. cosmids and phagemids. Appropriate cloning and expression vectors for prokaryotic and eukaryotic hosts are described in Sambrook et al., Molecular Cloning: A Laboratory Manual. 3rd. ed., Cold Spring Harbor Laboratory Press, Cold Spring Harbor, N.Y., (2001).

[0212] The regulatory sequence may provide constitutive expression in one or more host cells (i.e. tissue specific) or may provide for inducible expression in one or more cell types such as by temperature, nutrient additive, or exogenous factor such as a hormone or other ligand. A variety of vectors providing for constitutive and inducible expression in prokaryotic and eukaryotic hosts are well known to those of ordinary skill in the art.

[0213] The nucleic acid molecules can be inserted into the vector nucleic acid by well-known methodology. Generally, the DNA sequence that will ultimately be expressed is joined to an expression vector by cleaving the DNA sequence and the expression vector with one or more restriction enzymes and then ligating the fragments together. Procedures for restriction enzyme digestion and ligation are well known to those of ordinary skill in the art.

[0214] The vector containing the appropriate nucleic acid molecule can be introduced into an appropriate host cell for propagation or expression using well-known techniques. Bacterial cells include, but are not limited to, E. coli, Streptomyces, and Salmonella typhimurium. Eukaryotic cells include, but are not limited to, yeast, insect cells such as Drosophila, animal cells such as COS and CHO cells, and plant cells.

[0215] As described herein, it may be desirable to express the peptide as a fusion protein. Accordingly, the invention provides fusion vectors that allow for the production of the peptides. Fusion vectors can increase the expression of a recombinant protein; increase the solubility of the recombinant protein, and aid in the purification of the protein by acting for example as a ligand for affinity purification. A proteolytic cleavage site may be introduced at the junction of the fusion moiety so that the desired peptide can ultimately be separated from the fusion moiety. Proteolytic enzymes include, but are not limited to, factor Xa, thrombin, and enteroenzyme. Typical fusion expression vectors include pGEX (Smith et al., Gene 67:31-40 (1988)), pMAL (New England Biolabs, Beverly, Mass.) and pRIT5 (Pharmacia, Piscataway, N.J.) which fuse glutathione S-transferase (GST), maltose E binding protein, or protein A, respectively, to the target recombinant protein. Examples of suitable inducible non-fusion E. coli expression vectors include pTrc (Amann et al., Gene 69:301-315 (1988)) and pET 11d (Studier et al., Gene Expression Technology: Methods in Enzymology 185:60-89 (1990)). Recombinant protein expression can be maximized in host bacteria by providing a genetic background wherein the host cell has an impaired capacity to proteolytically cleave the recombinant protein. (Gottesman, S., Gene Expression Technology: Methods in Enzymology 185, Academic Press, San Diego, Calif. (1990) 119-128). Alternatively, the sequence of the nucleic acid molecule of interest can be altered to provide preferential codon usage for a specific host cell, for example E. coli. (Wada et al., Nucleic Acids Res. 20:2111-2118 (1992)).

[0216] The nucleic acid molecules can also be expressed by expression vectors that are operative in yeast. Examples of vectors for expression in yeast e.g., S. cerevisiae include pYepSec1 (Baldari, et al., EMBO J. 6:229-234 (1987)), pMFa (Kurjan et al., Cell 30:933-943 (1982)), pJRY88 (Schultz et al., Gene 54:113-123 (1987)), and pYES2 (Invitrogen Corporation, San Diego, Calif.).

[0217] The nucleic acid molecules can also be expressed in insect cells using, for example, baculovirus expression vectors. Baculovirus vectors available for expression of proteins in cultured insect cells (e.g., Sf 9 cells) include the pAc series (Smith et al., Mol. Cell. Biol. 3:2156-2165 (1983)) and the pVL series (Lucklow et al., Virology 170:31-39 (1989)).

[0218] In certain embodiments of the invention, the nucleic acid molecules described herein are expressed in mammalian cells using mammalian expression vectors. Examples of mammalian expression vectors include pCDM8 (Seed, B. Nature 329:840 (1987)) and pMT2PC (Kaufman et al., EMBO J. 6:187-195 (1987)).

[0219] The expression vectors listed herein are provided by way of example only of the well-known vectors available to those of ordinary skill in the art that would be useful to express the nucleic acid molecules. The person of ordinary skill in the art would be aware of other vectors suitable for maintenance propagation or expression of the nucleic acid molecules described herein. These are found for example in Sambrook, J., Fritsh, E. F., and Maniatis, T. Molecular Cloning: A Laboratory Manual. 3rd. ed., Cold Spring Harbor Laboratory Press, Cold Spring Harbor, N.Y., (2001).

[0220] The invention also encompasses vectors in which the nucleic acid sequences described herein are cloned into the vector in reverse orientation, but operably linked to a regulatory sequence that permits transcription of antisense RNA. Thus, an antisense transcript can be produced to all, or to a portion, of the nucleic acid molecule sequences described herein, including both coding and non-coding regions. Expression of this antisense RNA is subject to each of the parameters described above in relation to expression of the sense RNA (regulatory sequences, constitutive or inducible expression, tissue-specific expression).

[0221] The invention also relates to recombinant host cells containing the vectors described herein. Host cells therefore include prokaryotic cells, lower eukaryotic cells such as yeast, other eukaryotic cells such as insect cells, and higher eukaryotic cells such as mammalian cells.

[0222] The recombinant host cells are prepared by introducing the vector constructs described herein into the cells by techniques readily available to the person of ordinary skill in the art. These include, but are not limited to, calcium phosphate transfection, DEAE-dextran-mediated transfection, cationic lipid-mediated transfection, electroporation, transduction, infection, lipofection, and other techniques such as those found in Sambrook, et al. (Molecular Cloning: A Laboratory Manual. 3rd. ed., Cold Spring Harbor Laboratory Press, Cold Spring Harbor, N.Y., (2001).

[0223] Host cells can contain more than one vector. Thus, different nucleotide sequences can be introduced on different vectors of the same cell. Similarly, the nucleic acid molecules can be introduced either alone or with other nucleic acid molecules that are not related to the nucleic acid molecules such as those providing trans-acting factors for expression vectors. When more than one vector is introduced into a cell, the vectors can be introduced independently, co-introduced or joined to the nucleic acid molecule vector.

[0224] In the case of bacteriophage and viral vectors, these can be introduced into cells as packaged or encapsulated virus by standard procedures for infection and transduction. Viral vectors can be replication-competent or replication-defective. In the case in which viral replication is defective, replication will occur in host cells providing functions that complement the defects.

[0225] Vectors generally include selectable markers that enable the selection of the subpopulation of cells that contain the recombinant vector constructs. The marker can be contained in the same vector that contains the nucleic acid molecules described herein or may be on a separate vector. Markers include tetracycline or ampicillin-resistance genes for prokaryotic host cells and dihydrofolate reductase or neomycin resistance for eukaryotic host cells. However, any marker that provides selection for a phenotypic trait will be effective.

[0226] While the mature proteins can be produced in bacteria, yeast, mammalian cells, and other cells under the control of the appropriate regulatory sequences, cell-free transcription and translation systems can also be used to produce these proteins using RNA derived from the DNA constructs described herein.

[0227] Where secretion of the peptide is desired, which is difficult to achieve with multi-transmembrane domain containing proteins such as CCATs, appropriate secretion signals are incorporated into the vector. The signal sequence can be endogenous to the peptides or heterologous to these peptides.

[0228] Where the peptide is not secreted into the medium, which is typically the case with CCATs, the protein can be isolated from the host cell by standard disruption procedures, including freeze thaw, sonication, mechanical disruption, use of lysing agents and the like. The peptide can then be recovered and purified by well-known purification methods including ammonium sulfate precipitation, acid extraction, anion or cationic exchange chromatography, phosphocellulose chromatography, hydrophobic-interaction chromatography, affinity chromatography, hydroxylapatite chromatography, lectin chromatography, or high performance liquid chromatography.

[0229] It is also understood that depending upon the host cell in recombinant production of the peptides described herein, the peptides can have various glycosylation patterns, depending upon the cell, or maybe non-glycosylated as when produced in bacteria. In addition, the peptides may include an initial modified methionine in some cases as a result of a host-mediated process.

### Uses of Vectors and Host Cells

[0230] The recombinant host cells expressing the peptides described herein have a variety of uses. First, the cells are useful for producing a CCAT protein or peptide that can be further purified to produce desired amounts of CCAT protein or fragments. Thus, host cells containing expression vectors are useful for peptide production.

[0231] Host cells are also useful for conducting cell-based assays involving the CCAT protein or CCAT protein fragments, such as those described above as well as other formats known in the art. Thus, a recombinant host cell expressing a native CCAT protein is useful for assaying compounds that stimulate or inhibit CCAT protein function.

[0232] Host cells are also useful for identifying CCAT protein mutants in which these functions are affected. If the mutants naturally occur and give rise to a pathology, host cells containing the mutations are useful to assay compounds that have a desired effect on the mutant CCAT protein (for example, stimulating or inhibiting function) which may not be indicated by their effect on the native CCAT protein.

[0233] Genetically engineered host cells can be further used to produce non-human transgenic animals. A transgenic animal is preferably a mammal, for example a rodent, such as a rat or mouse, in which one or more of the cells of the animal include a transgene. A transgene is exogenous DNA which is integrated into the genome of a cell from which a transgenic animal develops and which remains in the genome of the mature animal in one or more cell types or tissues of the transgenic animal. These animals are useful for studying the function of a CCAT protein and identifying and evaluating modulators of CCAT protein activity. Other examples of transgenic animals include non-human primates, sheep, dogs, cows, goats, chickens, and amphibians.

[0234] A transgenic animal can be produced by introducing nucleic acid into the male pronuclei of a fertilized oocyte, e.g., by microinjection, retroviral infection, and allowing the oocyte to develop in a pseudopregnant female foster animal. Any of the CCAT protein nucleotide sequences can be introduced as a transgene into the genome of a non-human animal, such as a mouse.

[0235] Any of the regulatory or other sequences useful in expression vectors can form part of the transgenic sequence. This includes intronic sequences and polyadenylation signals, if not already included. A tissue-specific regulatory sequence(s) can be operably linked to the transgene to direct expression of the CCAT protein to particular cells.

[0236] Methods for generating transgenic animals via embryo manipulation and microinjection, particularly animals such as mice, have become conventional in the art and are described, for example, in U.S. Pat. Nos. 4,736,866 and 4,870,009, both by Leder et al., U.S. Pat. No. 4,873,191 by Wagner et al. and in Hogan, B., Manipulating the Mouse Embryo, (Cold Spring Harbor Laboratory Press, Cold Spring Harbor, N.Y., 1986). Similar methods are used for production of other transgenic animals. A transgenic founder animal can be identified based upon the presence of the transgene in its genome and/or expression of transgenic mRNA in tissues or cells of the animals. A transgenic founder animal can then be used to breed additional animals carrying the transgene. Moreover, transgenic animals carrying a transgene can further be bred to other transgenic animals carrying other transgenes. A transgenic animal also includes animals in which the entire animal or tissues in the animal have been produced using the homologously recombinant host cells described herein.

[0237] In another embodiment, transgenic non-human animals can be produced which contain selected systems that allow for regulated expression of the transgene. One example of such a system is the cre/loxP recombinase system of bacteriophage P1. For a description of the cre/loxP recombinase system, see, e.g., Lakso et al. PNAS 89:6232-6236 (1992). Another example of a recombinase system is the FLP recombinase system of S. cerevisiae (O'Gorman et al. Science 251:1351-1355 (1991). If a cre/loxP recombinase system is used to regulate expression of the transgene, animals containing transgenes encoding both the Cre recombinase and a selected protein is required. Such animals can be provided through the construction of “double” transgenic animals, e.g., by mating two transgenic animals, one containing a transgene encoding a selected protein and the other containing a transgene encoding a recombinase.

[0238] Clones of the non-human transgenic animals described herein can also be produced according to the methods described in Wilmut, I. et al. Nature 385:810-813 (1997) and PCT International Publication Nos. WO 97/07668 and WO 97/07669. In brief, a cell, e.g., a somatic cell, from the transgenic animal can be isolated and induced to exit the growth cycle and enter Go phase. The quiescent cell can then be fused, e.g., through the use of electrical pulses, to an enucleated oocyte from an animal of the same species from which the quiescent cell is isolated. The reconstructed oocyte is then cultured such that it develops to morula or blastocyst and then transferred to pseudopregnant female foster animal. The offspring born of this female foster animal will be a clone of the animal from which the cell, e.g., the somatic cell, is isolated.

[0239] Transgenic animals containing recombinant cells that express the peptides described herein are useful to conduct the assays described herein in an in vivo context. Accordingly, the various physiological factors that are present in vivo and that could effect substrate binding, CCAT protein activation, and signal transduction, may not be evident from in vitro cell-free or cell-based assays. Accordingly, it is useful to provide non-human transgenic animals to assay in vivo CCAT protein function, including substrate interaction, the effect of specific mutant CCAT proteins on CCAT protein function and substrate interaction, and the effect of chimeric CCAT proteins. It is also possible to assess the effect of null mutations, that is, mutations that substantially or completely eliminate one or more CCAT protein functions.

### Detection and Diagnosis

[0240] The present invention provides a method for detecting CCAT nucleic acids, proteins, peptides and fragments thereof that are differentially expressed in colon diseases in a test sample, preferably in a biological sample.

[0241] The present invention further provides a method for diagnosing the colon diseases, by detecting the nucleic acids, proteins, peptides and fragments thereof. The further embodiment includes but is not limited to, monitoring the disease prognosis (recurrence), diagnosing disease stage, preventing the disease and treating the disease.

[0242] As used herein, a “biological sample” can be collected from tissues, blood, sera, cell lines or biological fluids such as, plasma, interstitial fluid, urine, cerebrospinal fluid, and the like, containing cells. In preferred embodiments, a biological sample comprises cells or tissues suspected of having diseases (e.g., cells obtained from a biopsy).

[0243] As used herein, a “differential level” is defined as the level of CCAT protein or nucleic acids in a test sample either above or below the level of the ones in control samples, wherein the level of control samples is obtained either from a control cell line, a normal tissue or body fluids, or combination thereof, from a healthy subject.

[0244] As used herein, a “subject” can be a mammalian subject or non mammalian subject, preferably, a mammalian subject. A mammalian subject can be human or non-human, preferably human. A healthy subject is defined as a subject without detectable colon diseases or colon associated diseases by using conventional diagnostic methods.

[0245] As used herein the “diseases” include colon diseases and colon associated disease.

[0246] As used herein, “cancer” includes epithelial-cell related cancers, for example pancreatic, lung, colon, prostate, ovarian, breast, bladder renal, hepatocellular, pharyngeal and gastric cancers.

### Nucleic Acid Detections

[0247] The present invention is not limited to the detection methods described above. Any suitable detection method that allows for the specific detection of colon diseases cells, tissues or organs may be utilized. For example, in some embodiments, the expression of RNA corresponding to a CCAT gene is detected by hybridization to an antisense oligonucleotide (described below). In other embodiments, RNA expression is detected by hybridization assays such as Northern blots, RNase assays, reverse transcriptase PCR amplification, and the like. One preferred detection method is using RT PCR by using TaqMan technology (ABI, Foster City, Calif.).

[0248] In another embodiment, the present invention provides a method for diagnosing or detecting colon diseases in a subject comprising: determining the level of one or more CCAT nucleic acid molecules or any fragment(s) thereof in a test sample from said subject, wherein said CCAT nucleic acid molecule(s) comprises a sequence selected from a group consisting of SEQ ID NOS:1234-2227 and a combination thereof; wherein a differential level of said CCAT nucleic acid molecule(s) relative to the level of said nucleic acid molecule(s) in a test sample from a healthy subject, or the level established for a healthy subject, is indicative of colon diseases.

[0249] In another embodiment, the detecting or diagnosing method comprises determining level of differential expression of 2, 4, 8, 10, 20 or more nucleic acid molecules, preferably, the nucleic acid molecules comprise or consists of a sequence selected from the group consisting of SEQ ID NOS:1234-2227 and combination thereof.

[0250] In further embodiments of the present invention, the presence of particular sequences in the genome of a subject is detected. Such sequences include CCAT sequences associated with abnormal expression of CCAT (e.g., overexpression or expression at a physiological inappropriate time). These sequences include polymorphisms, including polymorphisms in the transcribed sequence (e.g., that effect CCAT processing and/or translation) and regulatory sequences such as promoters, enhances, repressors, and the like. These sequences may also include polymorphisms in genes or control sequences associated with factors that affect expression such as transcription factors, and the like. Any suitable method for detecting and/or identifying these sequences is within the scope of the present invention including, but not limited to, nucleic acid sequencing, hybridization assays (e.g., Southern blotting), single nucleotide polymorphism assays (See e.g., U.S. Pat. No. 5,994,069, herein incorporated by reference in its entirety), and the like.

### Protein Detections

[0251] The present invention provides methods for diagnosing or detecting the differential presence of CCAT protein. In some embodiments (e.g., where CCATs are overexpressed in diseased cells), CCAT proteins are detected directly. In other embodiments (e.g., where the presence of a CCATs are underexpressed), CCAT to the disease antigens are detected non-existence.

[0252] The diagnostic methods of the present invention find utility in the diagnosis and characterization of diseases. For example, the presence of an antibody to a specific protein may be indicative of a cancer or disease. In addition, certain CCAT may be indicative of a specific stage or sub-type of the same cancer or disease.

[0253] The information obtained is also used to determine prognosis and appropriate course of treatment. For example, it is contemplated that individuals with a specific CCAT expression or stage of colon diseases may respond differently to a given treatment that individuals lacking the CCAT expression. The information obtained from the diagnostic methods of the present invention thus provides for the personalization of diagnosis and treatment.

[0254] In one embodiment, the present invention provides a method for monitoring colon diseases treatment in a subject comprising: determining the level of one or more CCAT proteins or any fragment(s) or peptide(s) thereof in a test sample from said subject, wherein said CCAT protein(s) comprises a sequence selected from a group consisting of SEQ ID NOS:1-1233, SEQ ID NOS:2228-2638 and a combination thereof; wherein an level of said CCAT protein(s) similar to the level of said protein(s) in a test sample from a healthy subject, or the level established for a healthy subject, is indicative of successful treatment.

[0255] In another embodiment, the present invention provides a method for diagnosing recurrence of colon diseases following successful treatment in a subject comprising: determining the level of one or more CCAT proteins or any fragment(s) or peptide(s) thereof in a test sample from said subject, wherein said CCAT protein(s) comprises a sequence selected from a group consisting of SEQ ID NOS:1-1233, SEQ ID NOS:2228-2638 or a combination thereof; wherein a changed level of said CCAT protein(s) relative to the level of said protein(s) in a test sample from a healthy subject, or the level established for a healthy subject, is indicative of recurrence of colon diseases.

[0256] In yet another embodiment, the presend invention provides a method for diagnosing or detecting colon diseases in a subject comprising: determining the level of one or more CCAT proteins or any fragment(s) or peptides thereof in a test sample from said subject, wherein said CCAT protein(s) comprises a sequence selected from a group consisting of SEQ ID NOS:1-1233, SEQ ID NOS:2228-2638 and a combination thereof; wherein a differential level of said CCAT protein(s) relative to the level of said protein(s) in a test sample from a healthy subject, or the level established for a healthy subject, is indicative of colon diseases.

[0257] The detecting or diagnosing method comprises determining level of differential expression of 2, 4, 8, 10, 20 or more proteins, preferably, the proteins are selected from a group consisting of SEQ ID NOS:1-1233 and combination thereof.

[0258] Further, the detecting or diagnosing method comprises determining level of differential expression of 5, 10, 15, 20, 40, 60, 80, 100 or more CCAT peptides, preferably the peptides are selected from the group consisting of SEQ ID NOS:2228-2638 and combination thereof.

[0259] These methods are also useful for diagnosing diseases that show differential protein expression. As describe earlier, normal, control or standard values or level established from a healthy subject for protein expression are established by combining body fluids or tissue, cell extracts taken from a normal healthy mammalian or human subject with specific antibodies to a protein under conditions for complex formation. Standard values for complex formation in normal and diseased tissues are established by various methods, often photometric means. Then complex formation as it is expressed in a subject sample is compared with the standard values. Deviation from the normal standard and toward the diseased standard provides parameters for disease diagnosis or prognosis while deviation away from the diseased and toward the normal standard may be used to evaluate treatment efficacy.

[0260] In yet another embodiment, the present invention provides a detection or diagnostic method of CCATs by using LC/MS. The proteins from cells are prepared by methods known in the art (R. Aebersold Nature Biotechnology Volume 21 Number 6 Jun. 2003). The differential expression of proteins in disease and healthy samples are quantitated using Mass Spectrometry and ICAT (Isotope Coded Affinity Tag) labeling, which is known in the art. ICAT is an isotope label technique that allows for discrimination between two populations of proteins, such as a healthy and a disease sample. The LC/MS spectra are collected for the labeled samples. The raw scans from the LC/MS instrument are subjected to peak detection and noise reduction software. Filtered peak lists are then used to detect ‘features’ corresponding to specific peptides from the original sample(s). Features are characterized by their mass/charge, charge, retention time, isotope pattern and intensity.

[0261] The intensity of a peptide present in both healthy and disease samples can be used to calculate the differential expression, or relative abundance, of the peptide. The intensity of a peptide found exclusively in one sample can be used to calculate a theoretical expression ratio for that peptide (singleton). Expression ratios are calculated for each peptide of each replicate of the experiment (Table 1). Thus overexpression or under expression of CCAT protein or peptide are similar to the expression pattern in Table 1 in a test subject indicates the likelihood of having colon diseases or diseases associated with colon.

[0262] Immunological methods for detecting and measuring complex formation as a measure of protein expression using either specific polyclonal or monoclonal antibodies are known in the art. Examples of such techniques include enzyme-linked immunosorbent assays (ELISAs), radioimmunoassays (RIAs), fluorescence-activated cell sorting (FACS) and antibody arrays. Such immunoassays typically involve the measurement of complex formation between the protein and its specific antibody. These assays and their quantitation against purified, labeled standards are well known in the art (Ausubel, supra, unit 10.1-10.6). A two-site, monoclonal-based immunoassay utilizing antibodies reactive to two non-interfering epitopes is preferred, but a competitive binding assay may be employed (Pound (1998) Immunochemical Protocols, Humana Press, Totowa N.J.). More immunological detections are described in section below.

### Antibody Detections

[0263] Antibodies are useful to detect the presence of one of the proteins or fragments thereof, peptides of the present invention in cells or tissues to determine the pattern of expression of the protein among various tissues in an organism and over the course of normal development.

[0264] Further, as described above, the antibodies can be used to assess expression in disease states such as in active stages of the disease or in an individual with a predisposition toward disease related to the protein's function. The antibodies can also be used to assess normal and aberrant subcellular localization of cells in the various tissues in an organism.

[0265] Detection on a protein by an antibody can be facilitated by coupling (i.e., physically linking) the antibody to a detectable substance. Examples of detectable substances include various enzymes, prosthetic groups, fluorescent materials, luminescent materials, bioluminescent materials, and radioactive materials (see below). The antibodies may also be useful in diagnostic assays, e.g., for detecting expression of an antigen, for example CCAT protein, peptide or fragment thereof, in specific cells, tissues, blood, serum or body fluids.

[0266] For diagnostic applications, the antibody or its variant typically will be labeled with a detectable moiety. Numerous labels are available which can be generally grouped into the following categories:

[0267] (a) Radioisotopes, such as ³⁶S, ¹⁴C, ¹²⁵I, ³H, and ¹³¹I. The antibody variant can be labeled with the radioisotope using the techniques described in Current Protocols in Immunology, vol 1-2, Coligen et al., Ed., Wiley-Interscience, New York, Pubs. (1991) for example and radioactivity can be measured using scintillation counting.

[0268] (b) Fluorescent labels such as rare earth chelates (europium chelates) or fluorescein and its derivatives, rhodamine and its derivatives, dansyl, Lissamine, phycoerythrin and Texas Red are available. The fluorescent labels can be conjugated to the antibody variant using the techniques disclosed in Current Protocols in Immunology, supra, for example. Fluorescence can be quantified using a fluorimeter.

[0269] (c) Various enzyme-substrate labels are available and U.S. Pat. Nos. 4,275,149, 4,318,980 provides a review of some of these. The enzyme generally catalyzes a chemical alteration of the chromogenic substrate which can be measured using various techniques. For example, the enzyme may catalyze a color change in a substrate, which can be measured spectrophotometrically. Alternatively, the enzyme may alter the fluorescence or chemiluminescence of the substrate. Techniques for quantifying a change in fluorescence are described above. The chemiluminescent substrate becomes electronically excited by a chemical reaction and may then emit light which can be measured (using a chemiluminometer, for example) or donates energy to a fluorescent acceptor. Examples of enzymatic labels include luciferases (e.g., firefly luciferase and bacterial luciferase; U.S. Pat. No. 4,737,456), luciferin, 2,3-dihydrophthalazinediones, malate dehydrogenase, urease, peroxidase such as horseradish peroxidase (HRPO), alkaline phosphatase, .beta.-galactosidase, glucoamylase, lysozyme, saccharide oxidases (e.g., glucose oxidase, galactose oxidase, and glucose-6-phosphate dehydrogenase), heterocyclic oxidases (such as uricase and xanthine oxidase), lactoperoxidase, microperoxidase, and the like. Techniques for conjugating enzymes to antibodies are described in O'Sullivan et al., Methods for the Preparation of Enzyme-Antibody Conjugates for Use in Enzyme Immunoassay, in Methods in Enzyme. (Ed. J. Langone & H. Van Vunakis), Academic press, New York, 73: 147-166 (1981).

[0270] Sometimes, the label is indirectly conjugated with the antibody. The skilled artisan will be aware of various techniques for achieving this. For example, the antibody can be conjugated with biotin and any of the three broad categories of labels mentioned above can be conjugated with avidin, or vice versa. Biotin binds selectively to avidin and thus, the label can be conjugated with the antibody in this indirect manner. Alternatively, to achieve indirect conjugation of the label with the antibody, the antibody is conjugated with a small hapten (e.g. digloxin) and one of the different types of labels mentioned above is conjugated with an anti-hapten antibody (e.g. anti-digloxin antibody). Thus, indirect conjugation of the label with the antibody can be achieved.

[0271] In another embodiment of the invention, the antibody need not be labeled, and the presence thereof can be detected using a labeled antibody, which binds to the antibody.

[0272] The antibodies of the present invention may be employed in any known assay method, such as competitive binding assays, direct and indirect sandwich assays, and immunoprecipitation assays. Zola, Monoclonal Antibodies: A Manual of Techniques, pp. 147-158 (CRC Press, Inc. 1987).

[0273] The biological samples can then be tested directly for the presence of CCAT by assays (e.g., ELISA or radioimmunoassay) and format (e.g., microwells, dipstick (e.g., as described in International Patent Publication WO 93/03367), etc). Alternatively, proteins in the sample can be size separated (e.g., by polyacrylamide gel electrophoresis (PAGE)), in the presence or absence of sodium dodecyl sulfate (SDS), and the presence of CCAT detected by immunoblotting (e.g., Western blotting). Immunoblotting techniques are generally more effective with antibodies generated against a peptide corresponding to an epitope of a protein, and hence, are particularly suited to the present invention.

[0274] Antibody binding is detected by techniques known in the art (e.g., radioimmunoassay, ELISA (enzyme-linked immunosorbant assay), “sandwich” immunoassays, immunoradiometric assays, gel diffusion precipitation reactions, immunodiffusion assays, in situ immunoassays (e.g., using colloidal gold, enzyme or radioisotope labels, for example), Western blots, precipitation reactions, agglutination assays (e.g., gel agglutination assays, hemagglutination assays, etc.), complement fixation assays, immunofluorescence assays, protein A assays, and immunoelectrophoresis assays, etc.

[0275] In one embodiment, antibody binding is detected by detecting a label on the primary antibody. In another embodiment, the primary antibody is detected by detecting binding of a secondary antibody or reagent to the primary antibody. In a further embodiment, the secondary antibody is labeled. Many means are known in the art for detecting binding in an immunoassay and are within the scope of the present invention. As is well known in the art, the immunogenic peptide should be provided free of the carrier molecule used in any immunization protocol. For example, if the peptide was conjugated to KLH, it may be conjugated to BSA, or used directly, in a screening assay. In some embodiments, an automated detection assay is utilized. Methods for the automation of immunoassays are well known in the art (See e.g., U.S. Pat. Nos. 5,885,530, 4,981,785, 6,159,750, and 5,358,691, each of which is herein incorporated by reference). In some embodiments, the analysis and presentation of results is also automated. For example, in some embodiments, software that generates a prognosis based on the presence or absence of a series of antigens is utilized.

[0276] Competitive binding assays rely on the ability of a labeled standard to compete with the test sample for binding with a limited amount of antibody. The amount of antigen in the test sample is inversely proportional to the amount of standard that becomes bound to the antibodies. To facilitate determining the amount of standard that becomes bound, the antibodies generally are insolubilized before or after the competition. As a result, the standard and test sample that are bound to the antibodies may conveniently be separated from the standard and test sample, which remain unbound.

[0277] Sandwich assays involve the use of two antibodies, each capable of binding to a different immunogenic portion, or epitope, or the protein to be detected. In a sandwich assay, the test sample to be analyzed is bound by a first antibody, which is immobilized on a solid support, and thereafter a second antibody binds to the test sample, thus forming an insoluble three-part complex. See e.g., U.S. Pat. No. 4,376,110. The second antibody may itself be labeled with a detectable moiety (direct sandwich assays) or may be measured using an anti-immunoglobulin antibody that is labeled with a detectable moiety (indirect sandwich assay). For example, one type of sandwich assay is an ELISA assay, in which case the detectable moiety is an enzyme.

[0278] The antibodies may also be used for in vivo diagnostic assays. Generally, the antibody is labeled with a radionucleotide (such as ¹¹¹In ⁹⁹Tc, ¹⁴C, ¹³¹I, ³H, ³²P or ³⁵S) so that the tumor can be localized using immunoscintiography. In one embodiment, antibodies or fragments thereof bind to the extracellular domains of two or more CCAT targets and the affinity value (Kd) is less than 1×10⁸ M.

[0279] Antibodies for diagnostic use may be labeled with probes suitable for detection by various imaging methods. Methods for detection of probes include, but are not limited to, fluorescence, light, confocal and electron microscopy; magnetic resonance imaging and spectroscopy; fluoroscopy, computed tomography and positron emission tomography. Suitable probes include, but are not limited to, fluorescein, rhodamine, eosin and other fluorophores, radioisotopes, gold, gadolinium and other lanthanides, paramagnetic iron, fluorine-18 and other positron-emitting radionuclides. Additionally, probes may be bi- or multi-functional and be detectable by more than one of the methods listed. These antibodies may be directly or indirectly labeled with said probes. Attachment of probes to the antibodies includes covalent attachment of the probe, incorporation of the probe into the antibody, and the covalent attachment of a chelating compound for binding of probe, amongst others well recognized in the art.

[0280] For immunohistochemistry, the disease tissue sample may be fresh or frozen or may be embedded in paraffin and fixed with a preservative such as formalin (see Example). The fixed or embedded section contains the sample are contacted with a labeled primary antibody and secondary antibody, wherein the antibody is used to detect the CCAT protein express in situ. The detailed procedure is shown in the Example.

### Array:

[0281] Array technologies and quantitative PCR provide the means to explore the expression profiles of a large number of related or unrelated genes, and proteins. When an expression profile is examined, arrays provide a platform for examining which genes or proteins are tissue-specific, carrying out housekeeping functions, parts of a signaling cascade, or specifically related to a particular genetic predisposition, condition, disease, or disorder. The potential application of gene or protein expression profiling is particularly relevant to improving diagnosis, prognosis, and treatment of disease. For example, both the sequences and the amount of expression can be compared between tissues from subjects with different types of colon diseases and cytologically normal healthy tissue.

[0282] “Array” refers to an ordered arrangement of at least two transcripts, proteins or peptides, or antibodies on a substrate. At least one of the transcripts, proteins, or antibodies represents a control or standard, and the other transcript, protein, or antibody is of diagnostic or therapeutic interest. The arrangement of at least two and up to about 40,000 transcripts, proteins, or antibodies on the substrate assures that the size and signal intensity of each labeled complex, formed between each transcript and at least one nucleic acid, each protein and at least one ligand or antibody, or each antibody and at least one protein to which the antibody specifically binds, is individually distinguishable.

[0283] An “expression profile” is a representation of gene expression in a sample. A nucleic acid expression profile is produced using sequencing, hybridization, or amplification technologies using transcripts from a sample. A protein expression profile, although time delayed, minors the nucleic acid expression profile and is produced using gel electrophoresis, mass spectrometry, or an array and labeling moieties or antibodies which specifically bind the protein. The nucleic acids, proteins, or antibodies specifically binding the protein may be used in solution or attached to a substrate, and their detection is based on methods well known in the art.

[0284] A substrate includes but not limits to, paper, nylon or other type of membrane, filter, chip, glass slide, or any other suitable solid support.

[0285] The invention also provides an array with a cDNA or transcript encoding CCAT proteins or peptides or fragments thereof, antibodies which specifically bind CCAT proteins, peptides or fragments thereof. Preferably, two or more of the nucleic acid molecules (e.g., SEQ ID NOS:1234-2227), proteins (e.g., SEQ ID NOS:1-1233) or peptides (e.g., SEQ ID NOS:2228-2638) are immobilized on a substrate.

[0286] The present invention also provides an antibody array. Antibody arrays have allowed the development of techniques for high-throughput screening of recombinant antibodies. Such methods use robots to pick and grid bacteria containing antibody genes, and a filter-based ELISA to screen and identify clones that express antibody fragments. Because liquid handling is eliminated and the clones are arrayed from master stocks, the same antibodies can be spotted multiple times and screened against multiple antigens simultaneously. For more information, see de Wildt et al. (2000) Nat Biotechnol 18:989-94.

[0287] The array is prepared and used according to the methods described in U.S. Pat. No. 5,837,832, Chee et al., PCT application WO95/11995 (Chee et al.), Lockhart, D. J. et al. (1996; Nat. Biotech. 14: 1675-1680) and Schena, M. et al. (1996; Proc. Natl. Acad. Sci. 93: 10614-10619), U.S. Pat. No. 5,807,522, Brown et al., all of which are incorporated herein in their entirety by reference.

[0288] In one embodiment, a nucleic acid array or a microarray, preferably composed of a large number of unique, single-stranded nucleic acid sequences, usually either synthetic antisense oligonucleotides or fragments of cDNAs, fixed to a solid support. The oligonucleotides are preferably about 6-60 nucleotides in length, more preferably 15-30 nucleotides in length, and most preferably about 20-25 nucleotides in length.

[0289] In order to produce oligonucleotides to a known sequence for an array, the gene(s) of interest (or an ORF identified from the contigs of the present invention) is typically examined using a computer algorithm which starts at the 5′ or at the 3′ end of the nucleotide sequence. Typical algorithms will then identify oligomers of defined length that are unique to the gene, have a GC content within a range suitable for hybridization, and lack predicted secondary structure that may interfere with hybridization. In certain situations it may be appropriate to use pairs of oligonucleotides on an array. The “pairs” will be identical, except for one nucleotide that preferably is located in the center of the sequence. The second oligonucleotide in the pair (mismatched by one) serves as a control. The number of oligonucleotide pairs may range from two to one million. The oligomers are synthesized at designated areas on a substrate using a light-directed chemical process, wherein the substrate may be paper, nylon or other type of membrane, filter, chip, glass slide or any other suitable solid support as described above.

[0290] In another aspect, an oligonucleotide may be synthesized on the surface of the substrate by using a chemical coupling procedure and an ink jet application apparatus, as described in PCT application WO95/251116 (Baldeschweiler et al.) which is incorporated herein in its entirety by reference.

[0291] A gene expression profile comprises the expression of a plurality of transcripts as measured by after hybridization with a sample. The transcripts of the invention may be used as elements on an array to produce a gene expression profile. In one embodiment, the array is used to diagnose or monitor the progression of disease. Researchers can assess and catalog the differences in gene expression between healthy and diseased tissues or cells.

[0292] For example, the transcript or probe may be labeled by standard methods and added to a biological sample from a patient under conditions for the formation of hybridization complexes. After an incubation period, the sample is washed and the amount of label (or signal) associated with hybridization complexes, is quantified and compared with a standard value. If complex formation in the patient sample is significantly altered (higher or lower) in comparison to either a normal or disease standard, then differential expression indicates the presence of a disorder.

[0293] In order to provide standards for establishing differential expression, normal and disease expression profiles are established. This is accomplished by combining a sample taken from normal subjects, either animal or human or nonmammal, with a transcript under conditions for hybridization to occur. Standard hybridization complexes may be quantified by comparing the values obtained using normal subjects with values from an experiment in which a known amount of a purified sequence is used. Standard values obtained in this manner may be compared with values obtained from samples from patients who were diagnosed with a particular condition, disease, or disorder. Deviation from standard values toward those associated with a particular disorder is used to diagnose that disorder.

[0294] By analyzing changes in patterns of gene expression, disease can be diagnosed at earlier stages before the patient is symptomatic. The invention can be used to formulate a prognosis and to design a treatment regimen. The invention can also be used to monitor the efficacy of treatment. For treatments with known side effects, the array is employed to improve the treatment regimen. A dosage is established that causes a change in genetic expression patterns indicative of successful treatment. Expression patterns associated with the onset of undesirable side effects are avoided.

[0295] In another embodiment, animal models which mimic a human disease can be used to characterize expression profiles associated with a particular condition, disease, or disorder; or treatment of the condition, disease, or disorder. Novel treatment regimens may be tested in these animal models using arrays to establish and then follow expression profiles over time. In addition, arrays may be used with cell cultures or tissues removed from animal models to rapidly screen large numbers of candidate drug molecules, looking for ones that produce an expression profile similar to those of known therapeutic drugs, with the expectation that molecules with the same expression profile will likely have similar therapeutic effects. Thus, the invention provides the means to rapidly determine the molecular mode of action of a drug.

[0296] Such assays may also be used to evaluate the efficacy of a particular therapeutic treatment regimen in animal studies or in clinical trials or to monitor the treatment of an individual patient. Once the presence of a condition is established and a treatment protocol is initiated, diagnostic assays may be repeated on a regular basis to determine if the level of expression in the patient begins to approximate that which is observed in a normal subject. The results obtained from successive assays may be used to show the efficacy of treatment over a period ranging from several days to years.

### Treatment

[0297] The following terms, as used in the present specification and claims, are intended to have the meaning as defined below, unless indicated otherwise.

[0298] “Treat,” “treating” or “treatment” of a disease includes: (1) inhibiting the disease, i.e., arresting or reducing the development of the disease or its clinical symptoms, or (2) relieving the disease, i.e., causing regression of the disease or its clinical symptoms.

[0299] A “therapeutically effective amount” means the amount of an agent that, when administered to a subject for treating a disease, is sufficient to effect such treatment for the disease. The “therapeutically effective amount” will vary depending on the agent, the disease and its severity and the age, weight, etc., of the subject to be treated.

[0300] A “Colon or colorectal disease” includes but not limited to colon cancer, colon tumor, diverticulosis, diverticulitis, Crohn's disease, ulcerative colitis, irritable bowel syndrome, inflammatory bowel disease, hemorrhoids, and anal fissure.

[0301] A “cancer” is epithelial-cell related cancers include but not limited to pancreatic, lung, colon, prostate, ovarian, breast, bladder renal, hepatocellular, pharyngeal and gastric cancer.

[0302] The present invention provides an application of treatment by using antibody, immunogenic peptides as well as other CCAT agonists or antagonists.

[0303] CCATs are proteins differentially expressed in the colon diseases cell lines or tissues. The proteins are either cell surface proteins, cytosolic proteins, or secreted proteins (see the list in Table 1). These proteins are associated with the diseases especially colon diseases, particularly colon cancer; thus, they serve as candidate targets for the treatment of the diseases.

[0304] In one embodiment, when decreased expression or activity of the protein is desired, an inhibitor, antagonist, antibody and the like or a pharmaceutical agent containing one or more of these molecules may be delivered. Such delivery may be effected by methods well known in the art and may include delivery by an antibody specifically targeted to the protein. Neutralizing antibodies, which inhibit dimer formation, are generally preferred for therapeutic use.

[0305] In another embodiment, when increased expression or activity of the protein is desired, the protein, an agonist, an enhancer and the like or a pharmaceutical agent containing one or more of these molecules may be delivered. Such delivery may be effected by methods well known in the art and may include delivery of a pharmaceutical agent by an antibody specifically targeted to the protein.

[0306] Any of the transcripts, complementary molecules, or fragments thereof, proteins or portions thereof, vectors delivering these nucleic acid molecules or expressing the proteins, and their ligands may be administered in combination with other therapeutic agents. Selection of the agents for use in combination therapy may be made by one of ordinary skill in the art according to conventional pharmaceutical principles. A combination of therapeutic agents may act synergistically to affect treatment of a particular disorder at a lower dosage of each agent.

### Antibody Therapy

[0307] The antibody of the present invention can be used for therapeutic reason. It is contemplated that the antibody of the present invention may be used to treat a mammal, preferably human with colon diseases.

[0308] In general, the antibodies are also useful for inhibiting protein function, for example, blocking the binding of the CCAT protein or peptide to a binding partner such as a substrate. These uses can also be applied in a therapeutic context in which treatment involves inhibiting the protein's function. An antibody can be used, for example, to block binding, thus modulating (agonizing or antagonizing) the peptides activity. Antibodies can be prepared against specific fragments containing sites required for function or against intact protein that is associated within a cell or cell membrane. The function blocking assays are provided in detail in the Examples.

[0309] The antibodies of present invention can also be used as means of enhancing the immune response. The antibodies can be administered in amounts similar to those used for other therapeutic administrations of antibody. For example, pooled gamma globulin is administered at a range of about 1 mg to about 100 mg per patient. Thus, antibodies reactive with the protein or peptides of CCAT can be passively administered alone or in conjunction with other anti-cancer therapies to a mammal afflicted-with colon diseases or cancer. Examples of anti-cancer therapies include, but are not limited to, chemotherapy, radiation therapy, adoptive immunotherapy therapy with TIL (Tumor Infiltration Lymphocytes).

[0310] The selection of an antibody subclass for therapy will depend upon the nature of the disease tumor antigen. For example, an IgM may be preferred in situations where the antigen is highly specific for the diseased target and rarely occurs on normal cells. However, where the disease-associated antigen is also expressed in normal tissues, although at much lower levels, the IgG subclass may be preferred for the following reason: since the binding of at least two IgG molecules in close proximity is required to activate complement, less complement mediated damage may occur in the normal tissues which express smaller amounts of the antigen and, therefore, bind fewer IgG antibody molecules. Furthermore, IgG molecules by being smaller may be more able than IgM molecules to localize to the diseased tissue.

[0311] The mechanism for antibody therapy is that the therapeutic antibody recognizes a cell surface protein, cytosolic protein, or a secreted protein that is overexpressed in diseased cells. By NK cell or complement activation, conjugation of the antibody with an immunotoxin or radiolabel, the interaction can abrogate ligand/receptor interaction or activation of apoptosis.

[0312] The potential mechanisms of antibody-mediated cytotoxicity of diseased cells are phagocyte (antibody dependent cellular cytotoxicity (ADCC)) (see Example), complement (Complement-mediated cytotoxicity (CMC)) (see Example), naked antibody (receptor cross-linking apoptosis and growth factor inhibition), or targeted payload labeled with radionuclide or immunotoxins or immunochemotherapeutics.

[0313] In one embodiment, the antibody is administered to a nonhuman mammal for the purposes of obtaining preclinical data, for example. Exemplary nonhuman mammals to be treated include nonhuman primates, dogs, cats, rodents and other mammals in which preclinical studies are performed. Such mammals may be established animal models for a disease to be treated with the antibody or may be used to study toxicity of the antibody of interest. In each of these embodiments, dose escalation studies may be performed on the mammal.

[0314] The antibody is administered by any suitable means, including parenteral, subcutaneous, intraperitoneal, intrapulmonary, and intranasal, and, if desired for local immunosuppressive treatment, intralesional administration. Parenteral infusions include intramuscular, intravenous, intraarterial, intraperitoneal, or subcutaneous administration. In addition, the antibody variant is suitably administered by pulse infusion, particularly with declining doses of the antibody variant. Preferably the dosing is given by injections, most preferably intravenous or subcutaneous injections, depending in part on whether the administration is brief or chronic.

[0315] For the prevention or treatment of a disease, the appropriate dosage of the antibody will depend on the type of disease to be treated, the severity and the course of the disease, whether the antibody is administered for preventive or therapeutic purposes, previous therapy, the patient's clinical history and response to the antibody, and the discretion of the attending physician.

[0316] Depending on the type and severity of the disease, about 1 .mu·g/kg to 150 mg/kg (e.g., 0.1-20 mg/kg) of antibody is an initial candidate dosage for administration to the patient, whether, for example, by one or more separate administrations, or by continuous infusion. A typical daily dosage might range from about 1 .mu·g/kg to 100 mg/kg or more, depending on the factors mentioned above. For repeated administrations over several days or longer, depending on the condition, the treatment is sustained until a desired suppression of disease symptoms occurs. However, other dosage regimens may be useful. The progress of this therapy is easily monitored by conventional techniques and assays.

[0317] The antibody composition will be formulated, dosed and administered in a manner consistent with good medical practice. Factors for consideration in this context include the particular disorder being treated, the particular mammal being treated, the clinical condition of the individual patient, the cause of the disorder, the site of delivery of the agent, the method of administration, the scheduling of administration, and other factors known to medical practitioners.

[0318] The therapeutically effective amount of the antibody to be administered will be governed by such considerations, and is the minimum amount necessary to prevent, ameliorate, or treat a disease or disorder. The antibody need not be, but is optionally formulated with one or more agents currently used to prevent or treat the disorder in question.

[0319] Antibodies of the present invention may also be used as therapeutic reagents, to diminish or eliminate cancer or tumors. For example, the antibodies may be used on their own (for instance, to inhibit metastases) or coupled to one or more therapeutic agents. Suitable agents in this regard include radionuclides, differentiation inducers, drugs, toxins, and derivatives thereof. Preferred radionuclides include ⁹⁰Y, ¹²³I, ¹²⁵I, ¹³¹I, ¹⁸⁶Re, ¹⁸⁸Re, ²¹¹At, and ²¹²Bi. Preferred drugs include methotrexate, and pyrimidine and purine analogs. Preferred differentiation inducers include phorbol esters and butyric acid. Preferred toxins include ricin, abrin, diptheria toxin, cholera toxin, gelonin, Pseudomonas exotoxin, Shigella toxin, and pokeweed antiviral protein

[0320] A therapeutic agent may be coupled (e.g., covalently bonded) to a suitable monoclonal antibody either directly or indirectly (e.g., via a linker group). A direct reaction between an agent and an antibody is possible when each possesses a substituent capable of reacting with the other. For example, a nucleophilic group, such as an amino or sulfhydryl group, on one may be capable of reacting with a carbonyl-containing group, such as an anhydride or an acid halide, or with an alkyl group containing a good leaving group (e.g., a halide) on the other.

[0321] Alternatively, it may be desirable to couple a therapeutic agent and an antibody via a linker group. A linker group can function as a spacer to distance an antibody from an agent in order to avoid interference with binding capabilities. A linker group can also serve to increase the chemical reactivity of a substituent on an agent or an antibody, and thus increase the coupling efficiency. An increase in chemical reactivity may also facilitate the use of agents, or functional groups on agents, which otherwise would not be possible.

[0322] It will be evident to those skilled in the art that a variety of bifunctional or polyfunctional reagents, both homo- and hetero-functional (such as those described in the catalog of the Pierce Chemical Co., Rockford, Ill.), may be employed as the linker group. Coupling may be affected, for example, through amino groups, carboxyl groups, sulfhydryl groups or oxidized carbohydrate residues. There are numerous references describing such methodology, e.g. U.S. Pat. No. 4,671,958, to Rodwell et al.

[0323] Where a therapeutic agent is more potent when free from the antibody portion of the immunoconjugates of the present invention, it may be desirable to use a linker group which is cleavable during or upon internalization into a cell. A number of different cleavable linker groups have been described. The mechanisms for the intracellular release of an agent from these linker groups include cleavage by reduction of a disulfide bond (e.g., U.S. Pat. No. 4,489,710, to Spitler), by irradiation of a photolabile bond (e.g., U.S. Pat. No. 4,625,014, to Senter et al.), by hydrolysis of derivatized amino acid side chains (e.g., U.S. Pat. No. 4,638,045, to Kohn et al.), by serum complement-mediated hydrolysis (e.g., U.S. Pat. No. 4,671,958, to Rodwell et al.), and acid-catalyzed hydrolysis (e.g., U.S. Pat. No. 4,569,789, to Blattler et al.).

[0324] It may be desirable to couple more than one agent to an antibody. In one embodiment, multiple molecules of an agent are coupled to one antibody molecule. In another embodiment, more than one type of agent may be coupled to one antibody. Regardless of the particular embodiment, immunoconjugates with more than one agent may be prepared in a variety of ways as described above.

[0325] While it is possible for the immunogen to be administered in a pure or substantially pure form, it is preferable to present it as a pharmaceutical composition, formulation or preparation with a carrier.

[0326] The formulations of the present invention, both for veterinary and for human use, comprise an immunogen as described above, together with one or more pharmaceutically acceptable carriers and, optionally, other therapeutic ingredients. The carrier(s) must be “acceptable” in the sense of being compatible with the other ingredients of the formulation and not deleterious to the recipient thereof. The formulations may conveniently be presented in unit dosage form and may be prepared by any method well-known in the pharmaceutical art.

[0327] Suitable pharmaceutical carriers include proteins such as albumins (e.g., U.S. Pat. No. 4,507,234, to Kato et al.), peptides and polysaccharides such as aminodextran (e.g., U.S. Pat. No. 4,699,784, to Shih et al.), or water. A carrier may also bear an agent by noncovalent bonding or by encapsulation, such as within a liposome vesicle (e.g., U.S. Pat. Nos. 4,429,008 and 4,873,088). Carriers specific for radionuclide agents include radiohalogenated small molecules and chelating compounds. For example, U.S. Pat. No. 4,735,792 discloses representative radiohalogenated small molecules and their synthesis. A radionuclide chelate may be formed from chelating compounds that include those containing nitrogen and sulfur atoms as the donor atoms for binding the metal, metal oxide, radionuclide. For example, U.S. Pat. No. 4,673,562, to Davison et al. discloses representative chelating compounds and their synthesis.

[0328] All methods include the step of bringing into association the active ingredient with the carrier, which constitutes one or more accessory ingredients. In general, the formulations are prepared by uniformly and intimately bringing into association the active ingredient with liquid carriers or finely divided solid carriers or both, and then, if necessary, shaping the product into the desired formulation.

[0329] Formulations suitable for intravenous intramuscular, subcutaneous, or intraperitoneal administration conveniently comprise sterile aqueous solutions of the active ingredient with solutions, which are preferably isotonic with the blood of the recipient. Such formulations may be conveniently prepared by dissolving solid active ingredient in water containing physiologically compatible substances such as sodium chloride (e.g. 0.1-2.0M), glycine, and the like, and having a buffered pH compatible with physiological conditions to produce an aqueous solution, and rendering said solution sterile. These may be present in unit or multi-dose containers, for example, sealed ampoules or vials.

[0330] The formulations of the present invention may incorporate a stabilizer. Illustrative stabilizers are polyethylene glycol, proteins, saccharides, amino acids, inorganic acids, and organic acids, which may be used either on their own or as admixtures. These stabilizers are preferably incorporated in an amount of 0.11-10,000 parts by weight per part by weight of immunogen. If two or more stabilizers are to be used, their total amount is preferably within the range specified above. These stabilizers are used in aqueous solutions at the appropriate concentration and pH. The specific osmotic pressure of such aqueous solutions is generally in the range of 0.1-3.0 osmoles, preferably in the range of 0.8-1.2. The pH of the aqueous solution is adjusted to be within the range of 5.0-9.0, preferably within the range of 6-8. In formulating the antibody of the present invention, anti-adsorption agent may be used.

[0331] Additional pharmaceutical methods may be employed to control the duration of action. Controlled release preparations may be achieved through the use of polymer to complex or absorb the proteins or their derivatives. The controlled delivery may be exercised by selecting appropriate macromolecules (for example polyester, polyamino acids, polyvinyl, pyrrolidone, ethylenevinylacetate, methylcellulose, carboxymethylcellulose, or protamine sulfate) and the concentration of macromolecules as well as the methods of incorporation in order to control release. Another possible method to control the duration of action by controlled-release preparations is to incorporate the CCAT antibody into particles of a polymeric material such as polyesters, polyamino acids, hydrogels, poly(lactic acid) or ethylene vinylacetate copolymers. Alternatively, instead of incorporating these agents into polymeric particles, it is possible to entrap these materials in microcapsules prepared, for example, by coacervation techniques or by interfacial polymerization, for example, hydroxymethylcellulose or gelatin-microcapsules and poly(methylmethacylate) microcapsules, respectively, or in colloidal drug delivery systems, for example, liposomes, albumin microspheres, microemulsions, nanoparticles, and nanocapsules or in macroemulsions.

[0332] When oral preparations are desired, the compositions may be combined with typical carriers, such as lactose, sucrose, starch, talc magnesium stearate, crystalline cellulose, methyl cellulose, carboxymethyl cellulose, glycerin, sodium alginate or gum arabic among others.

[0333] The therapeutic antibody may be supplied in the form of a kit, alone, or in the form of a pharmaceutical composition as described above.

### Other Immunotherapy

[0334] The CCAT proteins or peptides or fragments thereof of this invention are also intended for use in producing antiserum designed for pre- or post-disease prophylaxis. Here the protein, peptides or fragment thereof, is formulated with a suitable adjuvant and administered by injection to human volunteers, according to known methods for producing human antisera. Antibody response to the injected proteins is monitored, during a several-week period following immunization, by periodic serum sampling to detect the presence of antiserum antibodies, using an immunoassay as described herein.

[0335] The antiserum from immunized individuals may be administered as a prophylactic measure for individuals who are at risk of developing colon diseases or cancer. The antiserum is also useful in treating an individual afflicted with colon diseases or cancer for post-disease prophylaxis.

[0336] Alternatively, peptides derived form the CCAT protein sequence may be modified to increase their immunogenicity by enhancing binding of the peptide to the MHC molecules in which the peptide is presented. The peptide or modified peptide may be conjugated to a carrier molecule to enhance the antigenicity of the peptide. Examples of carrier molecules, include, but are not limited to, human albumin, bovine albumin, lipoprotein and keyhole limpet hemo-cyanin (“Basic and Clinical Immunology” (1991) Stites, D. P. and Ten A. I. (eds) Appleton and Lange, Norwalk Conn., San Mateo, Calif.).

[0337] An “immunogenic peptide” is a peptide, which comprises an allele-specific motif such that the peptide will bind the MHC allele (HLA in human) and be capable of inducing a CTL (cytoxic T-lymphocytes) response. Thus, immunogenic peptides are capable of binding to an appropriate class I or II MHC molecule and inducing a cytotoxic T cell or T helper cell response against the antigen from which the immunogenic peptide is derived.

[0338] Alternatively, amino acid sequence variants of the peptide can be prepared by mutations in the DNA, which encodes the peptide, or by peptide synthesis.

[0339] At the genetic level, these variants ordinarily are prepared by site-directed mutagenesis of nucleotides in the DNA encoding the peptide molecule, thereby producing DNA encoding the variant, and thereafter expressing the DNA in recombinant cell culture. The variants typically exhibit the same qualitative biological activity as the nonvariant peptide.

[0340] T-lymphocytes recognize antigen in association with Class I or Class II MHC molecules in the form of a peptide fragment bound to an MHC molecule. The degree of peptide binding to a given MHC allele is based on amino acids at particular positions within the peptide (Parker et al. (1992) Journal of Immunology 149:3580; Kubo, et al. (1994) Journal of Immunology 52:3913-3924; Ruppert J. et al. (1993) Cell 74:929-937; Falk et al. (1991) Nature 351:290-296). The peptides of the present invention are useful as an epitope for immunogenic response (see more detailed description below).

[0341] In human, MHC is called HLA, wherein class I molecules are encoded by the HLA-A, B, and C loci. HLA-A and B antigens are expressed at the cell surface at approximately equal densities, whereas the expression of HLA-C is significantly lower (about 10-fold lower). Each of these loci has a number of alleles. MHC class II molecules are encoded by three pairs of MHC II alpha- and beta-chain genes, called HLA DR, -DP, and -DQ in human. In many haplotypes the HLA-DR cluster contains an extra beta-chain gene whose product can pair with the DR alpha chain. Each MHC class I and II molecule binds a different rage of peptides. The present of several loci means that any one individual is equipped to present a much broader ranger of different peptides than if only one MHC protein of each class were expressed at the cell surface. The peptide binding motifs of the present invention are designed to be specific for each allelic subtype.

[0342] The peptides of the present invention are used for treatment of the colon diseases. Treatment involves administration of the protective composition after the appearance of the disease.

[0343] The present invention is also applied to prevent and suppress the disease. It is not always possible to distinguish between “preventing” and “suppressing” since the ultimate inductive event or events may be unknown, latent, or the patient is not ascertained until well after the occurrence of the event or events. Therefore, it is common to use the term “prophylaxis” as distinct from “treatment” to encompass both “preventing” and “suppressing” as defined herein. The term “protection,” as used herein, is meant to include “prophylaxis.”

[0344] The peptides are used for treating T cell-mediated pathology. The term “T cell-mediated pathology” refers to any condition in which an inappropriate T cell response is a component of the pathology. The term is intended to encompass both T cell mediated colon diseases and diseases resulting from unregulated clonal T cell replication.

[0345] Therefore, the present invention relates to peptides or modified peptides derived from the protein sequences of the CCAT proteins that differentially expressed in the colon diseases. By way of example, modification may include substitution, deletion or addition of an amino acid in the given immunogenic peptide sequence or mutation of existing amino acids within the given immunogenic peptide sequence, or derivatization of existing amino acids within the given immunogenic peptide sequence. Any amino acid comprising the immunogenic peptide sequence may be modified in accordance with this invention. In one aspect, at least one amino acid is substituted or replaced within the given immunogenic peptide sequence. Any amino acid may be used to substitute or replace a given amino acid within the immunogenic peptide sequence. Modified peptides are intended to include any immunogenic peptide obtained from differentially expressed proteins, which has been modified and exhibits enhanced binding to the MHC molecule with which it associates when presented to the T-cell. These modified peptides may be synthetically or recombinantly produced by conventional methods.

[0346] In another embodiment, the peptides of the present invention comprise, or consisting sequences of about 5-8, 8-10, 10-15 or 15-30 amino acids which are immunogenic, that is, capable of inducing an immune response when injected into a subject.

[0347] The recombinant or natural protein, peptides, or fragment thereof of CCAT, or modified peptides, may be used as a vaccine either prophylactically or therapeutically. When provided prophylactically the vaccine is provided in advance of any evidence of colon diseases, particularly, cancer. The prophylactic administration of the colon diseases vaccine should serve to prevent or attenuate colon diseases, preferably cancer, in a mammal.

[0348] Preparation of vaccine is using recombinant protein or peptide expression vectors comprising all or part of nucleic acid sequence of CCAT proteins encoding peptides. Examples of vectors that may be used in the aforementioned vaccines include, but are not limited to, defective retroviral vectors, adenoviral vectors vaccinia viral vectors, fowl pox viral vectors, or other viral vectors (Mulligan, R. C., (1993) Science 260:926-932). The viral vectors carrying all or part of nucleic sequence of SEQ ID NOS:1234-2227 can be introduced into a mammal either prior to any evidence of colon diseases or to mediate regression of the disease in a mammal afflicted with colon diseases. Examples of methods for administering the viral vector into the mammals include, but are not limited to, exposure of cells to the virus ex vivo, or injection of the retrovirus or a producer cell line of the virus into the affected tissue or intravenous administration of the virus. Alternatively the viral vector carrying all or part of the CCAT nucleic acid sequence that encode peptides may be administered locally by direct injection into the cancer lesion or topical application in a pharmaceutically acceptable carrier. The quantity of viral vector, carrying all or part of the CCAT nucleic acid sequence, to be administered is based on the titer of virus particles. A preferred range of the immunogen to be administered may be about 106 to about 1011 virus particles per mammal, preferably a human. After immunization the efficacy of the vaccine can be assessed by production of antibodies or immune cells that recognize the antigen, as assessed by specific lytic activity or specific cytokine production or by tumor regression. One skilled in the art would know the conventional methods to assess the aforementioned parameters. If the mammal to be immunized is already afflicted with cancer, the vaccine can be administered in conjunction with other therapeutic treatments. Examples of other therapeutic treatments includes, but are not limited to, adoptive T cell immunotherapy, coadministration of cytokines or other therapeutic drugs for cancer.

[0349] Alternatively all or parts thereof of a substantially or partially purified the CCAT protein or their peptides may be administered as a vaccine in a pharmaceutically acceptable carrier. Ranges of the protein that may be administered are about 0.001 to about 100 mg per patient, preferred doses are about 0.01 to about 100 mg per patient. In a preferred embodiment, the peptides or modified peptides thereof is administered therapeutically or prophylactically to a mammal in need of such treatment. The peptide may be synthetically or recombinantly produced. Immunization is repeated as necessary, until a sufficient titer of anti-immunogen antibody or immune cells has been obtained.

[0350] In yet another alternative embodiment a viral vector, such as a retroviral vector, can be introduced into mammalian cells. Examples of mammalian cells into which the retroviral vector can be introduced include, but are not limited to, primary mammalian cultures or continuous mammalian cultures, COS cells, NIH3T3, or 293 cells (ATTC #CRL 1573), dendritic cells. The means by which the vector carrying the gene may be introduced into a cell includes, but is not limited to, microinjection, electroporation, transfection or transfection using DEAE dextran, lipofection, calcium phosphate or other procedures known to one skilled in the art (Sambrook et al. (EDS) (2001) in “Molecular Cloning. A laboratory manual”, Cold Spring Harbor Press Plainview, N.Y.).

[0351] The vaccine formulation of the present invention comprises an immunogen that induces an immune response directed against the cancer associated antigens such as the CCATs, and in nonhuman primates and finally in humans. The safety of the immunization procedures is determined by looking for the effect of immunization on the general health of the immunized animal (weight change, fever, appetite behavior etc.) and looking for pathological changes on autopsies. After initial testing in animals, cancer patients can be tested. Conventional methods would be used to evaluate the immune response of the patient to determine the efficiency of the vaccine.

[0352] Measurement of candidate disease tumor antigen or vaccine expression in patients is the first step of the present invention. Subsequent steps will focus on measuring immune responses to these candidate antigens or vaccine. Sera from disease patients, particularly cancer patients, and healthy donors will be screened for antibodies to the candidate antigens as well as for levels of circulating tumor derived antigens. antigen. The vaccine formulations may be evaluated first in animal models, initially rodents

[0353] In one embodiment mammals, preferably human, at high risk for colon diseases, particularly cancer, are prophylactically treated with the vaccines of this invention. Examples of such mammals include, but are not limited to, humans with a family history of colon diseases, humans with a history of colon diseases, particular cancer, or humans afflicted with colon cancer previously resected and therefore at risk for reoccurrence. When provided therapeutically, the vaccine is provided to enhance the patient's own immune response to the diseased antigen present on the colon diseases or advanced stage of colon diseases. The vaccine, which acts as an immunogen, may be a cell, cell lysate from cells transfected with a recombinant expression vector, cell lysates from cells transfected with a recombinant expression vector, or a culture supernatant containing the expressed protein. Alternatively, the immunogen is a partially or substantially purified recombinant protein, peptide or analog thereof or modified peptides or analogs thereof. The proteins or peptides may be conjugated with lipoprotein or administered in liposomal form or with adjuvant.

[0354] While it is possible for the immunogen to be administered in a pure or substantially pure form, it is preferable to present it as a pharmaceutical composition, formulation or preparation. The formulations of the present invention are described in the previous section.

[0355] Vaccination can be conducted by conventional methods. For example, the immunogen can be used in a suitable diluent such as saline or water, or complete or incomplete adjuvants. Further, the immunogen may or may not be bound to a carrier to make the protein immunogenic. Examples of such carrier molecules include but are not limited to bovine serum albumin (BSA), keyhole limpet hemocyanin (KLH), tetanus toxoid, and the like. The immunogen also may be coupled with lipoproteins or administered in liposomal form or with adjuvants. The immunogen can be administered by any route-appropriate for antibody production such as intravenous, intraperitoneal, intramuscular, subcutaneous, and the like. The immunogen may be administered once or at periodic intervals until a significant titer of anti-CCAT immune cells or anti-CCAT antibody is produced. The presence of anti-CCAT immune cells may be assessed by measuring the frequency of precursor CTL (cytoxic T-lymphocytes) against CCAT antigen prior to and after immunization by a CTL precursor analysis assay (Coulie, P. et al., (1992) International Journal Of Cancer 50:289-297). The antibody may be detected in the serum using the immunoassay described above.

[0356] The safety of the immunization procedures is determined by looking for the effect of immunization on the general health of the immunized animal (weight change, fever, appetite behavior etc.) and looking for pathological changes on autopsies. After initial testing in animals, colon diseases patients can be tested. Conventional methods would be used to evaluate the immune response of the patient to determine the efficiency of the vaccine.

[0357] In yet another embodiment of this invention all, part, or parts of the CCAT proteins or peptides or fragments thereof, or modified peptides, may be exposed to dendritic cells cultured in vitro. The cultured dendritic cells provide a means of producing T-cell dependent antigens comprised of dendritic cell modified antigen or dendritic cells pulsed with antigen, in which the antigen is processed and expressed on the antigen activated dendritic cell. The CCAT antigen activated dendritic cells or processed dendritic cell antigens may be used as immunogens for vaccines or for the treatment of colon diseases, particularly colon cancer. The dendritic cells should be exposed to antigen for sufficient time to allow the antigens to be internalized and presented on the dendritic cells surface. The resulting dendritic cells or the dendritic cell process antigens can than be administered to an individual in need of therapy. Such methods are described in Steinman et al. (WO93/208185) and in Banchereau et al. (EPO Application 0563485A1).

[0358] In yet another aspect of this invention T-cells isolated from individuals can be exposed to the CCAT proteins, peptides or fragment thereof, or modified peptides in vitro and then administered to a patient in need of such treatment in a therapeutically effective amount. Examples of where T-lymphocytes can be isolated include but are not limited to, peripheral blood cells lymphocytes (PBL), lymph nodes, or tumor infiltrating lymphocytes (TIL). Such lymphocytes can be isolated from the individual to be treated or from a donor by methods known in the art and cultured in vitro (Kawakami, Y. et al. (1989) J. Immunol. 142: 2453-3461). Lymphocytes are cultured in media such as RPMI or RPMI 1640 or AIM V for 1-10 weeks. Viability is assessed by trypan blue dye exclusion assay. Examples of how these sensitized T-cells can be administered to the mammal include but are not limited to, intravenously, intraperitoneally or intralesionally. Parameters that may be assessed to determine the efficacy of these sensitized T-lymphocytes include, but are not limited to, production of immune cells in the mammal being treated or tumor regression. Conventional methods are used to assess these parameters. Such treatment can be given in conjunction with cytokines or gene modified cells (Rosenberg, S. A. et al. (1992) Human Gene Therapy, 3: 75-90; Rosenberg, S. A. et al. (1992) Human Gene Therapy, 3: 57-73).

[0359] The present invention is further described by the following example. The example is provided solely to illustrate the invention by reference to specific embodiments. This exemplification, while illustrating certain aspects of the invention, does not offer the limitations or circumscribe the scope of the disclosed invention.

[0360] All examples outlined here were carried out using standard techniques, which are well known and routine to those of skill in the art. Routine molecular biology techniques of the following example can be carried out as described in standard laboratory manuals, such as Sambrook et al., Molecular Cloning: A laboratory Manual, 3rd. ed., Cold Spring Harbor Laboratory Press, Cold Spring Harbor, N.Y., (2001).

### Working Examples

### 1. Colon Tissues and Cell Lines

### Colon Tissues

### Tissue Processing

[0361] All tissues were procured as fresh specimens. Tissues were collected as remnant tissues following surgical resection of colorectal tissues. Remnant tissues were supplied following processing for pathological diagnosis according to proper standards of patient care. Procurement of all tissues was performed in an anonymised manner in strict compliance with Federal mandated ethical and legal guidelines (HIPAA) and in accordance with clinical institution ethical review board as well as the internal institutional review board. Tissues were transported on ice in ice-cold transport buffer by courier for processing.

[0362] i) Enrichment of Epithelial Cells from Normal Colorectal Mucosa

[0363] Normal colorectal tissue was transferred from the transport vessel to a sterile dish containing 25 ml of ice-cold transport buffer. The tissue was measured, weighed and photographed. The tissue was dissected to isolate colorectal mucosa which was transferred to a fresh dish containing 25 ml ice-cold Hanks buffered saline solution. The tissue section was washed by vigorous shaking and the HBSS replaced. This was repeated 2 further times or until all visible mucus was removed. Mucosa was measured, weighed and diced into 1 mm2 sections. The tissues sections were transferred to a 50 ml polypropylene centrifuge tube containing 50 ml of A52 media (Biosource) supplemented with 2 mM L-glutamine and 1.5 mg/ml dispase (Roche Biochemicals). The digest was incubated for 1 h at 37° C. with frequent agitation. Following the incubation, the suspension was poured through a 40-mesh cell sieve situated in the base of a 15 cm culture dish. The filtrate was diluted to 50 ml using A52 media supplemented with 2 mM L-glutamine and passed through a 200-mesh cell sieve. The filtrate was collected into a 50 ml polypropylene centrifuge tube and the suspension was triturated several times followed by vortexing for 2 min at setting 6. The density and viability of nucleated cells was determined by flow cytometry using propidium iodide as a negative stain for viability (Guava system). Erythrocytes were lysed using a standard ammonium chloride lysis protocol with incubation at room temperature for 10 s. Cells were harvested by centrifugation at 500 g for 5 min at 4° C. The cell pellet was resuspended in 50 ml of ice-cold HBSS and recentrifuged. The final cell pellet was resuspended in 3 ml of ice-cold HBSS supplemented with 0.1% BSA and 0.25M EDTA. Cell density and viability were estimated using the Guava system and the density adjusted to 1×10⁷ cells per ml. Epithelial cells were stained with a FITC-labeled anti-EpCAM murine monoclonal antibody and enriched by cell sorting using flow cytometry.

[0364] ii) Enrichment of Tumor Cells from Colorectal Tumor Tissue

[0365] Colorectal tumor tissue was transferred from the transport vessel to a sterile dish containing 25 ml of ice-cold transport buffer. The tissue was measured, weighed and photographed. The tissue was dissected to remove necrotic and fibrotic tissue plaques and the tumour tissue transferred to a fresh dish containing 25 ml ice-cold Hanks buffered saline solution. The tissue section was washed by vigorous shaking and the HBSS replaced. This was repeated 2 further times or until all visible mucus was removed. Tumour tissue was measured, weighed and extensively diced. The tissues slurry was transferred to a 50 ml polypropylene centrifuge tube containing 50 ml of A52 media (Biosource) supplemented with 2 mM L-glutamine and 1.5 mg/ml dispase (Roche Biochemicals). The digest was incubated for 1 h at 37° C. with frequent agitation. Following the incubation, the suspension was poured through a 40-mesh cell sieve situated in the base of a 15 cm culture dish. The filtrate was diluted to 50 ml using A52 media supplemented with 2 mM L-glutamine and passed through a 200-mesh cell sieve. The filtrate was collected into a 50 ml polypropylene centrifuge tube and the suspension was triturated several times followed by vortexing for 2 min at setting 6. The density and viability of nucleated cells was determined by flow cytometry using propidium iodide as a negative stain for viability (Guava system). Erythrocytes were lysed using a standard ammonium chloride lysis protocol with incubation at room temperature for 10 s. Cells were harvested by centrifugation at 500 g for 5 min at 4° C. The cell pellet was resuspended in 50 ml of ice-cold HBSS and recentrifuged. The final cell pellet was resuspended in 3 ml of ice-cold HBSS supplemented with 0.1% BSA and 0.25M EDTA. Cell density and viability were estimated using the Guava system and the density adjusted to 1×10⁷ cells per ml. Epithelial cells were stained with a FITC-labeled anti-EpCAM murine monoclonal antibody and enriched by cell sorting using flow cytometry.

[0366] iii) Enrichment of Cell Surface Proteins from Sorted Epithelial and Tumor Cells

[0367] Sorted cells were centrifuged at 500 g at 4° C. for 5 min and resuspended in 50 ml of ice-cold DPBS. The cell suspension was washed by 2 further cycles of centrifugation 500 g at 4° C. for 5 min and resuspension of the cell pellet in 50 ml of ice-cold DPBS. Finally, the cell pellet was resuspended in 9.5 ml of ice-cold DPBS and sodium metaperiodate added to a final concentration of 1 mM. The cell suspension was incubated on ice for 10 min with frequent agitation in the dark. Cells were centrifuged at 500 g at 4° C. for 5 min and resuspended in 50 ml of ice-cold DPBS. The cell suspension was washed by 2 further cycles of centrifugation 500 g at 4° C. for 5 min and resuspension of the cell pellet in 50 ml of ice-cold DPBS. Finally, the cell pellet was resuspended in lysis buffer (1% SDS [w/v]; 0.1M HEPES; 10 mM MgCl₂; 0.1% Non ionic detergent P40; 100 ml protease inhibitor cocktail [P8340, Sigma]) and homogenisation performed by passage of lysate through a 18G syringe needle 10 times. Protein concentrations were assayed relative to a Bovine serum albumin standard by a modified Lowry assay (DC assay, BioRAD) and 1 mg of total cellular protein transferred to a fresh tube and diluted to 1 mg/ml in acetate buffer (0.1M, pH 5.0).

### Colon Cancer Cell Line Model System:

[0368] The model system employed here involves the use of Caco2 as a “normal” reference (i.e., control) to which cell surface expression in tumor derived cell lines is compared. These differentials or candidates are then validated in tissues, colon cancer and normal colon, to confirm that they are differentially expressed between these tissues as well as within the cell line model system.

### Colon Cancer Cell Line Culture

[0369] Cell lines were grown in a culturing medium that is supplemented as necessary with growth factors and serum, in accordance with the American Type Culture Collection (ATCC) (Manassas, Va.) guidelines for each particular cell line (the ATCC catalog number for each cell line is indicated in Table 1). Cultures were established from frozen stocks in which the cells were suspended in a freezing medium (cell culture medium with 10% DMSO [v/v]) and flash frozen in liquid nitrogen. Frozen stocks prepared in this way were stored in the liquid nitrogen vapour. Cell cultures were established by rapidly thawing frozen stocks at 37° C. Thawed stock cultures were slowly transferred to a culture vessel containing a large volume of culture medium that was supplemented. For maintenance of culture, cells were seeded at 1×10⁵ cells/per ml in medium and incubated at 37° C. until confluence of cells in the culture vessel exceeds 50% by area. At this time, cells were harvested from the culture vessel using enzymes or EDTA where necessary. The density of harvested, viable cells was estimated by hemocytometry and the culture reseeded as above. A passage of this nature was repeated no more than 25 times at which point the culture was destroyed and reestablished from frozen stocks as described above.

[0370] For the analyses of cell surface protein expression in cultured cell lines, cells were grown as described above. At a period 24 h prior to the experiment, the cell line was passaged as described above. This yielded cell densities that were <50% confluent and growing exponentially. Typically, triplicate analyses of differential expression were performed for each line relative to Caco2 for the purpose of identifying statistically significant reproducible differentially expressed proteins.

### 2. Cloning and Expression of Target Proteins

[0371] cDNA Retrieval

[0372] Peptide sequences were searched by BlastP against the Celera Discovery System (CDS) and public database to identify the corresponding full-length open reading frames (ORFs). Each ORF sequence was then searched by BlastN against the Celera in-house human cDNA clone collection. For each sequence of interest, up to three clones are pulled and streaked onto LB/Ampicillin (100 ug/ml) plates. Plasmid DNA is isolated using Qiagen spin mini-prep kit and verified by restriction digest. Subsequently, the isolated plasmid DNA is sequence verified against the ORF reference sequence. Sequencing reactions are carried out using Applied Biosystems BigDye Terminator kit followed by ethanol precipitation. Sequence data is collected using the Applied Biosystems 3100 Genetic Analyzer and analyzed by alignment to the reference sequence using the Clone Manager alignment tool.

### PCR

[0373] PCR primers are designed to amplify the full-length ORF as well as any regions of the ORF that are interest for expression (antigenic or hydrophilic regions as determined by the Clone Manager sequence analysis tool). Primers also contain 5′ and 3′ overhangs to facilitate cloning (see below). PCR reactions contain 2.5 units Platinum Taq DNA Polymerase High Fidelity (Invitrogen), 50 ng cDNA plasmid template, 1 uM forward and reverse primers, 800 uM dNTP cocktail (Applied Biosystems) and 2 mM MgSO4. After 20-30 cycles (94° C. for 30 seconds, 55° C. for 1 minutes and 73° C. for 2 minutes), product is verified and quantitated by agarose gel electrophoresis.

### Construction of Entry Clones

[0374] PCR products are cloned into an entry vector for use with the Gateway recombination based cloning system (Invitrogen). These vectors include pDonr221, pDonr201, pEntr/D-TOPO or pEntr/SD/D-TOPO and are used as described in the cloning methods below.

TOPO Cloning into pEntr/D-TOPO or pEntr/SD/D-TOPO

[0375] For cloning using this method, the forward PCR primer contained a 5′ overhang containing the sequence “CACC”. PCR products are generated as described above and cloned into the entry vector using the Invitrogen TOPO cloning kit. Reactions are typically carried out at room temperature for 10 minutes and subsequently transformed into TOP10 chemically competent cells (Invitrogen, CA). Candidate clones are picked, plasmid DNA is prepared using Qiagen spin mini-prep kit and screened using restriction digest. Inserts are subsequently sequence verified as described above.

Gateway Cloning into pDonr201 or pDonr221

[0376] For cloning using this method, PCR primers contained the following overhangs:

Forward 5′ overhang:
5′-GGGGACAAGTTTGTACAAAAAAGCAGGCTTC-3′
Reverse 5' overhang:
5′-GGGGACCACTTTGTACAAGAAAGCTGGGT-3′

[0377] PCR products are generated as described above. ORFs are recombined into the entry vector using the Invitrogen Gateway BP Clonase enzyme mix. Reactions are typically carried out at 25° C. for 1 hour, treated with Proteinase K at 37° C. for 10 minutes and transformed into Library Efficiency DH5 cc chemically competent cells (Invitrogen, CA). Candidate clones are picked, plasmid DNA is prepared using Qiagen spin mini-prep kit and screened using restriction digest. Inserts are subsequently sequence verified as described above.

### Construction of Expression Clones

[0378] ORFs are transferred from the entry construct into a series of expression vectors using the Gateway LR Clonase enzyme mix. Reactions are typically carried out for 1 hour at 25° C., treated with Proteinase K at 37° C. for 10 minutes and subsequently transformed into Library Efficiency DH5a chemically competent cells (Invitrogen). Candidate clones are picked, plasmid DNA is prepared using Qiagen spin mini-prep kit and screened using restriction digest. Expression vectors include but are not limited to pDest14, pDest15, pDest17, pDest8, pDest10 and pDest20. These vectors allow expression in systems such as E. coli and recombinant baculovirus. Other vectors not listed here allow expression in yeast, mammalian cells, or in vitro.

Expression of Recombinant Proteins in E. coli

[0379] Constructs are transformed into one or more of the following host strains: BL21 S1, BL21 AI, (Invitrogen); Origami B (DE3), Origami B (DE3) pLysS, Rosetta (DE3), Rosetta (DE3) pLysS, Rosetta-Gami (DE3), Rosetta-Gami (DE3) pLysS, or Rosetta-Gami B (DE3) pLysS (Novagen). The transformants are grown in LB with or without NaCl and with appropriate antibiotics, at temperatures in the range of 20-37° C., with aeration. Expression is induced with the addition of IPTG (0.03-0.3 mM) or NaCl (75-300 mM) when the cells are in mid-log growth. Growth is continued for one to 24 hours post-induction. Cells are harvested by centrifugation in a Sorvall RC-3C centrifuge in a H6000A rotor for 10 minutes at 3000 rpm, at 4° C. Cell pellets are stored at −80° C.

### Expression of Recombinant Proteins Using Baculovirus

[0380] Recombinant proteins are expressed using baculovirus in Sf21 fall army worm ovarian cells. Recombinant baculoviruses are prepared using the Bac-to-Bac system (Invitrogen) per the manufacturer's instructions. Proteins are expressed on the large scale in Sf90011 serum-free medium (Invitrogen) in a 10 L bioreactor tank (27° C., 130 rpm, 50% dissolved oxygen for 48 hours).

### 3. Recombinant Protein Purification

[0381] Recombinant proteins are purified from E. coli and/or insect cells using a variety of standard chromatography methods. Briefly, cells are lysed using sonication or detergents. The insoluble material is pelleted by centrifugation at 10,000×g for 15 minutes. The supernatant is applied to an appropriate affinity column, e.g. His-tagged proteins are separated using a pre-packed chelating sepharose column (Pharmacia) or GST-tagged proteins are separated using a glutathione sepharose column (Pharmacia). After using the affinity column, proteins are further separated using various techniques, such as ion exchange chromatography (columns from Pharmacia) to separate on the basis of electrical charge or size exclusion chromatography (columns from Tosohaas) to separate on the basis of molecular weight, size and shape.

[0382] Expression and purification of the protein are also achieved using either a mammalian cell expression system or an insect cell expression system. The pUB6/V5-His vector system (Invitrogen, CA) is used to express GSCC in CHO cells. The vector contains the selectable bsd gene, multiple cloning sites, the promoter/enhancer sequence from the human ubiquitin C gene, a C-terminal V5 epitope for antibody detection with anti-V5 antibodies, and a C-terminal polyhistidine (6.times.H is) sequence for rapid purification on PROBOND resin (Invitrogen, CA). Transformed cells are selected on media containing blasticidin.

[0383] Spodoptera frugiperda (Sf9) insect cells are infected with recombinant Autographica californica nuclear polyhedrosis virus (baculovirus). The polyhedrin gene is replaced with the cDNA by homologous recombination and the polyhedrin promoter drives cDNA transcription. The protein is synthesized as a fusion protein with 6×his which enables purification as described above. Purified protein is used in the following activity and to make antibodies

### 4. Chemical Synthesis of Peptides

[0384] Proteins or portions thereof may be produced not only by recombinant methods, but also by using chemical methods well known in the art. Solid phase peptide synthesis may be carried out in a batchwise or continuous flow process which sequentially adds .alpha.-amino- and side chain-protected amino acid residues to an insoluble polymeric support via a linker group. A linker group such as methylamine-derivatized polyethylene glycol is attached to poly(styrene-co-divinylbenzene) to form the support resin. The amino acid residues are N-a-protected by acid labile Boc (t-butyloxycarbonyl) or base-labile Fmoc (9-fluorenylmethoxycarbonyl). The carboxyl group of the protected amino acid is coupled to the amine of the linker group to anchor the residue to the solid phase support resin. Trifluoroacetic acid or piperidine are used to remove the protecting group in the case of Boc or Fmoc, respectively. Each additional amino acid is added to the anchored residue using a coupling agent or pre-activated amino acid derivative, and the resin is washed. The full length peptide is synthesized by sequential deprotection, coupling of derivitized amino acids, and washing with dichloromethane and/or N,N-dimethylformamide. The peptide is cleaved between the peptide carboxy terminus and the linker group to yield a peptide acid or amide. (Novabiochem 1997/98 Catalog and Peptide Synthesis Handbook, San Diego Calif. pp. S1-S20). Automated synthesis may also be carried out on machines such as the 431A peptide synthesizer (ABI). A protein or portion thereof may be purified by preparative high performance liquid chromatography and its composition confirmed by amino acid analysis or by sequencing (Creighton (1984) Proteins, Structures and Molecular Properties, W H Freeman, New York N.Y.).

### 5. Antibody Development

### Polyclonal Antibody Preparations:

[0385] Polyclonal antibodies against recombinant proteins are raised in rabbits (Green Mountain Antibodies, Burlington, Vt.). Briefly, two New Zealand rabbits are immunized with 0.1 mg of antigen in complete Freund's adjuvant. Subsequent immunizations are carried out using 0.05 mg of antigen in incomplete Freund's adjuvant at days 14, 21 and 49. Bleeds are collected and screened for recognition of the antigen by solid phase ELISA and western blot analysis. The IgG fraction is separated by centrifugation at 20,000×g for 20 minutes followed by a 50% ammonium sulfate cut. The pelleted protein is resuspended in 5 mM Tris and separated by ion exchange chromatography. Fractions are pooled based on IgG content. Antigen-specific antibody is affinity purified using Pierce AminoLink resin coupled to the appropriate antigen.

Isolation of Antibody Fragments Directed Against CCATs from a Library of scFvs

[0386] Naturally occurring V-genes isolated from human PBLs are constructed into a library of antibody fragments which contain reactivities against CCAT to which the donor may or may not have been exposed (see e.g., U.S. Pat. No. 5,885,793 incorporated herein by reference in its entirety).

[0387] Rescue of the Library: A library of scFvs is constructed from the RNA of human PBLs as described in PCT publication WO 92/01047. To rescue phage displaying antibody fragments, approximately 109 E. coli harboring the phagemid are used to inoculate 50 ml of 2×TY containing 1% glucose and 100 .mu·g/ml of ampicillin (2.times.TY-AMP-GLU) and grown to an O.D. of 0.8 with shaking. Five ml of this culture is used to innoculate 50 ml of 2.times.TY-AMP-GLU, 2×108 TU of delta gene 3 helper (M13 delta gene III, see PCT publication WO 92/01047) are added and the culture incubated at 37° C. for 45 minutes without shaking and then at 37° C. for 45 minutes with shaking. The culture is centrifuged at 4000 r.p.m. for 10 min. and the pellet resuspended in 2 liters of 2×TY containing 100 .mu·g/ml ampicillin and 50 ug/ml kanamycin and grown overnight. Phage are prepared as described in PCT publication WO 92/01047.

[0388] M13 delta gene III is prepared as follows: M13 delta gene III helper phage does not encode gene III protein, hence the phage (mid) displaying antibody fragments have a greater avidity of binding to antigen. Infectious M13 delta gene III particles are made by growing the helper phage in cells harboring a pUC19 derivative supplying the wild type gene III protein during phage morphogenesis. The culture is incubated for 1 hour at 37° C. without shaking and then for a further hour at 37° C. with shaking. Cells are spun down (IEC-Centra 8,400 r.p.m. for 10 min), resuspended in 300 ml 2×TY broth containing 100 .mu·g ampicillin/ml and 25 .mu·g kanamycin/ml (2×TY-AMP-KAN) and grown overnight, shaking at 37° C. Phagre particles are purified and concentrated from the culture medium by two PEG-precipitations (Sambrook et al., 2001), resuspended in 2 ml PBS and passed through a 0.45 .mu·m filter (Minisart NML; Sartorius) to give a final concentration of approximately 1013 transducing units/ml (ampicillin-resistant clones).

[0389] Panning of the Library: Immunotubes (Nunc) are coated overnight in PBS with 4 ml of either 100 .mu·g/ml or 10 .mu·g/ml of a polypeptide of the present invention. Tubes are blocked with 2% Marvel-PBS for 2 hours at 37° C. and then washed 3 times in PBS. Approximately 1013 TU of phage is applied to the tube and incubated for 30 minutes at room temperature tumbling on an over and under turntable and then left to stand for another 1.5 hours. Tubes are washed 10 times with PBS 0.1% Tween-20 and 10 times with PBS. Phage are eluted by adding 1 ml of 100 mM triethylamine and rotating 15 minutes on an under and over turntable after which the solution is immediately neutralized with 0.5 ml of 1.0M Tris-HCl, pH 7.4. Phages are then used to infect 10 ml of mid-log E. coli TG1 by incubating eluted phage with bacteria for 30 minutes at 37° C. The E. coli are then plated on TYE plates containing 1% glucose and 100 .mu·g/ml ampicillin. The resulting bacterial library is then rescued with delta gene 3 helper phage as described above to prepare phage for a subsequent round of selection. This process is then repeated for a total of 4 rounds of affinity purification with tube-washing increased to 20 times with PBS, 0.1% Tween-20 and 20 times with PBS for rounds 3 and 4.

[0390] Characterization of Binders: Eluted phage from the 3rd and 4th rounds of selection are used to infect E. coli HB 2151 and soluble scFv is produced (Marks, et al., 1991) from single colonies for assay. ELISAs are performed with microtitre plates coated with either 10 .mu·g/ml of the polypeptide of the present invention in 50 mM bicarbonate pH 9.6. Clones positive in ELISA are further characterized by PCR fingerprinting (see, e.g., PCT publication WO 92/01047) and then by sequencing.

### Monoclonal Antibody Generation

[0391] i) Materials:

[0392] 1) Complete Media No Sera (CMNS) for washing of the myeloma and spleen cells; Hybridoma medium CM-HAT {Cell Mab (BD), 10% FBS (or HS); 5% Origen HCF (hybridoma cloning factor) containing 4 mM L-glutamine and antibiotics} to be used for plating hybridomas after the fusion.

[0393] 2) Hybridoma medium CM-HT (NO AMINOPTERIN) (Cell Mab (BD), 10% FBS 5% Origen HCF containing 4 mM L-glutamine and antibiotics) to be used for fusion maintenance are stored in the refrigerator at 4-6° C. The fusions are fed on days 4, 8, and 12, and subsequent passages. Inactivated and pre-filtered commercial Fetal Bovine serum (FBS) or Horse Serum (HS) are thawed and stored in the refrigerator at 4° C. and must be pretested for myeloma growth from single cells.

[0394] 3) The L-glntamine (200 mM, 100× solution), which is stored at −20° C. freezer, is thawed and warmed until completely in solution. The L-glntamin is dispensed into media to supplement growth. L-glntamin is added to 2 mM for myelomas, and 4 mM for hybridoma media. Further the Penicillin, Streptomycin, Amphotericin (antibacterial-antifungal stored at −20° C.) is thawed and added to Cell Mab Media to 1%.

[0395] 4) Myeloma growth media is Cell Mab Media (Cell Mab Media, Quantum Yield from BD is stored in the refrigerator at 4° C. in the dark) which are added L-glntamine to 2 mM and antibiotic/antimycotic solution to 1% and is called CMNS.

[0396] 5) 1 bottle of PEG 1500 in Hepes (Roche, N.J.)

[0397] 6) 8-Azaguanine is stored as the dried powder supplied by SIGMA at −700° C. until needed. Reconstitute 1 vial/500 ml of media and add entire contents to 500 ml media (eg. 2 vials/litre).

[0398] 7) Myeloma Media is CM which has 10% FBS (or HS) and 8-Aza (1×) stored in the refrigerator at 4° C.

[0399] 8) Clonal cell medium D (Stemcell, Vancouver) contains HAT and methyl cellulose for semi-solid direct cloning from the fusion. This comes in 90 ml bottles with a CoA and must be “melted at 37° C. in a waterbath in the morning of the day of the fusion. Loosen the cap and leave in CO2 incubator to sufficiently gas the medium D and bring the pH down.

[0400] 9) Hybridoma supplements HT [hypoxanthine, thymidine] are to be used in medium for the section of hybridomas and maintenance of hybridomas through the cloning stages respectively.

[0401] 10) Origen HCF can be obtained directly from Igen and is a cell supernatant produced from a macrophage-like cell-line. It can be thawed and aliqouted to 15 ml tubes at 5 ml per tube and stored frozen at −20° C. Positive Hybridomas are fed HCF through the first subcloning and are gradually weaned. It is not necessary to continue to supplement unless you have a particularly difficult hybridoma clone. This and other additives have been shown to be more effective in promoting new hybridoma growth than conventional feeder layers.

[0402] ii) Procedure

[0403] To generate monoclonal antibodies, mice are immunized with 5-50 ug of antigen either intra-peritoneally (i.p.) or by intravenous injection in the tail vein (i.v.). Typically, the antigen used is a recombinant protein that is generated as described above. The primary immunization takes place 2 months prior to the harvesting of splenocytes from the mouse and the immunization is typically boosted by i.v. injection of 5-50 ug of antigen every two weeks. At least one week prior to expected fusion date, a fresh vial of myeloma cells is thawed and cultured. Several flasks at different densities are maintained in order that a culture at the optimum density is ensured at the time of fusion. The optimum density is determined to be 3-6×10⁵ cells/ml. Two to five days before the scheduled fusion, a final immunization is administered of ˜5 ug of antigen in PBS i.p. or i.v.

[0404] Myeloma cells are washed with 30 ml serum free media by centrifugation at 500 g at 4° C. for 5 minutes. Viable cell density is determined in resuspended cells using hemocytometry and vital stains. Cells resuspended in complete growth medium are stored at 37° C. during the preparation of splenocytes. Meanwhile, to test aminopterin sensitivity, 1×10⁶ myeloma cells are transferred to a 15 ml conical tube and centrifuged at 500 g at 4° C. for 5 minutes. The resulting pellet is resuspended in 15 ml of HAT media and cells plated at 2 drops/well on a 96 well plate.

[0405] To prepare splenocytes from immunized mice, the animals are euthanised and submerged in 70% ETOH. Under sterile conditions, the spleen is surgically removed and placed in 10 ml of RPMI medium supplemented with 20% fetal calf serum in a Petri dish. Cells are extricated from the spleen by infusing the organ with medium >50 times using a 21 g syringe.

[0406] Cells are harvested and washed by centrifugation (at 500 g at 4° C. for 5 minutes) with 30 ml of medium. Cells are resuspended in 10 ml of medium and the density of viable cells determined by hemocytometry using vital stains. The splenocytes are mixed with myeloma cells at a ratio of 5:1 (spleen cells: myeloma cells). Both the myeloma and spleen cells are washed 2 more times with 30 ml of RPMI-CMNS. Spin at 800 rpm for 12 minutes.

[0407] Supernatant is removed and cells are resuspended in 5 ml of RPMI-CMNS and are pooled to fill volume to 30 ml and spin down as before. Then, the pellet is broken up by gently tapping on the flow hood surface and resuspended in 1 ml of BMB REG1500 (prewarmed to 37° C.) dropwise with 1 cc needle over 1 minute.

[0408] RPMI-CMNS to the PEG cells and RPMI-CMNS are added to slowly dilute out the PEG. Cells are centrifuged and diluted in 5 ml of Complete media and 95 ml of Clonacell Medium D (HAT) media (with 5 ml of HCF). The cells are plated out 10 ml per small petri plate.

[0409] Myeloma/HAT control. P is prepared as follows: dilute about 1000 P3X63 Ag8.653 myeloma cells into 1 ml of medium D and transfer into a single well of a 24 well plate. Plates are placed in incubator, with two plates inside of a large petri plate, with an additional petri plate full of distilled water, for 10-18 days under 5% CO2 overlay at 37° C. Clones are picked from semisolid agarose into 96 well plates containing 150-200 ul of CM-HT. Supernatants are screened 4 days later in ELISA, and positive clones are moved up to 24 well plates. Heavy growth will require changing of the media at day 8 (+/−150 ml). One should further decrease the HCF to 0.5% (gradually—2%, then 1%, then 0.5%) in the cloning plates.

[0410] For further references see Kohler G, and C. Milstein Continuous cultures of fused cells secreting antibody of predefined specificity. 1975. Nature 256: 495-497; Lane, R. D. A short duration polyethylene glycol fusion technique for increasing production of monoclonal antibody-secreting hybridomas. 1985. J. Immunol. Meth. 81:223-228;

[0411] Harlow, E. and D. Lane. Antibodies: A laboratory manual. Cold Spring Harbour Laboratory Press. 1988; Kubitz, D. The Scripps Research Institute. La Jolla. Personal Communication; Zhong, G., Berry, J. D., and Choukri, S. (1996) Mapping epitopes of Chlamydia trachomatis neutralizing monoclonal antibodies using phage random peptide libraries. J. Indust. Microbiol. Biotech. 19, 71-76; Berry, J. D., Licea, A., Popkov, M., Cortez, X., Fuller, R., Elia, M., Kerwin, L., and C.F. Barbas III. (2003)

[0412] Rapid monoclonal antibody generation via dendritic cell targeting in vivo. Hybridoma and Hybridomics 22 (1), 23-31.

### 6. mRNA Expression

### Validation in Tissues by Taqman

[0413] Expression of mRNA is quantitated by RT-PCR using TaqMan® technology. The Taqman system couples a 5′ fluorogenic nuclease assay with PCR for real time quantitation. A probe is used to monitor the formation of the amplification product.

[0414] Total RNA is isolated from cancer model cell lines using the RNEasy Kit® (Qiagen) per manufacturer's instructions and included DNase treatment. Normal human tissue RNAs are acquired from commercial vendors (Ambion, Austin, Tex.; Stratagene, La Jolla, Calif., BioChain Institute, Newington, N.H.) as were RNAs from matched disease/normal tissues.

[0415] Target transcript sequences are identified for the differentially expressed peptides by searching the BlastP database. TaqMan assays (PCR primer/probe set) specific for those transcripts are identified by searching the Celera Discovery System™ (CDS) database. The assays are designed to span exon-exon borders and do not amplify genomic DNA.

[0416] The TaqMan primers and probe sequences are as designed by Applied Biosystems (AB) as part of the Assays on Demand™ product line or by custom design through the AB Assays by Design^{SM} service.

[0417] RT-PCR is accomplished using AmpliTaqGold and MultiScribe reverse transcriptase in the One Step RT-PCR Master Mix reagent kit (AB) according to the manufacturer's instructions. Probe and primer concentrations are 250 nM and 900 nM, respectively, in a 15 μl reaction. For each experiment, a master mix of the above components is made and aliquoted into each optical reaction well. Eight nanograms of total RNA is the template. Each sample is assayed in triplicate. Quantitative RT-PCR is performed using the ABI Prism® 7900HT Sequence Detection System (SDS). Cycling parameters follow: 48° C. for 30 min. for one cycle; 95° C. for 10 min for one cycle; 95° C. for 15 sec, 60° C. for 1 min. for 40 cycles.

[0418] The SDS software calculates the threshold cycle (C_{T}) for each reaction, and C_{T} values are used to quantitate the relative amount of starting template in the reaction. The C_{T} values for each set of three reactions are averaged for all subsequent calculations

[0419] Data are analyzed for fold difference in expression using an endogenous control for normalization and is expressed relative to a normal tissue or normal cell line reference. The choice of endogenous control is determined empirically by testing various candidates against the cell line and tissue RNA panels and selecting the one with the least variation in expression. Relative changes in expression are quantitated using the 2^{-ΔΔCT} Method. Livak, K. J. and Schmittgen, T. D. (2001) Methods 25: 402-408; User bulletin #2: ABI Prism 7700 Sequence Detection System.

### Validation by Tissue Flow Cytometry Analysis

[0420] Post tissue processing, cells are sorted by flow cytometry known in the art to enrich for epithelial cells. Alternatively, cells isolated from lung tissue are stained directly with EpCAM (for epithelial cells) and the specific antibody to CCAT. Cell numbers and viability are determined by PI exclusion (GUAVA) for cells isolated from both normal and tumor lung tissue. A minimum of 0.5×10⁶ cells are used for each analysis. Cells are washed once with Flow Staining Buffer (0.5% BSA, 0.05% NaN3 in D-PBS). To the cells, 20 ul of each antibody for CCAT are added. An additional 5 ul of EpCAM antibody conjugated to APC were added when unsorted cells are used in the experiment. Cells are incubated with antibodies for 30 minutes at 4° C. Cells are washed once with Flow Staining Buffer and either analyzed immediately on the LSR flow cytometry apparatus or fixed in 1% formaldehyde and store at 4° C. until LSR analysis. The antibodies used to detect CCAT targets are all purchased by BD Biosciences and PE-conjugated. The isotype control antibody used for these experiments is PE-conjugated mouse IgG1k.

### 7. Detection and Diagnosis of CCAT by Liquid Chromatography and Mass Spectrometry (LC/MS)

[0421] The proteins from cells can be prepared by reduction, alkylation and cysteine-containing peptide enrichment of concentrated conditioned media.

[0422] The differential expression of proteins in disease and healthy samples are quantitated using Liquid Chromatography Mass Spectrometry. The LC/MS spectra from disease and healthy (control) samples are collected and processed using the following steps:

[0423] The raw scans from the LC/MS instrument are subjected to peak detection and noise reduction software. Filtered peak lists are then used to detect ‘features’ corresponding to specific peptides from the original sample(s). Features are characterized by their mass/charge, charge, retention time, isotope pattern and intensity.

[0424] Similar experiments are repeated in order to increase the confidence in detection of a peptide. These multiple acquisitions are computationally aggregated into one experiment. The intensity of a peptide present in both healthy and disease samples is used to calculate the differential expression, or relative abundance, of the peptide. The intensity of a peptide found exclusively in one sample is used to calculate a theoretical expression ratio for that peptide (singleton). Expression ratios are calculated for each peptide of each replicate of the experiment

[0425] Statistical tests are performed to assess the robustness of the data and select statistically significant differentials. To assess general quality of the data, a) ensured that similar features are detected in all replicates of the experiment; b) number of matched ions between replicates; c) calculated the overall pair wise intensity correlations between LC/MS maps of process replicates to ensure that the expression ratios for peptides are reproducible across the multiple replicates; d) aggregated multiple experiments in order to compare the expression ratio of a peptide in multiple diseases or disease samples.

### 8. Expression Validation by IHC in Tissue Sections

### Tissue Sections

[0426] Paraffin embedded, fixed tissue sections are obtained from a panel of normal tissues (Adrenal, Bladder, Lymphocytes, Bone Marrow, Breast, Cerebellum, Cerebral cortex, Colon, Endothelium, Eye, Fallopian tube, Small Intestine, Heart, Kidney [glomerulus, tubule], Liver, Lung, Testes and Thyroid) as well as 30 tumor samples with matched normal adjacent tissues from pancreas, lung, colon, prostate, ovarian and breast. In addition, other tissues are selected for testing such as bladder renal, hepatocellular, pharyngeal and gastric tumor tissues. Replicate sections are also obtained from numerous tumor types (Bladder Cancer, Lung Cancer, Breast Cancer, Melanoma, Colon Cancer, Non-Hodgkins Lymphoma, Endometrial Cancer, Ovarian Cancer, Head and Neck Cancer, Prostate Cancer, Leukemia [ALL and CML] and Rectal Cancer). Sections are stained with hemotoxylin and eosin and histologically examined to ensure adequate representation of cell types in each tissue section.

[0427] An identical set of tissues will be obtained from frozen sections and are used in those instances where it is not possible to generate antibodies that are suitable for fixed sections. Frozen tissues do not require an antigen retrieval step.

### Paraffin Fixed Tissue Sections

[0428] Hemotoxylin and Eosin staining of paraffin embedded, fixed tissue sections.

[0429] Sections are deparaffinized in 3 changes of xylene or xylene substitute for 2-5 minutes each. Sections are rinsed in 2 changes of absolute alcohol for 1-2 minutes each, in 95% alcohol for 1 minute, followed by 80% alcohol for 1 minute. Slides are washed well in running water and stained in Gill solution 3 hemotoxylin for 3 to 5 minutes. Following a vigorous wash in running water for 1 minute, sections are stained in Scott's solution for 2 minutes. Sections are washed for 1 min in running water then counterstained in Eosin solution for 2-3 minutes depending upon development of desired staining intensity. Following a brief wash in 95% alcohol, sections are dehydrated in three changes of absolute alcohol for 1 minute each and three changes of xylene or xylene substitute for 1-2 minutes each. Slides are coverslipped and stored for analysis.

### Optimisation of Antibody Staining

[0430] or each antibody, a positive and negative control sample are generated using data from the ICAT analysis of the colon cancer cell lines/tissues. Cells are selected that are known to express low levels of a particular target as determined from the ICAT data. This cell line is the reference normal control. Similarly, a colon tumor line is selected that is determined to overexpress the target is selected.

### Antigen Retrieval

[0431] Sections are deparaffinized and rehydrated by washing 3 times for 5 minutes in xylene; two times for 5 minutes in 100% ethanol; two times for 5 minutes in 95% ethanol; and once for 5 minutes in 80% ethanol. Sections are then placed in endogenous blocking solution (methanol+2% hydrogen peroxide) and incubated for 20 minutes at room temperature. Sections are rinsed twice for 5 minutes each in deionized water and twice for 5 minutes in phosphate buffered saline (PBS), pH 7.4. Alternatively, where necessary sections are deparrafinized by High Energy Antigen Retrieval as follows: sections are washed three times for 5 minutes in xylene; two times for 5 minutes in 100% ethanol; two times for 5 minutes in 95% ethanol; and once for 5 minutes in 80% ethanol. Sections are placed in a Coplin jar with dilute antigen retrieval solution (10 mM citrate acid, pH 6). The Coplin jar containing slides is placed in a vessel filled with water and microwaved on high for 2-3 minutes (700 watt oven). Following cooling for 2-3 minutes, steps 3 and 4 are repeated four times (depending on tissue), followed by cooling for 20 minutes at room temperature. Sections are then rinsed in deionized water, two times for 5 minutes, placed in modified endogenous oxidation blocking solution (PBS+2% hydrogen peroxide). and rinsed for 5 minutes in PBS.

### Blocking and Staining

[0432] Sections are blocked with PBS/1% bovine serum albumin (PBA) for 1 hour at room temperature followed by incubation in normal serum diluted in PBA (2%) for 30 minutes at room temperature to reduce non-specific binding of antibody. Incubations are performed in a sealed humidity chamber to prevent air-drying of the tissue sections. (The choice of blocking serum is the same as the species of the biotinylated secondary antibody). Excess antibody is gently removed by shaking and sections covered with primary antibody diluted in PBA and incubated either at room temperature for 1 hour or overnight at 4° C. (Care is taken that the sections do not touch during incubation). Sections are rinsed twice for 5 minutes in PBS, shaking gently. Excess PBS is removed by gently shaking. The sections are covered with diluted biotinylated secondary antibody in PBA and incubated for 30 minutes to 1 hour at room temperature in the humidity chamber. If using a monoclonal primary antibody, addition of 2% rat serum is used to decrease the background on rat tissue sections. Following incubation, sections are rinsed twice for 5 minutes in PBS, shaking gently. Excess PBS is removed and sections incubated for 1 hour at room temperature in Vectastain ABC reagent (as per kit instructions). The lid of the humidity chamber is secured during all incubations to ensure a moist environment. Sections are rinsed twice for 5 minutes in PBS, shaking gently.

### Develop and Counterstain

[0433] Sections are incubated for 2 minutes in peroxidase substrate solution that is made up immediately prior to use as follows:
[0434] 10 mg diaminobenzidine (DAB) dissolved in 10 ml 50 mM sodium phosphate buffer, pH 7.4.
[0435] 12.5 microliters 3% CoCl₂/NiCl2 in deionized water
[0436] 1.25 microliters hydrogen peroxide

[0437] Slides are rinsed well three times for 10 min in deionized water and counterstained with 0.01% Light Green acidified with 0.01% acetic acid for 1-2 minutes depending on intensity of counterstain desired.

[0438] Slides are rinsed three times for 5 minutes with deionized water and dehydrated two times for 2 minutes in 95% ethanol; two times for 2 minutes in 100% ethanol; and two times for 2 minutes in xylene. Stained slides are mounted for visualization by microscopy.

### 9. IHC Staining of Frozen Tissue Sections

[0439] Fresh tissues are embedded carefully in OCT in plastic mold, without trapping air bubbles surrounding the tissue. Tissues are frozen by setting the mold on top of liquid nitrogen until 70-80% of the block turns white at which point the mold is placed on dry ice. The frozen blocks were stored at −80° C. Blocks are sectioned with a cryostat with care taken to avoid warming to greater than −10° C. Initially, the block is equilibrated in the cryostat for about 5 minutes and 6-10 mm sections are cut sequentially. Sections are allowed to dry for at least 30 minutes at room temperature. Following drying, tissues are stored at 4° C. for short term and −80° C. for long term storage.)

[0440] Sections are fixed by immersing in acetone jar for 1-2 minutes at room temperature, followed by drying at room temp. Primary antibody is added (diluted in 0.05 M Tris-saline [0.05 M Tris, 0.15 M NaCl, pH 7.4], 2.5% serum) directly to the sections by covering the section dropwise to cover the tissue entirely. Binding is carried out by incubation a chamber for 1 hour at room temperature. Without letting the sections dry out, the secondary antibody (diluted in Tris-saline/2.5% serum) is added in a similar manner to the primary and incubated as before (at least 45 minutes).

[0441] Following incubation, the sections are washed gently in Tris-saline for 3-5 minutes and then in Tris-saline/2.5% serum for another 3-5 minutes. If a biotinylated primary antibody is used, in place of the secondary antibody incubation, slides are covered with 100 ul of diluted alkaline phosphatase conjugated streptavidin, incubated for 30 minutes at room temperature and washed as above. Sections are incubated with alkaline phosphatse substrate (1 mg/ml Fast Violet; 0.2 mg/ml Napthol AS-MX phosphate in Tris-Saline pH 8.5) for 10-20 minutes until the desired positive staining is achieved at which point the reaction is stopped by washing twice with Tris-saline. Slides are counter-stained with Mayer's hematoxylin for 30 seconds and washed with tap water for 2-5 minutes. Sections are mounted with Mount coverslips and mounting media.

### 10. Assay for Antibody Dependent Cellular Cytotoxicity

[0442] Cultured tumor cells are labeled with 100 μCi 51Cr for 1 hour; Livingston, P. O., Zhang, S., Adluri, S., Yao, T.-J., Graeber, L., Ragupathi, G., Helling, F., & Fleischer, M. (1997). Cancer Immunol. Immunother. 43, 324-330. After being washed three times with culture medium, cells are resuspended at 10⁵/ml, and 100 μl/well are plated onto 96-well round-bottom plates. A range of antibody concentrations are applied to the wells, including an isotype control together with donor peripheral blood mononuclear cells that are plated at a 100:1 and 50:1 ratio. After an 18-h incubation at 37° C., supernatant (30 μl/well) is harvested and transferred onto Lumaplate 96 (Packard), dried, and read in a Packard Top-Count NXT y counter. Each measurement is carried out in triplicate. Spontaneous release is determined by cpm of tumor cells incubated with medium and maximum release by cpm of tumor cells plus 1% Triton X-100 (Sigma). Specific lysis is defined as: % specific lysis=[(experimental release−spontaneous release)/(maximum release−spontaneous release)]×100. The percent ADCC is expressed as peak specific lysis postimmune subtracted by preimmune percent specific lysis. A doubling of the ADCC to >20% is considered significant.

### 11. Assay for Complement Dependent Cytotoxicity

[0443] Chromium release assays to assess complement-mediated cytotoxicity are performed for each patient at various time points; Dickler, M. N., Ragupathi, G., Liu, N. X., Musselli, C., Martino, D. J., Miller, V. A., Kris, M. G., Brezicka, F. T., Livingston, P. O. & Grant, S. C. (1999) Clin. Cancer Res. 5, 2773-2779. Cultured tumor cells are washed in FCS-free media two times, resuspended in 500 μl of media, and incubated with 100 μCi 51Cr per 10 million cells for 2 h at 37° C. The cells are then shaken every 15 min for 2 h, washed 3 times in media to achieve a concentration of approximately 20,000 cells/well, and then plated in round-bottom plates. The plates contain either 50 μl cells plus 50 μl monoclonal antibody, 50 μl cells plus serum (pre- and posttherapy), or 50 μl cells plus mouse serum as a control. The plates are incubated in a cold room on a shaker for 45 min. Human complement of a 1:5 dilution (resuspended in 1 ml of ice-cold water and diluted with 3% human serum albumin) is added to each well at a volume of 100 μl. Control wells include those for maximum release of isotope in 10% Triton X-100 (Sigma) and for spontaneous release in the absence of complement with medium alone. The plates are incubated for 2 h at 37° C., centrifuged for 3 min, and then 100 μl of supernatant is removed for radioactivity counting. The percentage of specific lysis is calculated as follows: % cytotoxicity=[(experimental release−spontaneous release)/(maximum release−spontaneous release)]×100. A doubling of the CDC to >20% is considered significant.

### 12. In Vitro Assays in Cell Lines; RNAi

[0444] Lipofectamine is purchased from Invitrogen (Carlsbad, Calif.) and GeneSilencer from Gene Therapy Systems (San Diego, Calif.). Synthetic siRNA oligonucleotides are from Dharmacon (Lafayette, Colo.), Qiagen (Valencia, Calif.) or Ambion (Austin, Tex.) RNeasy 96 Kit is purchased from Qiagen (Valencia, Calif.). Apop-one homogeneous caspase-3/7 kit and CellTiter 96 AQueous One Solution Cell Proliferation Assay are both purchased from Promega (Madison, Wis.). Alamar Blue proliferation assay can be purchased from Biosource (Camarillo, Calif.). Function blocking antibodies are purchased from Chemicon (Temecula, Calif.), Biotrend (Cologne, Germany) or Alexis Corporation (San Diego, Calif.). Cell invasion assay kits from purchased from Chemicon (Temecula, Calif.). RiboGreen RNA Quantitation Kit is purchased from Molecular probes (Eugene, Oreg.).

### RNAi

[0445] RNAi is performed by using Smartpools (Dharmacon), 4-for Silencing siRNA duplexes (Qiagen) or scrambled negative control siRNA (Ambion). Transient transfections are carried out in triplicate by using either Lipofectamine 2000 from Invitrogen (Carlsbad, Calif.) or by using GeneSilencer from Gene Therapy Systems (San Diego, Calif.) in methods described below. 1 to 4 days after transfections, total RNA is isolated by using the RNeasy 96 Kit (Qiagen) according to manufacturer's instructions and expression of mRNA is quantitated by using TaqMan technology. Protein expression levels are examined by flow cytometry and apoptosis and proliferation assays are performed daily using Apop-one homogeneous caspase-3/7 kit and CellTiter 96 AQueous One Solution Cell Proliferation Assay (see protocols below).

[0446] i) RNAi Transfections—Lipofectamine 2000

[0447] Transient transfections are carried out on sub-confluent colon cancer cell lines as previously described. Elbashir, S. M. et al. (2001) Nature 411: 494-498; Caplen, N. J. et al. (2001) Proc Natl Acad Sci USA 98: 9742-9747; Sharp, P. A. (2001) Genes and Development 15: 485-490. Synthetic RNA to gene of interest or scrambled negative control siRNA is transfected using lipofectamine according to manufacturer's instructions. Cells are plated in 96 well plates in antibiotics free medium. The next day, the transfection reagent and siRNA are prepared for transfections as follows: Each 0.1-1 ul of lipofectamine 2000 and 10-150 mM siRNA are resuspended 25 ul serum-free media and incubated at room temperature for 5 minutes. After incubation, the diluted siRNA and the lipofectamine 2000 are combined and incubated for 20 minutes at room temperature. The cells are then washed and the combined siRNA-Lipofectamine 2000 reagent added. After further 4 hours incubation, 50 ul serum containing medium is added to each well. 1 and 4 days after transfection, expression of mRNA is quantitated by RT-PCR using TaqMan technology and protein expression levels are examined by flow cytometry. Apoptosis and proliferation assays are performed daily using Apop-one homogeneous caspase-3/7 kit and CellTiter 96 AQueous One Solution Cell Proliferation Assay (see protocols below).

[0448] ii) RNAi Transfections—GeneSilencer

[0449] Transient transfections are carried out on sub-confluent colon cancer cell lines as previously described. Elbashir, S. M. et al. (2001) Nature 411: 494-498; Caplen, N. J. et al. (2001) Proc Natl Acad Sci USA 98: 9742-9747; Sharp, P. A. (2001) Genes and Development 15: 485-490. Synthetic RNA to gene of interest or scrambled negative control siRNA is transfected using GeneSilencer according to manufacturer's instructions. Cells are plated in 96 well plates in antibiotics free medium. The next day, the transfection reagent and the synthetic siRNA are prepared for transfections as follows: predetermined amount of Gene Silencer is diluted in serum-free media to a final volume of 20 ul per well. After resuspending 10-150 mM siRNA in 20 ul serum-free media, the reagents are combined and incubated at room temperature for 5-20 minutes. After incubation, the siRNA-Gene Silencer reagent is added to each well and incubated in a 37° C. incubator for 4 hours before an equal volume of serum containing media is added back to the cultured cells. The cells are then incubated for 1 to 4 days before mRNA, protein expression and effects on apoptosis and proliferation are examined.

### Testing of Function Blocking Antibodies

[0450] Sub-confluent colon cancer cell lines are serum-staved overnight. The next day, serum-containing media is added back to the cells in the presence of 5-50 ng/ml of function blocking antibodies. After 2 or 5 days incubation at 37° C. 5% CO₂, antibody binding is examined by flow cytometry and apoptosis and proliferation are examined by using protocols described below.

### Apoptosis

[0451] Apoptosis assay is performed by using the Apop-one homogeneous caspase-3/7 kit from Promega. Briefly, the caspase-3/7 substrate is thawed to room temperature and diluted 1:100 with buffer. The diluted substrate is then added 1:1 to cells, control or blank. The plates are then placed on a plate shaker for 30 minutes to 18 hours at 300-500 rpm. The fluorescence of each well is then measured at using an excitation wavelength of 485+/−20 nm and an emission wavelength of 530+/−25 nm.

### Proliferation—MTS

[0452] Proliferation assay is performed by using the CellTiter 96 AQueous One Solution Cell Proliferation Assay kit from Promega. 20 ul of CellTiter 96 AQueous One Solution is added to 100 ul of culture medium. The plates are then incubated for 1-4 hours at 37° C. in a humidified 5% CO₂ incubator. After incubation, the change in absorbance is read at 490 nm.

### Proliferation—Alamar Blue

[0453] Proliferation assay is performed by using the Alamar Blue assay from Biosource. 10 ul of Alamar Blue reagent is added to 100 ul of cells in culture medium. The plates are then incubated for 1-4 hours at 37° C. in a humidified 5% CO₂ incubator. After incubation, the change in fluorescence is measured at using an excitation wavelength of 530 nm and an emission wavelength of 595 nm.

### Cell Invasion

[0454] Cell invasion assay is performed by using the 96 well cell invasion assay kit available from Chemicon. After the cell invasion chamber plates are adjusted to room temperature, 100 ul serum-free media is added to the interior of the inserts. 1-2 hours later, cell suspensions of 1×10⁶ cells/ml are prepared. Media is then carefully removed from the inserts and 100 ul of prepared cells are added into the insert +/−0 to 50 ng function blocking antibodies. The cells are pre-incubated for 15 minutes at 37° C. before 150 ul of media containing 10% FBS is added to the lower chamber. The cells are then incubated for 48 hours at 37° C. After incubation, the cells from the top side of the insert are discarded and the invasion chamber plates are then placed on a new 96-well feeder tray containing 150 ul of pre-warmed cell detachment solution in the wells. The plates are incubated for 30 minutes at 37° C. and are periodically shaken. Lysis buffer/dye sulution (4 ul CyQuant Dye/300 ul 4× lysis buffer) is prepared and added to each well of dissociation buffer/cells on feeder tray. The plates are incubated for 15 minutes at room temperature before 150 ul is transferred to a new 96-well plate. Fluorescence of invading cells is then read at 480 excitation and 520 emission.

### Receptor Internalization

[0455] For quantification of receptor internalization, ELISA assays are performed essentially as described by Daunt et al. Daunt, D. A., Hurtz, C., Hein, L., Kallio, J., Feng, F., and Kobilka, B. K. (1997) Mol. Pharmacol. 51, 711-720. The cell lines are plated at 6×10⁵ cells per in a 24-well tissue culture dishes that have previously been coated with 0.1 mg/ml poly-L-lysine. The next day, the cells are washed once with PBS and incubated in DMEM at 37° C. for several minutes. Agonist to the cell surface target of interest is then added at a pre-determined concentration in prewarmed DMEM to the wells. The cells are then incubated for various times at 37° C. and reactions are stopped by removing the media and fixing the cells in 3.7% formaldehyde/TBS for 5 min at room temperature. The cells are then washed three times with TBS and nonspecific binding blocked with TBS containing 1% BSA for 45 min at room temperature. The first antibody is added at a pre-determined dilution in TBS/BSA for 1 h at room temperature. Three washes with TBS followed, and cells are briefly reblocked for 15 min at room temperature. Incubation with goat anti-mouse conjugated alkaline phosphatase (Bio-Rad) diluted 1:1000 in TBS/BSA is carried out for 1 h at room temperature. The cells are washed three times with TBS and a colorimetric alkaline phosphatase substrate is added. When the adequate color change is reached, 100-0 samples are taken for colorimetric readings.

mRNA Expression

[0456] Expression of mRNA is quantitated by RT-PCR using TaqMan® technology. Total RNA is isolated from cancer model cell lines using the RNEasy 96 kit (Qiagen) per manufacturer's instructions and included DNase treatment. Target transcript sequences are identified for the differentially expressed peptides by searching the BlastP database. TaqMan assays (PCR primer/probe set) specific for those transcripts are identified by searching the Celera Discovery System™ (CDS) database. The assays are designed to span exon-exon borders and do not amplify genomic DNA. The TaqMan primers and probe sequences are as designed by Applied Biosystems (AB) as part of the Assays on Demand™ product line or by custom design through the AB Assays by Design^{SM} service. RT-PCR is accomplished using AmpliTaqGold and MultiScribe reverse transcriptase in the One Step RT-PCR Master Mix reagent kit (AB) according to the manufacturer's instructions. Probe and primer concentrations are 900 nM and 250 nM, respectively, in a 25 μl reaction. For each experiment, a master mix of the above components is made and aliquoted into each optical reaction well. 5 ul of total RNA is the template. Each sample is assayed in triplicate. Quantitative RT-PCR is performed using the ABI Prism® 7900HT Sequence Detection System (SDS). Cycling parameters follow: 48° C. for 30 min. for one cycle; 95° C. for 10 min for one cycle; 95° C. for 15 sec, 60° C. for 1 min. for 40 cycles.

[0457] The SDS software calculates the threshold cycle (C_{T}) for each reaction, and C_{T} values are used to quantitate the relative amount of starting template in the reaction. The C_{T} values for each set of three reactions are averaged for all subsequent calculations.

[0458] Total RNA is quantitated by using RiboGreen RNA Quantitation Kit according to manufacturer's instructions and the % mRNA expression is calculated using total RNA for normalization. % knockdown is then calculated relative to the no addition control.

### 13. In Vivo Studies by Using Antibodies

[0459] Treatment of Colon Cancer Cells with Monoclonal Antibodies.

[0460] colon cancer cells are seeded at a density of 4×10⁴ cells per well in 96-well microtiter plates and allowed to adhere for 2 hours. The cells are then treated with different concentrations of anti-CCAT monoclonal antibody (Mab) or irrelevant isotype matched (anti-rHuIFN-. gamma. Mab) at 0.05, 0.5 or 5.0 mug/ml. After a 72 hour incubation, the cell monolayers are stained with crystal violet dye for determination of relative percent viability (RPV) compared to control (untreated) cells. Each treatment group consists of replicates. Cell growth inhibition is monitored.

Treatment of NIH 3T3 Cells Overexpression CCAT Protein with Monoclonal Antibodies.

[0461] NIH 3T3 expressing CCAT protein are treated with different concentrations of anti-CCAT MAbs. Cell growth inhibition is monitored.

In Vivo Treatment of NIH 3T3 Cells Overexpressing CCAT with Anti-CCAT Monoclonal Antibodies.

[0462] NIH 3T3 cells transfected with either a CCAT expression plasmidor the neo-DHFR vector are injected into nu/nu (athymic) mice subcutaneously at a dose of 10⁶ cells in 0.1 ml of phosphate-buffered saline. On days 0, 1, 5 and every 4 days thereafter, 100 mug (0.1 ml in PBS) of either an irrelevant or anti-CCAT monoclonal antibody of the IG2A subclass is injected intraperitoneally. Tumor occurrence and size are monitored for 1 month period of treatment.

[0463] All publications and patents mentioned in the above specification are herein incorporated by reference. Various modifications and variations of the described method and system of the invention will be apparent to those skilled in the art without departing from the scope and spirit of the invention. Although the invention has been described in connection with specific preferred embodiments, it should be understood that the invention as claimed should not be unduly limited to such specific embodiments. Indeed, various modifications of the above-described modes for carrying out the invention, which are obvious to those skilled in the field of molecular biology or related fields, are intended to be within the scope of the following claims.

The application's sequence listing, which the Patent Office published only in electronic form, follows.

SEQUENCE LISTING (2640 sequences)

SEQ ID NO: 1 - protein, 1675 aa, Homo sapiens
MAQILPIRFQEHLQLQNLGINPANIGFSTLTMESDKFICIREKVGEQAQVVIIDMNDPSNPIRRPISADSAIMNPASKVIALKAGKTLQIFNIEMKSKMKAHTMTDDVTFWKWISLNTVALVTDNAVYHWSMEGESQPVKMFDRHSSLAGCQIINYRTDAKQKWLLLTGISAQQNRVVGAMQLYSVDRKVSQPIEGHAASFAQFKMEGNAEESTLFCFAVRGQAGGKLHIIEVGTPPTGNQPFPKKAVDVFFPPEAQNDFPVAMQISEKHDVVFLITKYGYIHLYDLETGTCIYMNRISGETIFVTAPHEATAGIIGVNRKGQVLSVCVEEENIIPYITNVLQNPDLALRMAVRNNLAGAEELFARKFNALFAQGNYSEAAKVAANAPKGILRTPDTIRRFQSVPAQPGQTSPLLQYFGILLDQGQLNKYESLELCRPVLQQGRKQLLEKWLKEDKLECSEELGDLVKSVDPTLALSVYLRANVPNKVIQCFAETGQVQKIVLYAKKVGYTPDWIFLLRNVMRISPDQGQQFAQMLVQDEEPLADITQIVDVFMEYNLIQQCTAFLLDALKNNRPSEGPLQTRLLEMNLMHAPQVADAILGNQMFTHYDRAHIAQLCEKAGLLQRALEHFTDLYDIKRAVVHTHLLNPEWLVNYFGSLSVEDSLECLRAMLSANIRQNLQICVQVASKYHEQLSTQSLIELFESFKSFEGLFYFLGSIVNFSQDPDVHFKYIQAACKTGQIKEVERICRESNCYDPERVKNFLKEAKLTDQLPLIIVCDRFDFVHDLVLYLYRNNLQKYIEIYVQKVNPSRLPVVIGGLLDVDCSEDVIKNLILVVRGQFSTDELVAEVEKRNRLKLLLPWLEARIHEGCEEPATHNALAKIYIDSNNNPERFLRENPYYDSRVVGKYCEKRDPHLACVAYERGQCDLELINVCNENSLFKSLSRYLVRRKDPELWGSVLLESNPYRRPLIDQVVQTALSETQDPEEVSVTVKAFMTADLPNELIELLEKIVLDNSVFSEHRNLQNLLILTAIKADRTRVMEYINRLDNYDAPDIANIAISNELFEEAFAIFRKFDVNTSAVQVLIEHIGNLDRAYEFAERCNEPAVWSQLAKAQLQKGMVKEAIDSYIKADDPSSYMEVVQAANTSGNWEELVKYLQMARKKARESYVETELIFALAKTNRLAELEEFINGPNNAHIQQVGDRCYDEKMYDAAKLLYNNVSNFGRLASTLVHLGEYQAAVDGARKANSTRTWKEVCFACVDGKEFRLAQMCGLHIVVHADELEELINYYQDRGYFEELITMLEAALGLERAHMGMFTELAILYSKFKPQKMREHLELFWSRVNIPKVLRAAEQAHLWAELVFLYDKYEEYDNAIITMMNHPTDAWKEGQFKDIITKVANVELYYRAIQFYLEFKPLLLNDLLMVLSPRLDHTRAVNYFSKVKQLPLVKPYLRSVQNHNNKSVNESLNNLFITEEDYQALRTSIDAYDNFDNISLAQRLEKHELIEFRRIAAYLFKGNNRWKQSVELCKKDSLYKDAMQYASESKDTELAEELLQWFLQEEKRECFGACLFTCYDLLRPDVVLETAWRHNIMDFAMPYFIQVMKEYLTKVDKLDASESLRKEEEQATETQPIVYGQPQLMLTAGPSVAVPPQAPFGYGYTAPPYGQPQPGFGYSM

SEQ ID NO: 2 - protein, 1674 aa, Homo sapiens
AQILPIRFQEHLQLQNLGINPANIGFSTLTMESDKFICIREKVGEQAQVVIIDMNDPSNPIRRPISADSAIMNPASKVIALKAGKTLQIFNIEMKSKMKAHTMTDDVTFWKWISLNTVALVTDNAVYHWSMEGESQPVKMFDRHSSLAGCQIINYRTDAKQKWLLLTGISAQQNRVVGAMQLYSVDRKVSQPIEGHAASFAQFKMEGNAEESTLFCFAVRGQAGGKLHIIEVGTPPTGNQPFPKKAVDVFFPPEAQNDFPVAMQISEKHDVVFLITKYGYIHLYDLETGTCIYMNRISGETIFVTAPHEATAGIIGVNRKGQVLSVCVEEENIIPYITNVLQNPDLALRMAVRNNLAGAEELFARKFNALFAQGNYSEAAKVAANAPKGILRTPDTIRRFQSVPAQPGQTSPLLQYFGILLDQGQLNKYESLELCRPVLQQGRKQLLEKWLKEDKLECSEELGDLVKSVDPTLALSVYLRANVPNKVIQCFAETGQVQKIVLYAKKVGYTPDWIFLLRNVMRISPDQGQQFAQMLVQDEEPLADITQIVDVFMEYNLIQQCTAFLLDALKNNRPSEGPLQTRLLEMNLMHAPQVADAILGNQMFTHYDRAHIAQLCEKAGLLQRALEHFTDLYDIKRAVVHTHLLNPEWLVNYFGSLSVEDSLECLRAMLSANIRQNLQICVQVASKYHEQLSTQSLIELFESFKSFEGLFYFLGSIVNFSQDPDVHFKYIQAACKTGQIKEVERICRESNCYDPERVKNFLKEAKLTDQLPLIIVCDRFDFVHDLVLYLYRNNLQKYIEIYVQKVNPSRLPVVIGGLLDVDCSEDVIKNLILVVRGQFSTDELVAEVEKRNRLKLLLPWLEARIHEGCEEPATHNALAKIYIDSNNNPERFLRENPYYDSRVVGKYCEKRDPHLACVAYERGQCDLELINVCNENSLFKSLSRYLVRRKDPELWGSVLLESNPYRRPLIDQVVQTALSETQDPEEVSVTVKAFMTADLPNELIELLEKIVLDNSVFSEHRNLQNLLILTAIKADRTRVMEYINRLDNYDAPDIANIAISNELFEEAFAIFRKFDVNTSAVQVLIEHIGNLDRAYEFAERCNEPAVWSQLAKAQLQKGMVKEAIDSYIKADDPSSYMEVVQAANTSGNWEELVKYLQMARKKARESYVETELIFALAKTNRLAELEEFINGPNNAHIQQVGDRCYDEKMYDAAKLLYNNVSNFGRLASTLVHLGEYQAAVDGARKANSTRTWKEVCFACVDGKEFRLAQMCGLHIVVHADELEELINYYQDRGYFEELITMLEAALGLERAHMGMFTELAILYSKFKPQKMREHLELFWSRVNIPKVLRAAEQAHLWAELVFLYDKYEEYDNAIITMMNHPTDAWKEGQFKDIITKVANVELYYRAIQFYLEFKPLLLNDLLMVLSPRLDHTRAVNYFSKVKQLPLVKPYLRSVQNHNNKSVNESLNNLFITEEDYQALRTSIDAYDNFDNISLAQRLEKHELIEFRRIAAYLFKGNNRWKQSVELCKKDSLYKDAMQYASESKDTELAEELLQWFLQEEKRECFGACLFTCYDLLRPDVVLETAWRHNIMDFAMPYFIQVMKEYLTKVDKLDASESLRKEEEQATETQPIVYGQPQLMLTAGPSVAVPPQAPFGYGYTAPPYGQPQPGFGYSM

SEQ ID NO: 3 - protein, 1682 aa, Homo sapiens
MAQILPIRFQEHLQLQNLGINPANIGFSTLTMESDKFICIREKVGEQAQVVIIDMNDPSNPIRRPISADSAIMNPASKVIALKAGKTLQIFNIEMKSKMKAHTMTDDVTFWKWISLNTVALVTDNAVYHWSMEGESQPVKMFDRHSSLAGCQIINYRTDAKQKWLLLTGISAQQNRVVGAMQLYSVDRKVSQPIEGHAASFAQFKMEGNAEESTLFCFAVRGQAGGKLHIIEVGTPPTGNQPFPKKAVDVFFPPEAQNDFPVAMQISEKHDVVFLITKYGYIHLYDLETGTCIYMNRISGETIFVTAPHEATAGIIGVNRKGQVLSVCVEEENIIPYITNVLQNPDLALRMAVRNNLAGAEELFARKFNALFAQGNYSEAAKVAANAPKGILRTPDTIRRFQSVPAQPGQTSPLLQYFGILLDQGQLNKYESLELCRPVLQQGRKQLLEKWLKEDKLECSEELGDLVKSVDPTLALSVYLRANVPNKVIQCFAETGQVQKIVLYAKKVGYTPDWIFLLRNVMRISPDQGQQFAQMLVQDEEPLADITQIVDVFMEYNLIQQCTAFLLDALKNNRPSEGPLQTRLLEMNLMHAPQVADAILGNQMFTHYDRAHIAQLCEKAGLLQRALEHFTDLYDIKRAVVHTHLLNPEWLVNYFGSLSVEDSLECLRAMLSANIRQNLQICVQVASKYHEQLSTQSLIELFESFKSFEGLFYFLGSIVNFSQDPDVHFKYIQAACKTGQIKEVERICRESNCYDPERVKNFLKEAKLTDQLPLIIVCDRFDFVHDLVLYLYRNNLQKYIEIYVQKVNPSRLPVVIGGLLDVDCSEDVIKNLILVVRGQFSTDELVAEVEKRNRLKLLLPWLEARIHEGCEEPATHNALAKIYIDSNNNPERFLRENPYYDSRVVGKYCEKRDPHLACVAYERGQCDLELINVCNENSLFKSLSRYLVRRKDPELWGSVLLESNPYRRPLIDQVVQTALSETQDPEEVSVTVKAFMTADLPNELIELLEKIVLDNSVFSEHRNLQNLLILTAIKADRTRVMEYINRLDNYDAPDIANIAISNELFEEAFAIFRKFDVNTSAVQVLIEHIGNLDRAYEFAERCNEPAVWSQLAKAQLQKGMVKEAIDSYIKADDPSSYMEVVQAANTSGNWEELVKYLQMARKKARESYVETELIFALAKTNRLAELEEFINGPNNAHIQQVGDRCYDEKMYDAAKLLYNNVSNFGRLASTLVHLGEYQAAVDGARKANSTRTWKEVCFACVDGKEFRLAQMCGLHIVVHADELEELINYYQDRGYFEELITMLEAALGLERAHMGMFTELAILYSKFKPQKMREHLELFWSRVNIPKVLRAAEQAHLWAELVFLYDKYEEYDNAIITMMNHPTDAWKEGQFKDIITKVANVELYYRAIQFYLEFKPLLLNDLLMVLSPRLDHTRAVNYFSKVKQLPLVKPYLRSVQNHNNKSVNESLNNLFITEEDYQALRTSIDAYDNFDNISLAQRLEKHELIEFRRIAAYLFKGNNRWKQSVELCKKDSLYKDAMQYASESKDTELAEELLQWFLQEEKRECFGACLFTCYDLLRPDVVLETAWRHNIMDFAMPYFIQVMKEYLTKVDAIKEKVDKLDASESLRKEEEQATETQPIVYGQPQLMLTAGPSVAVPPQAPFGYGYTAPPYGQPQPGFGYSM

SEQ ID NO: 4 - protein, 1639 aa, Homo sapiens
MAQILPIRFQEHLQLQNLGINPANIGFSTLTMESDKFICIREKVGEQAQVVIIDMNDPSNPIRRPISADSAIMNPASKVIALKAGKTLQIFNIEMKSKMKAHTMTDDVTFWKWISLNTVALVTDNAVYHWSMEGESQPVKMFDRHSSLAGCQIINYRTDAKQKWLLLTGISAQQNRVVGAMQLYSVDRKVSQPIEGHAASFAQFKMEGNAEESTLFCFAVRGQAGGKLHIIEVGTPPTGNQPFPKKAVDVFFPPEAQNDFPVAMQISEKHDVVFLITKYGYIHLYDLETGTCIYMNRISGETIFVTAPHEATAGIIGVNRKGQVLSVCVEEENIIPYITNVLQNPDLALRMAVRNNLAGAEELFARKFNALFAQGNYSEAAKVAANAPKGILRTPDTIRRFQSVPAQPGQTSPLLQYFGILLDQGQLNKYESLELCRPVLQQGRKQLLEKWLKEDKLECSEELGDLVKSVDPTLALSVYLRANVPNKVIQCFAETGQVQKIVLYAKKVGYTPDWIFLLRNVMRISPDQGQQFAQMLVQDEEPLADITQIVDVFMEYNLIQQCTAFLLDALKNNRPSEGPLQTRLLEMNLMHAPQVADAILGNQMFTHYDRAHIAQLCEKAGLLQRALEHFTDLYDIKRAVVHTHLLNPEWLVNYFGSLSVEDSLECLRAMLSANIRQNLQICVQVASKYHEQLSTQSLIELFESFKSFEGLFYFLGSIVNFSQDPDVHFKYIQAACKTGQIKEVERICRESNCYDPERVKNFLKEAKLTDQLPLIIVCDRFDFVHDLVLYLYRNNLQKYIEIYVQKVNPSRLPVVIGGLLDVDCSEDVIKNLILVVRGQFSTDELVAEVEKRNRLKLLLPWLEARIHEGCEEPATHNALAKIYIDSNNNPERFLRENPYYDSRVVGKYCEKRDPHLACVAYERGQCDLELINVCNENSLFKSLSRYLVRRKDPELWGSVLLESNPYRRPLIDQVVQTALSETQDPEEVSVTVKAFMTADLPNELIELLEKIVLDNSVFSEHRNLQNLLILTAIKADRTRVMEYINRLDNYDAPDIANIAISNELFEEAFAIFRKFDVNTSAVQVLIEHIGNLDRAYEFAERCNEPAVWSQLAKAQLQKGMVKEAIDSYIKADDPSSYMEVVQAANTSGNWEELVKYLQMARKKARESYVETELIFALAKTNRLAELEEFINGPNNAHIQQVGDRCYDEKMYDAAKLLYNNVSNFGRLASTLVHLGEYQAAVDGARKANSTRTWKEVCFACVDGKEFRLAQMCGLHIVVHADELEELINYYQDRGYFEELITMLEAALGLERAHMGMFTELAILYSKFKPQKMREHLELFWSRVNIPKVLRAAEQAHLWAELVFLYDKYEEYDNAIITMMNHPTDAWKEGQFKDIITKVANVELYYRAIQFYLEFKPLLLNDLLMVLSPRLDHTRAVNYFSKVKQLPLVKPYLRSVQNHNNKSVNESLNNLFITEEDYQALRTSIDAYDNFDNISLAQRLEKHELIEFRRIAAYLFKGNNRWKQSVELCKKDSLYKDAMQYASESKDTELAEELLQWFLQEEKRECFGACLFTCYDLLRPDVVLETAWRHNIMDFAMPYFIQVMKEYLTKVDKLDASESLRKEEEQATETQPIVYGNLSL

SEQ ID NO: 5 - protein, 1675 aa, Homo sapiens; identical to SEQ ID NO: 1

SEQ ID NO: 6 - protein, 1675 aa, Homo sapiens; identical to SEQ ID NO: 1

SEQ ID NO: 7 - protein, 1679 aa, Homo sapiens
MAQILPIRFQEHLQLQNLGINPANIGFSTLTMESDKFICIREKVGEQAQVVIIDMNDPSNPIRRPISADSAIMNPASKVIALKGIKESGKTLQIFNIEMKSKMKAHTMTDDVTFWKWISLNTVALVTDNAVYHWSMEGESQPVKMFDRHSSLAGCQIINYRTDAKQKWLLLTGISAQQNRVVGAMQLYSVDRKVSQPIEGHAASFAQFKMEGNAEESTLFCFAVRGQAGGKLHIIEVGTPPTGNQPFPKKAVDVFFPPEAQNDFPVAMQISEKHDVVFLITKYGYIHLYDLETGTCIYMNRISGETIFVTAPHEATAGIIGVNRKGQVLSVCVEEENIIPYITNVLQNPDLALRMAVRNNLAGAEELFARKFNALFAQGNYSEAAKVAANAPKGILRTPDTIRRFQSVPAQPGQTSPLLQYFGILLDQGQLNKYESLELCRPVLQQGRKQLLEKWLKEDKLECSEELGDLVKSVDPTLALSVYLRANVPNKVIQCFAETGQVQKIVLYAKKVGYTPDWIFLLRNVMRISPDQGQQFAQMLVQDEEPLADITQIVDVFMEYNLIQQCTAFLLDALKNNRPSEGPLQTRLLEMNLMHAPQVADAILGNQMFTHYDRAHIAQLCEKAGLLQRALEHFTDLYDIKRAVVHTHLLNPEWLVNYFGSLSVEDSLECLRAMLSANIRQNLQICVQVASKYHEQLSTQSLIELFESFKSFEGLFYFLGSIVNFSQDPDVHFKYIQAACKTGQIKEVERICRESNCYDPERVKNFLKEAKLTDQLPLIIVCDRFDFVHDLVLYLYRNNLQKYIEIYVQKVNPSRLPVVIGGLLDVDCSEDVIKNLILVVRGQFSTDELVAEVEKRNRLKLLLPWLEARIHEGCEEPATHNALAKIYIDSNNNPERFLRENPYYDSRVVGKYCEKRDPHLACVAYERGQCDLELINVCNENSLFKSLSRYLVRRKDPELWGSVLLESNPYRRPLIDQVVQTALSETQDPEEVSVTVKAFMTADLPNELIELLEKIVLDNSVFSEHRNLQNLLILTAIKADRTRVMEYINRLDNYDAPDIANIAISNELFEEAFAIFRKFDVNTSAVQVLIEHIGNLDRAYEFAERCNEPAVWSQLAKAQLQKGMVKEAIDSYIKADDPSSYMEVVQAANTSGNWEELVKYLQMARKKARESYVETELIFALAKTNRLAELEEFINGPNNAHIQQVGDRCYDEKMYDAAKLLYNNVSNFGRLASTLVHLGEYQAAVDGARKANSTRTWKEVCFACVDGKEFRLAQMCGLHIVVHADELEELINYYQDRGYFEELITMLEAALGLERAHMGMFTELAILYSKFKPQKMREHLELFWSRVNIPKVLRAAEQAHLWAELVFLYDKYEEYDNAIITMMNHPTDAWKEGQFKDIITKVANVELYYRAIQFYLEFKPLLLNDLLMVLSPRLDHTRAVNYFSKVKQLPLVKPYLRSVQNHNNKSVNESLNNLFITEEDYQALRTSIDAYDNFDNISLAQRLEKHELIEFRRIAAYLFKGNNRWKQSVELCKKDSLYKDAMQYASESKDTELAEELLQWFLQEEKRECFGACLFTCYDLLRPDVVLETAWRHNIMDFAMPYFIQVMKEYLTKVDKLDASESLRKEEEQATETQPIVYGQPQLMLTAGPSVAVPPQAPFGYGYTAPPYGQPQPGFGYSM

SEQ ID NO: 8 - protein, 725 aa, Homo sapiens
MEPGDAARPGSGRATGAPPPRLLLLPLLLGWGLRVAAAASASSSGAAAEDSSAMEELATEKEAEESHRQDSVSLLTFILLLTLTILTIWLFKHRRVRFLHETGLAMIYGLIVGVILRYGTPATSGRDKSLSCTQEDRAFSTLLVNVSGKFFEYTLKGEISPGKINSVEQNDMLRKVTFDPEVFFNILLPPIIFHAGYSLKKRHFFRNLGSILAYAFLGTAVSCFIIGNLMYGVVKLMKIMGQLSDKFYYTDCLFFGAIISATDPVTVLAIFNELHADVDLYALLFGESVLNDAVAIVLSSSIVAYQPAGLNTHAFDAAAFFKSVGIFLGIFSGSFTMGAVTGVNANVTKFTKLHCFPLLETALFFLMSWSTFLLAEACGFTGVVAVLFCGITQAHYTYNNLSVESRSRTKQLFEVLHFLAENFIFSYMGLALFTFQKHVFSPIFIIGAFVAIFLGRAAHIYPLSFFLNLGRRHKIGWNFQHMMMFSGLRGAMAFALAIRDTASYARQMMFTTTLLIVFFTVWIIGGGTTPMLSWLNIRVGVEEPSEEDQNEHHWQYFRVGVDPDQDPPPNNDSFQVLQGDGPDSARGNRTKQESAWIFRLWYSFDHNYLKPILTHSGPPLTTTLPAWCGLLARCLTSPQVYDNQEPLREEDSDFILTEGDLTLTYGDSTVTANGSSSSHTASTSLEGSRRTKSSSEEVLERDLGMGDQKVSSRGTRLVFPLEDNA

SEQ ID NO: 9 - protein, 725 aa, Homo sapiens; identical to SEQ ID NO: 8

SEQ ID NO: 10 - protein, 725 aa, Homo sapiens; identical to SEQ ID NO: 8

SEQ ID NO: 11 - protein, 725 aa, Homo sapiens; identical to SEQ ID NO: 8

SEQ ID NO: 12 - protein, 487 aa, Homo sapiens
MSCHFPGSPPWALAGQPGASAPDWSTPDPFAAFLLSQVQALEQRNQLLETRWSFLQGQDSAIFDLGHLYEEYQGRLQEELRKVSQERGQLEANLLQVLEKVEEFRIRYEDEISKRTDMEFTFVQLKKVACPACPRGSFLMGPGPSFPPDILLSFMPNQSPQRLKSQDQQTDREIPPSPSSSFFEALSQISSGITPTLTQEAAPQPTPALGPSIPSPTTHHCCQPQDLDAECLHRTELETKLKSLESFVELMKTIYEQELKDLAAQVKDVSVTVGMDSRCHIDLSGIVEEVKAQYDAVAARSLEEAEAYSRSQLEEQAARSAEYGSSLQSSRSEIADLNVRIQKLRSQILSVKSHCLKLEENIKTAEEQGELAFQDAKTKLAQLEAALQQAKQDMARQLRKYQELMNVKLALDIEIATYRKLVEGEEGRMDSPSATVVSAVQSRCKTAASRSGLSKAPSRKKKGSKGPVIKITEMSEKYFSQESEVSE

SEQ ID NO: 13 - protein, 422 aa, Homo sapiens
MACRSCVVGFSSLSSCEVTPVGSPRPGTSGWDSCRAPGPGFSSRSLTGCWSAGTISKVTVNPGLLVPLDVKLDPAVQQLKNQEKEEMKALNDKFASLIGKVQALEQRNQLLETRWSFLQGQDSAIFDLGHLYEEYQGRLQEELRKVSQERGQLEANLLQVLEKVEEFRIRYEDEISKRTDMEFTFVQLKKDLDAECLHRTELETKLKSLESFVELMKTIYEQELKDLAAQVKDVSVTVGMDSRCHIDLSGIVEEVKAQYDAVAARSLEEAEAYSRSQLEEQAARSAEYGSSLQSSRSEIADLNVRIQKLRSQILSVKSHCLKLEENIKTAEEQGELAFQDAKTKLAQLEAALQQAKQDMARQLRKYQELMNVKLALDIEIATYRKLVEGEEGRMDSPSATVVSAVQSRCKTAPSLPYPLCSL

SEQ ID NO: 14 - protein, 452 aa, Homo sapiens
MACRSCVVGFSSLSSCEVTPVGSPRPGTSGWDSCRAPGPGFSSRSLTGCWSAGTISKVTVNPGLLVPLDVKLDPAVQQLKNQEKEEMKALNDKFASLIGKVQALEQRNQLLETRWSFLQGQDSAIFDLGHLYEEYQGRLQEELRKVSQERGQLEANLLQVLEKVEEFRIRYEDEISKRTDMEFTFVQLKKDLDAECLHRTELETKLKSLESFVELMKTIYEQELKDLAAQVKDVSVTVGMDSRCHIDLSGIVEEVKAQYDAVAARSLEEAEAYSRSQLEEQAARSAEYGSSLQSSRSEIADLNVRIQKLRSQILSVKSHCLKLEENIKTAEEQGELAFQDAKTKLAQLEAALQQAKQDMARQLRKYQELMNVKLALDIEIATYRKLVEGEEGRMDSPSATVVSAVQSRCKTAASRSGLSKAPSRKKKGSKGPVIKITEMSEKYFSQESEVSE

SEQ ID NO: 15 - protein, 391 aa, Homo sapiens
MSVDAECVPMVRDLLRYFYSRRIDITLSSVKCFHKLASAYGARQLQGYCASLFAILLPQDPSFQMPLDLYAYAVATGDALLEKLCLQFLAWNFEALTQAEAWPSVPTDLLQLLLPRSDLAVPSELALLKAVDTWSWGERASHEEVEGLVEKIRFPMMLPEELFELQFNLSLYWSHEALFQKKTLQALEFHTVPFQLLARYKGLNLTEDTYKPRIYTSPTWSAFVTDSSWSARKSQLVYQSRRGPLVKYSSDYFQAPSDYRYYPYQSFQTPQHPSFLFQDKRVSWSLVYLPTIQSCWNYGFSCSSDELPVLGLTKSGGSDRTIAYENKALMLCEGLFVADVTDFEGWKAAIPSALDTNSSKSTSSFPCPAGHFNGFRTVIRPFYLTNSSGVD

SEQ ID NO: 16 - protein, 581 aa, Homo sapiens
MMTWRFPGAHLGSGVNDGDMRLADGGATNQGRVEIFYRGQWGTVCDNLWDLTDASVVCRALGFENATQALGRAAFGQGSGPIMLDEVQCTGTEASLADCKSLGWLKSNCRHERDAGVVCTNETRSTHTLDLSRELSEALGQIFDSQRGCDLSISVNVQGEDALGFCGHTVILTANLEAQALWKEPGSNVTMSVDAECVPMVRDLLRYFYSRRIDITLSSVKCFHKLASAYGARQLQGYCASLFAILLPQDPSFQMPLDLYAYAVATGDALLEKLCLQFLAWNFEALTQAEAWPSVPTDLLQLLLPRSDLAVPSELALLKAVDTWSWGERASHEEVEGLVEKIRFPMMLPEELFELQFNLSLYWSHEALFQKKTLQALEFHTVPFQLLARYKGLNLTEDTYKPRIYTSPTWSAFVTDSSWSARKSQLVYQSRRGPLVKYSSDYFQAPSDYRYYPYQSFQTPQHPSFLFQDKRVSWSLVYLPTIQSCWNYGFSCSSDELPVLGLTKSGGSDRTIAYENKALMLCEGLFVADVTDFEGWKAAIPSALDTNSSKSTSSFPCPAGHFNGFRTVIRPFYLTNSSGVD

SEQ ID NO: 17 - protein, 585 aa, Homo sapiens
MTPPRLFWVWLLVAGTQGVNDGDMRLADGGATNQGRVEIFYRGQWGTVCDNLWDLTDASVVCRALGFENATQALGRAAFGQGSGPIMLDEVQCTGTEASLADCKSLGWLKSNCRHERDAGVVCTNETRSTHTLDLSRELSEALGQIFDSQRGCDLSISVNVQGEDALGFCGHTVILTANLEAQALWKEPGSNVTMSVDAECVPMVRDLLRYFYSRRIDITLSSVKCFHKLASAYGARQLQGYCASLFAILLPQDPSFQMPLDLYAYAVATGDALLEKLCLQFLAWNFEALTQAEAWPSVPTDLLQLLLPRSDLAVPSELALLKAVDTWSWGERASHEEVEGLVEKIRFPMMLPEELFELQFNLSLYWSHEALFQKKTLQALEFHTVPFQLLARYKGLNLTEDTYKPRIYTSPTWSAFVTDSSWSARKSQLVYQSRRGPLVKYSSDYFQAPSDYRYYPYQSFQTPQHPSFLFQDKRVSWSLVYLPTIQSCWNYGFSCSSDELPVLGLTKSGGSDRTIAYENKALMLCEGLFVADVTDFEGWKAAIPSALDTNSSKSTSSFPCPAGHFNGFRTVIRPFYLTNSSGVD

SEQ ID NO: 18 - protein, 585 aa, Homo sapiens; identical to SEQ ID NO: 17

SEQ ID NO: 19 - protein, 241 aa, Homo sapiens
MAEEQPQVELFVKAGSDGAKIGNCPFSQRLFMVLWLKGVTFNVTTVDTKRRTETVQKLCPGGQLPFLLYGTEVHTDTNKIEEFLEAVLCPPRYPKLAALNPESNTAGLDIFAKFSAYIKNSNPALNDNLEKGLLKALKVLDNYLTSPLPEEVDETSAEDEGVSQRKFLDGNELTLADCNLLPKLHIVQVVCKKYRGFTIPEAFRGVHRYLSNAYAREEFASTCPDDEEIELAYEQVAKALK

SEQ ID NO: 20 - protein, 189 aa, Homo sapiens [sequence omitted]

SEQ ID NO: 21 - protein, 241 aa, Homo sapiens; identical to SEQ ID NO: 19

SEQ ID NO: 22 - protein, 240 aa, Homo sapiens
AEEQPQVELFVKAGSDGAKIGNCPFSQRLFMVLWLKGVTFNVTTVDTKRRTETVQKLCPGGQLPFLLYGTEVHTDTNKIEEFLEAVLCPPRYPKLAALNPESNTAGLDIFAKFSAYIKNSNPALNDNLEKGLLKALKVLDNYLTSPLPEEVDETSAEDEGVSQRKFLDGNELTLADCNLLPKLHIVQVVCKKYRGFTIPEAFRGVHRYLSNAYAREEFASTCPDDEEIELAYEQVAKALK

SEQ ID NO: 23 - protein, 241 aa, Homo sapiens; identical to SEQ ID NO: 19

SEQ ID NO: 24 - protein, 2511 aa, Homo sapiens [sequence omitted]

SEQ ID NO: 25 - protein, 2511 aa, Homo sapiens
MEEVVIAGMSGKLPESENLQEFWDNLIGGVDMVTDDDRRWKAGLYGLPRRSGKLKDLSRFDASFFGVHPKQAHTMDPQLRLLLEVTYEAIVDGGINPDSLRGTHTGVWVGVSGSETSEALSRDPETLVGYSMVGCQRAMMANRLSFFFDFRGPSIALDTACSSSLMALQNAYQAIHSGQCPAAIVGGINVLLKPNTSVQFLRLGMLSPEGTCKAFDTAGNGYCRSEGVVAVLLTKKSLARRVYATILNAGTNTDGFKEQGVTFPSGDIQEQLIRSLYQSAGVAPESFEYIEAHGTGTKVGDPQELNGITRALCATRQEPLLIGSTKSNMGHPEPASGLAALAKVLLSLEHGLWAPNLHFHSPNPEIPALLDGRLQVVDQPLPVRGGNVGINSFGFGGSNVHIILRPNTQPPPAPAPHATLPRLLRASGRTPEAVQKLLEQGLRHSQDLAFLSMLNDIAAVPATAMPFRGYAVLGGERGGPEVQQVPAGERPLWFICSGMGTQWRGMGLSLMRLDRFRDSILRSDEAVKPFGLKVSQLLLSTDESTFDDIVHSFVSLTAIQIGLIDLLSCMGLRPDGIVGHSLGEVACGYADGCLSQEEAVLAAYWRGQCIKEAHLPPGAMAAVGLSWEECKQRCPPGVVPACHNSKDTVTISGPQAPVFEFVEQLRKEGVFAKEVRTGGMAFHSYFMEAIAPPLLQELKKVIREPKPRSARWLSTSIPEAQWHSSLARTSSAEYNVNNLVSPVLFQEALWHVPEHAVVLEIAPHALLQAVLKRGLKPSCTIIPLMKKDHRDNLEFFLAGIGRLHLSGIDANPNALFPPVEFPAPRGTPLISPLIKWDHSLAWDVPAAEDFPNGSGSPSAAIYNIDTSSESPDHYLVDHTLDGRVLFPATGYLSIVWKTLARALGLGVEQLPVVFEDVVLHQATILPKTGTVSLEVRLLEASRAFEVSENGNLVVSGKVYQWDDPDPRLFDHPESPTPNPTEPLFLAQAEVYKELRLRGYDYGPHFQGILEASLEGDSGRLLWKDNWVSFMDTMLQMSILGSAKHGLYLPTRVTAIHIDPATHRQKLYTLQDKAQVADVVVSRWLRVTVAGGVHISGLHTESAPRRQQEQQVPILEKFCFTPHTEEGCLSERAALQEELQLCKGLVQALQTKVTQQGLKMVVPGLDGAQIPRDPSQQELPRLLSAACRLQLNGNLQLELAQVLAQERPKLPEDPLLSGLLDSPALKACLDTAVENMPSLKMKVVEVLAGHGHLYSRIPGLLSPHPLLQLSYTATDRHPQALEAAQAELQQHDVAQGQWDPADPAPSALGSADLLVCNCAVAALGDPASALSNMVAALREGGFLLLHTLLRGHPLGDIVAFLTSTEPQYGQGILSQDAWESLFSRVSLRLVGLKKSFYGSTLFLCRRPTPQDSPIFLPVDDTSFRWVESLKGILADEDSSRPVWLKAINCATSGVVGLVNCLRREPGGNRLRCVLLSNLSSTSHVPEVDPGSAELQKVLQGDLVMNVYRDGAWGAFRHFLLEEDKPEEPTAHAFVSTLTRGDLSSIRWVCSSLRHAQPTCPGAQLCTVYYASLNFRDIMLATGKLSPDAIPGKWTSQDSLLGMEFSGRDASGKRVMGLVPAKGLATSVLLSPDFLWDVPSNWTLEEAASVPVVYSTAYYALVVRGRVRPGETLLIHSGSGGVGQAAIAIALSLGCRVFTTVGSAEKRAYLQARFPQLDSTSFANSRDTSFEQHVLWHTGGKGVDLVLNSLAEEKLQASVRCLATHGRFLEIGKFDLSQNHPLGMAIFLKNVTFHGVLLDAFFNESSADWREVWALVQAGIRDGVVRPLKCTVFHGAQVEDAFRYMAQGKHIGKVVVQVLAEEPEAVLKGAKPKLMSAISKTFCPAHKSYIIAGGLGGFGLELAQWLIQRGVQKLVLTSRSGIRTGYQAKQVRRWRRQGVQVQVSTSNISSLEGARGLIAEAAQLGPVGGVFNLAVVLRDGLLENQTPEFFQDVCKPKYSGTLNLDRVTREACPELDYFVVFSSVSCGRGNAGQSNYGFANSAMERICEKRRHEGLPGLAVQWGAIGDVGILVETMSTNDTIVSGTLPQRMASCLEVLDLFLNQPHMVLSSFVLAEKAAAYRDRDSQRDLVEAVAHILGIRDLAAVNLDSSLADLGLDSLMSVEVRQTLERELNLVLSVREVRQLTLRKLQELSSKADEASELACPTPKEDGLAQQQTQLNLRSLLVNPEGPTLMRLNSVQSSERPLFLVHPIEGSTTVFHSLASRLSIPTYGLQCTRAAPLDSIHSLAAYYIDCIRQVQPEGPYRVAGYSYGACVAFEMCSQLQAQQSPAPTHNSLFLFDGSPTYVLAYTQSYRAKLTPGCEAEAETEAICFFVQQFTDMEHNRVLEALLPLKGLEERVAAAVDLIIKSHQGLDRQELSFAARSFYYKLRAAEQYTPKAKYHGNVMLLRAKTGGAYGEDLGADYNLSQVCDGKVSVHVIEGDHRTLLEGSGLESIISIIHSSLAEPRVSVREG

SEQ ID NO: 26 - protein, 2115 aa, Homo sapiens
MTLHATRGAALLSWVNSLHVADPVEAVLQLQDCSIFIKIIDRIHGTEEGQQILKQPVSERLDFVCSFLQKNRKHPSSPECLVSAQKVLEGSELELAKMTMLLLYHSTMSSKSPRDWEQFEYKIQAELAVILKFVLDHEDGLNLNEDLENFLQKAPVPSTCSSTFPEELSPPSHQAKREIRFLELQKVASSSSGNNFLSGSPASPMGDILQTPQFQMRRLKKQLADERSNRDELELELAENRKLLTEKDAQIAMMQQRIDRLALLNEKQAASPLEPKELEELRDKNESLTMRLHETLKQCQDLKTEKSQMDRKINQLSEENGDLSFKLREFASHLQQLQDALNELTEEHSKATQEWLEKQAQLEKELSAALQDKKCLEEKNEILQGKLSQLEEHLSQLQDNPPQEKGEVLGDVLQLETLKQEAATLAANNTQLQARVEMLETERGQQEAKLLAERGHFEEEKQQLSSLITDLQSSISNLSQAKEELEQASQAHGARLTAQVASLTSELTTLNATIQQQDQELAGLKQQAKEKQAQLAQTLQQQEQASQGLRHQVEQLSSSLKQKEQQLKEVAEKQEATRQDHAQQLATAAEEREASLRERDAALKQLEALEKEKAAKLEILQQQLQVANEARDSAQTSVTQAQREKAELSRKVEELQACVETARQEQHEAQAQVAELELQLRSEQQKATEKERVAQEKDQLQEQLQALKESLKVTKGSLEEEKRRAADALEEQQRCISELKAETRSLVEQHKRERKELEEERAGRKGLEARLQQLGEAHQAETEVLRRELAEAMAAQHTAESECEQLVKEVAAWRERYEDSQQEEAQYGAMFQEQLMTLKEECEKARQELQEAKEKVAGIESHSELQISRQQNELAELHANLARALQQVQEKEVRAQKLADDLSTLQEKMAATSKEVARLETLVRKAGEQQETASRELVKEPARAGDRQPEWLEEQQGRQFCSTQAALQAMEREAEQMGNELERLRAALMESQGQQQEERGQQEREVARLTQERGRAQADLALEKAARAELEMRLQNALNEQRVEFATLQEALAHALTEKEGKDQELAKLRGLEAAQIKELEELRQTVKQLKEQLAKKEKEHASGSGAQSEAAGRTEPTGPKLEALRAEVSKLEQQCQKQQEQADSLERSLEAERASRAERDSALETLQGQLEEKAQELGHSQSALASAQRELAAFRTKVQDHSKAEDEWKAQVARGRQEAERKNSLISSLEEEVSILNRQVLEKEGESKELKRLVMAESEKSQKLEERLRLLQAETASNSARAAERSSALREEVQSLREEAEKQRVASENLRQELTSQAERAEELGQELKAWQEKFFQKEQALSTLQLEHTSTQALVSELLPAKHLCQQLQAEQAAAEKRHREELEQSKQAAGGLRAELLRAQRELGELIPLRQKVAEQERTAQQLRAEKASYAEQLSMLKKAHGLLAEENRGLGERANLGRQFLEVELDQAREKYVQELAAVRADAETRLAEVQREAQSTARELEVMTAKYEGAKVKVLEERQRFQEERQKLTAQVEQLEVFQREQTKQVEELSKKLADSDQASKVQQQKLKAVQAQGGESQQEAQRLQAQLNELQAQLSQKEQAAEHYKLQMEKAKTHYDAKKQQNQELQEQLRSLEQLQKENKELRAEAERLGHELQQAGLKTKEAEQTCRHLTAQVRSLEAQVAHADQQLRDLGKFQVATDALKSREPQAKPQLDLSIDSLDLSCEEGTPLSITSKLPRTQPDGTSVPGEPASPISQRLPPKVESLESLYFTPIPARSQAPLESSLDSLGDVFLDSGRKTRSARRRTTQIINITMTKKLDVEEPDSANSSFYSTRSAPASQASLRATSSTQSLARLGSPDYGNSALLSLPGYRPTTRSSARRSQAGVSSGAPPGRNSFYMGTCQDEPEQLDDWNRIAELQQRNRVCPPHLKTCYPLESRPSLSLGTITDEEMKTGDPQETLRRASMQPIQIAEGTGITTRQQRKRVSLEPHQGPGTPESKKATSCFPRPMTPRDRHEGRKQSTTEAQKKAAPASTKQADRRQSMAFSILNTPKKLGNSLLRRGASKKALSKASPNTRSGTRRSPRIATTTASAATAAAIGATPRAKGKAKH

SEQ ID NO: 27 - protein, 2101 aa, Homo sapiens
MTLHATRGAALLSWVNSLHVADPVEAVLQLQDCSIFIKIIDRIHGTEEGQQILKQPVSERLDFVCSFLQKNRKHPSSPECLVSAQKVLEGSELELAKMTMLLLYHSTMSSKSPRDWEQFEYKIQAELAVILKFVLDHEDGLNLNEDLENFLQKAPVPSTCSSTFPEELSPPSHQAKREIRFLELQKVASSSSGNNFLSGSPASPMGDILQTPQFQMRRLKKQLADERSNRDELELELAENRKLLTEKDAQIAMMQQRIDRLALLNEKQAASPLEPKELEELRDKNESLTMRLHETLKQCQDLKTEKSQMDRKINQLSEENGDLSFKLREFASHLQQLQDALNELTEEHSKATQEWLEKQAQLEKELSAALQDKKCLEEKNEILQGKLSQLEEHLSQLQDNPPQEKGEVLGDVLQLETLKQEAATLAANNTQLQARVEMLETERGQQEAKLLAERGHFEEEKQQLSSLITDLQSSISNLSQAKEELEQASQAHGARLTAQVASLTSELTTLNATIQQQDQELAGLKQQAKEKQAQLAQTLQQQEQASQGLRHQVEQLSSSLKQKEQQLKEVAEKQEATRQDHAQQLATAAEEREASLRERDAALKQLEALEKEKAAKLEILQQQLQVANEARDSAQTSVTQAQREKAELSRKVEELQACVETARQEQHEAQAQVAELELQLRSEQQKATEKERVAQEKDQLQEQLQALKESLKVTKGSLEEEKRRAADALEEQQRCISELKAETRSLVEQHKRERKELEEERAGRKGLEARLQQLGEAHQAETEVLRRELAEAMAAQHTAESECEQLVKEVAAWRERYEDSQQEEAQYGAMFQEQLMTLKEECEKARQELQEAKEKVAGIESHSELQISRQQNELAELHANLARALQQVQEKEVRAQKLADDLSTLQEKMAATSKEVARLETLVRKAGEQQETASRELVKEPARAGDRQPEWLEEQQGRQFCSTQAALQAMEREAEQMGNELERLRAALMESQGQQQEERGQQEREVARLTQERGRAQADLALEKAARAELEMRLQNALNEQRVEFATLQEALAHALTEKEGKDQELAKLRGLEAAQIKELEELRQTVKQLKEQLAKKEKEHASGSGAQSEAAGRTEPTGPKLEALRAEVSKLEQQCQKQQEQADSLERSLEAERASRAERDSALETLQGQLEEKAQELGHSQSALASAQRELAAFRTKVQDHSKAEDEWKAQVARGRQEAERKNSLISSLEEEVSILNRQVLEKEGESKELKRLVMAESEKSQKLEERLRLLQAETASNSARAAERSSALREEVQSLREEAEKQRVASENLRQELTSQAERAEELGQELKAWQEKFFQKEQALSTLQLEHTSTQALVSELLPAKHLCQQLQAEQAAAEKRHREELEQSKQAAGGLRAELLRAQRELGELIPLRQKVAEQERTAQQLRAEKASYAEQLSMLKKAHGLLAEENRGLGERANLGRQFLEVELDQAREKYVQELAAVRADAETRLAEVQREAQSTARELEVMTAKYEGAKVKVLEERQRFQEERQKLTAQVEELSKKLADSDQASKVQQQKLKAVQAQGGESQQEAQRLQAQLNELQAQLSQKEQAAEHYKLQMEKAKTHYDAKKQQNQELQEQLRSLEQLQKENKELRAEAERLGHELQQAGLKTKEAEQTCRHLTAQVRSLEAQVAHADQQLRDLGKFQVATDALKSREPQAKPQLDLSIDSLDLSCEEGTPLSITSKLPRTQPDGTSVPGEPASPISQRLPPKVESLESLYFTPIPARSQAPLESSLDSLGDVFLDSGRKTRSARRRTTQIINITMTKKLDVEEPDSANSSFYSTRSAPASQASLRATSSTQSLARLGSPDYGNSALLSLPGYRPTTRSSARRSQAGVSSGAPPGRNSFYMGTCQDEPEQLDDWNRIAELQQRNRVCPPHLKTCYPLESRPSLSLGTITDEEMKTGDPQETLRRASMQPIQIAEGTGITTRQQRKRVSLEPHQGPGTPESKKATSCFPRPMTPRDRHEGRKQSTTEAQKKAAPASTKQADRRQSMAFSILNTPKKLGNSLLRRGASKKALSKASPNTRSGTRRSPRIATTTASAATAAAIGATPRAKGKAKH

SEQ ID NO: 28 - protein, 417 aa, Homo sapiens
MTLHATRGAALLSWVNSLHVADPVEAVLQLQDCSIFIKIIDRIHGTEEGQQILKQPVSERLDFVCSFLQKNRKHPSSPECLVSAQKVLEGSELELAKMTMLLLYHSTMSSKSPRDWEQFEYKIQAELAVILKFVLDHEDGLNLNEDLENFLQKAPVPSTCSSTFPEELSPPSHQAKREIRFLELQKVASSSSGNNFLSGSPASPMGDILQTPQFQMRRLKKQLADERSNRDELELELAENRKLLTEKDAQIAMMQQRIDRLALLNEKQAASPLEPKELEELRDKNESLTMRLHETLKQCQDLKTEKSQMDRKINQLSEENGDLSFKLREFASHLQQLQDALNELTEEHSKATQEWLEKQAQLEKELSAALQDKVTLCWGHSHSLDHMCKAESSLPLCSSGPLGIKLLSLQGSIVCCN

SEQ ID NO: 29 - protein, 988 aa, Homo sapiens
MTLHATRGAALLSWVNSLHVADPVEAVLQLQDCSIFIKIIDRIHGTEEGQQILKQPVSERLDFVCSFLQKNRKHPSSPECLVSAQKVLEGSELELAKMTMLLLYHSTMSSKSPRDWEQFEYKIQAELAVILKFVLDHEDGLNLNEDLENFLQKAPVPSTCSSTFPEELSPPSHQAKREIRFLELQKVASSSSGNNFLSGSPASPMGDILQTPQFQMRRLKKQLADERSNRDELELELAENRKLLTEKDAQIAMMQQRIDRLALLNEKQAASPLEPKELEELRDKNESLTMRLHETLKQCQDLKTEKSQMDRKINQLSEENGDLSFKLREFASHLQQLQDALNELTEEHSKATQEWLEKQAQLEKELSAALQDKKCLEEKNEILQGKLSQLEEHLSQLQDNPPQEKGEVLGDVLQVEELSKKLADSDQASKVQQQKLKAVQAQGGESQQEAQRLQAQLNELQAQLSQKEQAAEHYKLQMEKAKTHYDAKKQQNQELQEQLRSLEQLQKENKELRAEAERLGHELQQAGLKTKEAEQTCRHLTAQVRSLEAQVAHADQQLRDLGKFQVATDALKSREPQAKPQLDLSIDSLDLSCEEGTPLSITSKLPRTQPDGTSVPGEPASPISQRLPPKVESLESLYFTPIPARSQAPLESSLDSLGDVFLDSGRKTRSARRRTTQIINITMTKKLDVEEPDSANSSFYSTRSAPASQASLRATSSTQSLARLGSPDYGNSALLSLPGYRPTTRSSARRSQAGVSSGAPPGRNSFYMGTCQDEPEQLDDWNRIAELQQRNRVCPPHLKTCYPLESRPSLSLGTITDEEMKTGDPQETLRRASMQPIQIAEGTGITTRQQRKRVSLEPHQGPGTPESKKATSCFPRPMTPRDRHEGRKQSTTEAQKKAAPASTKQADRRQSMAFSILNTPKKLGNSLLRRGASKKALSKASPNTRSGTRRSPRIATTTASAATAAAIGATPRAKGKVEALAGWGRETR

SEQ ID NO: 30 - protein, 2128 aa, Homo sapiens [sequence omitted]

SEQ ID NO: 31 - protein, 2124 aa, Homo sapiens [sequence omitted]

SEQ ID NO: 32 - protein, 2101 aa, Homo sapiens; identical to SEQ ID NO: 27

SEQ ID NO: 33 - protein, 1536 aa, Homo sapiens [sequence omitted]

SEQ ID NO: 34 - protein, 2110 aa, Homo sapiens [sequence omitted]

SEQ ID NO: 35 - protein, 979 aa, Homo sapiens
MTLHATRGAALLSWVNSLHVADPVEAVLQLQDCSIFIKIIDRIHGTEEGQQILKQPVSERLDFVCSFLQKNRKHPSSPECLVSAQKVLEGSELELAKMTMLLLYHSTMSSKSPRDWEQFEYKIQAELAVILKFVLDHEDGLNLNEDLENFLQKAPVPSTCSSTFPEELSPPSHQAKREIRFLELQKVASSSSGNNFLSGSPASPMGDILQTPQFQMRRLKKQLADERSNRDELELELAENRKLLTEKDAQIAMMQQRIDRLALLNEKQAASPLEPKELEELRDKNESLTMRLHETLKQCQDLKTEKSQMDRKINQLSEENGDLSFKLREFASHLQQLQDALNELTEEHSKATQEWLEKQAQLEKELSAALQDKKCLEEKNEILQGKLSQLEEHLSQLQDNPPQEKGEVLGDVLQVEELSKKLADSDQASKVQQQKLKAVQAQGGESQQEAQRLQAQLNELQAQLSQKEQAAEHYKLQMEKAKTHYDAKKQQNQELQEQLRSLEQLQKENKELRAEAERLGHELQQAGLKTKEAEQTCRHLTAQVRSLEAQVAHADQQLRDLGKFQVATDALKSREPQAKPQLDLSIDSLDLSCEEGTPLSITSKLPRTQPDGTSVPGEPASPISQRLPPKVESLESLYFTPIPARSQAPLESSLDSLGDVFLDSGRKTRSARRRTTQIINITMTKKLDVEEPDSANSSFYSTRSAPASQASLRATSSTQSLARLGSPDYGNSALLSLPGYRPTTRSSARRSQAGVSSGAPPGRNSFYMGTCQDEPEQLDDWNRIAELQQRNRVCPPHLKTCYPLESRPSLSLGTITDEEMKTGDPQETLRRASMQPIQIAEGTGITTRQQRKRVSLEPHQGPGTPESKKATSCFPRPMTPRDRHEGRKQSTTEAQKKAAPASTKQADRRQSMAFSILNTPKKLGNSLLRRGASKKALSKASPNTRSGTRRSPRIATTTASAATAAAIGATPRAKGKAKH

SEQ ID NO: 36 - protein, 2115 aa, Homo sapiens
MTLHATRGAALLSWVNSLHVADPVEAVLQLQDCSIFIKIIDRIHGTEEGQQILKQPVSERLDFVCSFLQKNRKHPSSPECLVSAQKVLEGSELELAKMTMLLLYHSTMSSKSPRDWEQFEYKIQAELAVILKFVLDHEDGLNLNEDLENFLQKAPVPSTCSSTFPEELSPPSHQAKREIRFLELQKVASSSSGNNFLSGSPASPMGDILQTPQFQMRRLKKQLADERSNRDELELELAENRKLLTEKDAQIAMMQQRIDRLALLNEKQAASPLEPKELEELRDKNESLTMRLHETLKQCQDLKTEKSQMDRKINQLSEENGDLSFKLREFASHLQQLQDALNELTEEHSKATQEWLEKQAQLEKELSAALQDKKCLEEKNEILQGKLSQLEEHLSQLQDNPPQEKGEVLGDVLQLETLKQEAATLAANNTQLQARVEMLETERGQQEAKLLAERGHFEEEKQQLSSLITDLQSSISNLSQAKEELEQASQAHGARLTAQVASLTSELTTLNATIQQQDQELAGLKQQAKEKQAQLAQTLQQQEQASQGLRHQVEQLSSSLKQKEQQLKEVAEKQEATRQDHAQQLATAAEEREASLRERDAALKQLEALEKEKAAKLEILQQQLQVANEARDSAQTSVTQAQREKAELSRKVEELQACVETARQEQHEAQAQVAELELQLRSEQQKATEKERVAQEKDQLQEQLQALKESLKVTKGSLEEEKRRAADALEEQQRCISELKAETRSLVEQHKRERKELEEERAGRKGLEARLQQLGEAHQAETEVLRRELAEAMAAQHTAESECEQLVKEVAAWRERYEDSQQEEAQYGAMFQEQLMTLKEECEKARQELQEAKEKVAGIESHSELQISRQQNELAELHANLARALQQVQEKEVRAQKLADDLSTLQEKMAATSKEVARLETLVRKAGEQQETASRELVKEPARAGDRQPEWLEEQQGRQFCSTQAALQAMEREAEQMGNELERLRAALMESQGQQQEERGQQEREVARLTQERGRAQADLALEKAARAELEMRLQNALNEQRVEFATLQEALAHALTEKEGKDQELAKLRGLEAAQIKELEELRQTVKQLKEQLAKKEKEHASGSGAQSEAAGRTEPTGPKLEALRAEVSKLEQQCQKQQEQADSLERSLEAERASRAERDSALETLQGQLEEKAQELGHSQSALASAQRELAAFRTKVQDHSKAEDEWKAQVARGRQEAERKNSLISSLEEEVSILNRQVLEKEGESKELKRLVMAESEKSQKLEERLRLLQAETASNSARAAERSSALREEVQSLREEAEKQRVASENLRQELTSQAERAEELGQELKAWQEKFFQKEQALSTLQLEHTSTQALVSELLPAKHLCQQLQAEQAAAEKRHREELEQSKQAAGGLRAELLRAQRELGELIPLRQKVAEQERTAQQLRAEKASYAEQLSMLKKAHGLLAEENRGLGERANLGRQFLEVELDQAREKYVQELAAVRADAETRLAEVQREAQSTARELEVMTAKYEGAKVKVLEERQRFQEERQKLTAQVEQLEVFQREQTKQVEELSKKLADSDQASKVQQQKLKAVQAQGGESQQEAQRLQAQLNELQAQLSQKEQAAEHYKLQMEKAKTHYDAKKQQNQELQEQLRSLEQLQKENKELRAEAERLGHELQQAGLKTKEAEQTCRHLTAQVRSLEAQVAHADQQLRDLGKFQVATDALKSREPQAKPQLDLSIDSLDLSCEEGTPLSITSKLPRTQPDGTSVPGEPASPISQRLPPKVESLESLYFTPIPARSQAPLESSLDSLGDVFQDSGRKTRSARRRTTQIINITMTKKLDVEEPDSANSSFYSTRSAPASQASLRATSSTQSLARLGSPDYGNSALLSLPGYRPTTRSSARRSQAGVSSGAPPGRNSFYMGTCQDEPEQLDDWNRIAELQQRNRVCPPHLKTCYPLESRPSLSLGTITDEEMKTGDPQETLRRASMQPIQIAEGTGITTRQQRKRVSLEPHQGPGTPESKKATSCFPRPMTPRDRHEGRKQSTTEAQKKAAPASTKQADRRQSMAFSILNTPKKLGNSLLRRGASKKALSKASPNTRSGTRRSPRIATTTASAATAAAIGATPRAKGKAKH

SEQ ID NO: 37 - protein, 1536 aa, Homo sapiens [sequence omitted]

SEQ ID NO: 38 - protein, 788 aa, Homo sapiens
MGIELLCLFFLFLGRNDHVQGGCALGGAETCEDCLLIGPQCAWCAQENFTHPSGVGERCDTPANLLAKGCQLNFIENPVSQVEILKNKPLSVGRQKNSSDIVQIAPQSLILKLRPGGAQTLQVHVRQTEDYPVDLYYLMDLSASMDDDLNTIKELGSRLSKEMSKLTSNFRLGFGSFVEKPVSPFVKTTPEEIANPCSSIPYFCLPTFGFKHILPLTNDAERFNEIVKNQKISANIDTPEGGFDAIMQAAVCKEKIGWRNDSLHLLVFVSDADSHFGMDSKLAGIVIPNDGLCHLDSKNEYSMSTVLEYPTIGQLIDKLVQNNVLLIFAVTQEQVHLYENYAKLIPGATVGLLQKDSGNILQLIISAYEELRSEVELEVLGDTEGLNLSFTAICNNGTLFQHQKKCSHMKVGDTASFSVTVNIPHCERRSRHIIIKPVGLGDALELLVSPECNCDCQKEVEVNSSKCHHGNGSFQCGVCACHPGHMGPRCECGEDMLSTDSCKEAPDHPSCSGRGDCYCGQCICHLSPYGNIYGPYCQCDNFSCVRHKGLLCGGNGDCDCGECVCRSGWTGEYCNCTTSTDSCVSEDGVLCSGRGDCVCGKCVCTNPGASGPTCERCPTCGDPCNSKRSCIECHLSAAGQAREECVDKCKLAGATISEEEDFSKDGSVSCSLQGENECLITFLITTDNEGKTIIHSINEKDCPKPPNIPMIMLGVSLAILLIGVVLLCIWKLLVSFHDRKEVAKFEAERSKAKWQTGTNPLYRGSTSTFKNVTYKHREKQKVDLSTDC

SEQ ID NO: 39 - protein, 814 aa, Homo sapiens
MSVVGLDVGSQSCYIAVARAGGIETIANEFSDRCTPSVISFGSKNRTIGVAAKNQQITHANNTVSNFKRFHGRAFNDPFIQKEKENLSYDLVPLKNGGVGIKVMYMGEEHLFSVEQITAMLLTKLKETAENSLKKPVTDCVISVPSFFTDAERRSVLDAAQIVGLNCLRLMNDMTAVALNYGIYKQDLPSLDEKPRIVVFVDMGHSAFQVSACAFNKGKLKVLGTAFDPFLGGKNFDEKLVEHFCAEFKTKYKLDAKSKIRALLRLYQECEKLKKLMSSNSTDLPLNIECFMNDKDVSGKMNRSQFEELCAELLQKIEVPLYSLLEQTHLKVEDVSAVEIVGGATRIPAVKERIAKFFGKDISTTLNADEAVARGCALQCAILSPAFKVREFSVTDAVPFPISLIWNHDSEDTEGVHEVFSRNHAAPFSKVLTFLRRGPFELEAFYSDPQGVPYPEAKIGRFVVQNVSAQKDGEKSRVKVKVRVNTHGIFTISTASMVEKVPTEENEMSSEADMECLNQRPPENPDTDANEKKVDQPPEAKKPKIKVVNVELPIEANLVWQLGKDLLNMYIETEGKMIMQDKLEKERNDAKNAVEEYVYEFRDKLCGPYEKFICEQDHQNFLRLLTETEDWLYEEGEDQAKQAYVDKLEELMKIGTPVKVRFQEAEERPKMFEELGQRLQHYAKIAADFRNKDEKYNHIDESEMKKVEKSVNEVMEWMNNVMNAQAKKSLDQDPVVRAQEIKTKIKELNNTCEPVVTQPKPKIESPKLERTPNGPNIDKKEEDLEDKNNFGAEPPHQNGECYPNEKNSVNMDLD

SEQ ID NO: 40 - protein, 858 aa, Homo sapiens
MSVVGLDVGSQSCYIAVARAGGIETIANEFSDRCTPSVISFGSKNRTIGVAAKNQQITHANNTVSNFKRFHGRAFNDPFIQKEKENLSYDLVPLKNGGVGIKVMYMGEEHLFSVEQITAMLLTKLKETAENSLKKPVTDCVISVPSFFTDAERRSVLDAAQIVGLNCLRLMNDMTAVALNYGIYKQDLPSLDEKPRIVVFVDMGHSAFQVSACAFNKGKLKVLGTAFDPFLGGKNFDEKLVEHFCAEFKTKYKLDAKSKIRALLRLYQECEKLKKLMSSNSTDLPLNIECFMNDKDVSGKMNRSQFEELCAELLQKIEVPLYSLLEQTHLKVEDVSAVEIVGGATRIPAVKERIAKFFGKDISTTLNADEAVARGCALQCAILSPAFKVREFSVTDAVPFPISLIWNHDSEDTEGVHEVFSRNHAAPFSKVLTFLRRGPFELEAFYSDPQGVPYPEAKIGRFVVQNVSAQKDGEKSRVKVKVRVNTHGIFTISTASMVEKVPTEENEMSSEADMECLNQRPPENPDTDKNVQQDNSEAGTQPQVQTDAQQTSQSPPSPELTSEENKIPDADKANEKKVDQPPEAKKPKIKVVNVELPIEANLVWQLGKDLLNMYIETEGKMIMQDKLEKERNDAKNAVEEYVYEFRDKLCGPYEKFICEQDHQNFLRLLTETEDWLYEEGEDQAKQAYVDKLEELMKIGTPVKVRFQEAEERPKMFEELGQRLQHYAKIAADFRNKDEKYNHIDESEMKKVEKSVNEVMEWMNNVMNAQAKKSLDQDPVVRAQEIKTKIKELNNTCEPVVTQPKPKIESPKLERTPNGPNIDKKEEDLEDKNNFGAEPPHQNGECYPNEKNSVNMDLD

SEQ ID NO: 41 - protein, 814 aa, Homo sapiens; identical to SEQ ID NO: 39

SEQ ID NO: 42 - protein, 817 aa, Homo sapiens
MSVVGLDVGSQSCYIAVARAGGIETIANEFSDRCTPSVISFGSKNRTIGVAAKNQQITHANNTVSNFKRFHGRAFNDPFIQKEKENLSYDLVPLKNGGVGIKVPSFFTDAERRSVLDAAQIVGLNCLRLMNDMTAVALNYGIYKQDLPSLDEKPRIVVFVDMGHSAFQVSACAFNKGKLKVLGTAFDPFLGGKNFDEKLVEHFCAEFKTKYKLDAKSKIRALLRLYQECEKLKKLMSSNSTDLPLNIECFMNDKDVSGKMNRSQFEELCAELLQKIEVPLYSLLEQTHLKVEDVSAVEIVGGATRIPAVKERIAKFFGKDISTTLNADEAVARGCALQCAILSPAFKVREFSVTDAVPFPISLIWNHDSEDTEGVHEVFSRNHAAPFSKVLTFLRRGPFELEAFYSDPQGVPYPEAKIGRFVVQNVSAQKDGEKSRVKVKVRVNTHGIFTISTASMVEKVPTEENEMSSEADMECLNQRPPENPDTDKNVQQDNSEAGTQPQVQTDAQQTSQSPPSPELTSEENKIPDADKANEKKVDQPPEAKKPKIKVVNVELPIEANLVWQLGKDLLNMYIETEGKMIMQDKLEKERNDAKNAVEEYVYEFRDKLCGPYEKFICEQDHQNFLRLLTETEDWLYEEGEDQAKQAYVDKLEELMKIGTPVKVRFQEAEERPKMFEELGQRLQHYAKIAADFRNKDEKYNHIDESEMKKVEKSVNEVMEWMNNVMNAQAKKSLDQDPVVRAQEIKTKIKELNNTCEPVVTQPKPKIESPKLERTPNGPNIDKKEEDLEDKNNFGAEPPHQNGECYPNEKNSVNMDLD

SEQ ID NO: 43 - protein, 858 aa, Homo sapiens; identical to SEQ ID NO: 40

SEQ ID NO: 44 - protein, 858 aa, Homo sapiens; identical to SEQ ID NO: 40

SEQ ID NO: 45 - protein, 860 aa, Homo sapiens
MATAAVLRGPAAHWVESFQKAREEGSGSGTWRGRWRRRSVISFGSKNRTIGVAAKNQQITHANNTVSNFKRFHGRAFNDPFIQKEKENLSYDLVPLKNGGVGIKVMYMGEEHLFSVEQITAMLLTKLKETAENSLKKPVTDCVISVPSFFTDAERRSVLDAAQIVGLNCLRLMNDMTAVALNYGIYKQDLPSLDEKPRIVVFVDMGHSAFQVSACAFNKGKLKVLGTAFDPFLGGKNFDEKLVEHFCAEFKTKYKLDAKSKIRALLRLYQECEKLKKLMSSNSTDLPLNIECFMNDKDVSGKMNRSQFEELCAELLQKIEVPLYSLLEQTHLKVEDVSAVEIVGGATRIPAVKERIAKFFGKDISTTLNADEAVARGCALQCAILSPAFKVREFSVTDAVPFPISLIWNHDSEDTEGVHEVFSRNHAAPFSKVLTFLRRGPFELEAFYSDPQGVPYPEAKIGRFVVQNVSAQKDGEKSRVKVKVRVNTHGIFTISTASMVEKVPTEENEMSSEADMECLNQRPPENPDTDKNVQQDNSEAGTQPQVQTDAQQTSQSPPSPELTSEENKIPDADKANEKKVDQPPEAKKPKIKVVNVELPIEANLVWQLGKDLLNMYIETEGKMIMQDKLEKERNDAKNAVEEYVYEFRDKLCGPYEKFICEQDHQNFLRLLTETEDWLYEEGEDQAKQAYVDKLEELMKIGTPVKVRFQEAEERPKMFEELGQRLQHYAKIAADFRNKDEKYNHIDESEMKKVEKSVNEVMEWMNNVMNAQAKKSLDQDPVVRAQEIKTKIKELNNTCEPVVTQPKPKIESPKLERTPNGPNIDKKEEDLEDKNNFGAEPPHQNGECYPNEKNSVNMDLD

SEQ ID NO: 46 - protein, 723 aa, Homo sapiens
MFEEKASSPSGKMGGEEKPIGAGEEKQKEGGKKKNKEGSGDGGRAELNPWPEYIYTRLEMYNILKAEHDSILAEKAEKDSKPIKVTLPDGKQVDAESWKTTPYQIACGISQGLADNTVIAKVNNVVWDLDRPLEEDCTLELLKFEDEEAQAVYWHSSAHIMGEAMERVYGGCLCYGPPIENGFYYDMYLEEGGVSSNDFSSLEALCKKIIKEKQAFERLEVKKETLLAMFKYNKFKCRILNEKVNTPTTTVYRCGPLIDLCRGPHVRHTGKIKALKIHKNSSTYWEGKADMETLQRIYGISFPDPKMLKEWEKFQEEAKNRDHRKIGRDQELYFFHELSPGSCFFLPKGAYIYNALIEFIRSEYRKRGFQEVVTPNIFNSRLWMTSGHWQHYSENMFSFEVEKELFALKPMNCPGHCLMFDHRPRSWRELPLRLADFGVLHRNELSGALTGLTRVRRFQQDDAHIFCAMEQIEDEIKGCLDFLRTVYSVFGFSFKLNLSTRPEKFLGDIEVWDQAEKQLENSLNEFGEKWELNSGDGAFYGPKIDIQIKDAIGRYHQCATIQLDFQLPIRFNLTYVSHDGDDKKRPVIVHRAILGSVERMIAILTENYGGKWPFWLSPRQVMVVPVGPTCDEYAQKVRQQFHDAKFMADIDLDPGCTLNKKIRNAQLAQYNFILVVGEKEKISGTVNIRTRDNKVHGERTISETIERLQQLKEFRSKQAEEEF

SEQ ID NO: 47 - protein, 711 aa, Homo sapiens [sequence omitted]

SEQ ID NO: 48 - protein, 619 aa, Homo sapiens
MEVELSQGLADNTVIAKVNNVVWDLDRPLEEDCTLELLKFEDEEAQAVYWHSSAHIMGEAMERVYGGCLCYGPPIENGFYYDMYLEEGGVSSNDFSSLEALCKKIIKEKQAFERLEVKKETLLAMFKYNKFKCRILNEKVNTPTTTVYRCGPLIDLCRGPHVRHTGKIKALKIHKNSSTYWEGKADMETLQRIYGISFPDPKMLKEWEKFQEEAKNRDHRKIGRDQELYFFHELSPGSCFFLPKGAYIYNALIEFIRSEYRKRGFQEVVTPNIFNSRLWMTSGHWQHYSENMFSFEVEKELFALKPMNCPGHCLMFDHRPRSWRELPLRLADFGVLHRNELSGALTGLTRVRRFQQDDAHIFCAMEQIEDEIKGCLDFLRTVYSVFGFSFKLNLSTRPEKFLGDIEVWDQAEKQLENSLNEFGEKWELNSGDGAFYGPKIDIQIKDAIGRYHQCATIQLDFQLPIRFNLTYVSHDGDDKKRPVIVHRAILGSVERMIAILTENYGGKWPFWLSPRQVMVVPVGPTCDEYAQKVRQQFHDAKFMADIDLDPGCTLNKKIRNAQLAQYNFILVVGEKEKISGTVNIRTRDNKVHGERTISETIERLQQLKEFRSKQAEEEF

SEQ ID NO: 49 - protein, 4127 aa, Homo sapiens
MAGSGAGVRCSLLRLQETLSAADRCGAALAGHQLIRGLGQECVLSSSPAVLALQTSLVFSRDFGLLVFVRKSLNSIEFRECREEILKFLCIFLEKMGQKIAPYSVEIKNTCTSVYTKDRAAKCKIPALDLLIKLLQTFRSSRLMDEFKIGELFSKFYGELALKKKIPDTVLEKVYELLGLLGEVHPSEMINNAENLFRAFLGELKTQMTSAVREPKLPVLAGCLKGLSSLLCNFTKSMEEDPQTSREIFNFVLKAIRPQIDLKRYAVPSAGLRLFALHASQFSTCLLDNYVSLFEVLLKWCAHTNVELKKAALSALESFLKQVSNMVAKNAEMHKNKLQYFMEQFYGIIRNVDSNNKELSIAIRGYGLFAGPCKVINAKDVDFMYVELIQRCKQMFLTQTDTGDDRVYQMPSFLQSVASVLLYLDTVPEVYTPVLEHLVVMQIDSFPQYSPKMQLVCCRAIVKVFLALAAKGPVLRNCISTVVHQGLIRICSKPVVLPKGPESESEDHRASGEVRTGKWKVPTYKDYVDLFRHLLSSDQMMDSILADEAFFSVNSSSESLNHLLYDEFVKSVLKIVEKLDLTLEIQTVGEQENGDEAPGVWMIPTSDPAANLHPAKPKDFSAFINLVEFCREILPEKQAEFFEPWVYSFSYELILQSTRLPLISGFYKLLSITVRNAKKIKYFEGVSPKSLKHSPEDPEKYSCFALFVKFGKEVAVKMKQYKDELLASCLTFLLSLPHNIIELDVRAYVPALQMAFKLGLSYTPLAEVGLNALEEWSIYIDRHVMQPYYKDILPCLDGYLKTSALSDETKNNWEVSALSRAAQKGFNKVVLKHLKKTKNLSSNEAISLEEIRIRVVQMLGSLGGQINKNLLTVTSSDEMMKSYVAWDREKRLSFAVPFREMKPVIFLDVFLPRVTELALTASDRQTKVAACELLHSMVMFMLGKATQMPEGGQGAPPMYQLYKRTFPVLLRLACDVDQVTRQLYEPLVMQLIHWFTNNKKFESQDTVALLEAILDGIVDPVDSTLRDFCGRCIREFLKWSIKQITPQQQEKSPVNTKSLFKRLYSLALHPNAFKRLGASLAFNNIYREFREEESLVEQFVFEALVIYMESLALAHADEKSLGTIQQCCDAIDHLCRIIEKKHVSLNKAKKRRLPRGFPPSASLCLLDLVKWLLAHCGRPQTECRHKSIELFYKFVPLLPGNRSPNLWLKDVLKEEGVSFLINTFEGGGCGQPSGILAQPTLLYLRGPFSLQATLCWLDLLLAALECYNTFIGERTVGALQVLGTEAQSSLLKAVAFFLESIAMHDIIAAEKCFGTGAAGNRTSPQEGERYNYSKCTVVVRIMEFTTTLLNTSPEGWKLLKKDLCNTHLMRVLVQTLCEPASIGFNIGDVQVMAHLPDVCVNLMKALKMSPYKDILETHLREKITAQSIEELCAVNLYGPDAQVDRSRLAAVVSACKQLHRAGLLHNILPSQSTDLHHSVGTELLSLVYKGIAPGDERQCLPSLDLSCKQLASGLLELAFAFGGLCERLVSLLLNPAVLSTASLGSSQGSVIHFSHGEYFYSLFSETINTELLKNLDLAVLELMQSSVDNTKMVSAVLNGMLDQSFRERANQKHQGLKLATTILQHWKKCDSWWAKDSPLETKMAVLALLAKILQIDSSVSFNTSHGSFPEVFTTYISLLADTKLDLHLKGQAVTLLPFFTSLTGGSLEELRRVLEQLIVAHFPMQSREFPPGTPRFNNYVDCMKKFLDALELSQSPMLLELMTEVLCREQQHVMEELFQSSFRRIARRGSCVTQVGLLESVYEMFRKDDPRLSFTRQSFVDRSLLTLLWHCSLDALREFFSTIVVDAIDVLKSRFTKLNESTFDTQITKKMGYYKILDVMYSRLPKDDVHAKESKINQVFHGSCITEGNELTKTLIKLCYDAFTENMAGENQLLERRRLYHCAAYNCAISVICCVFNELKFYQGFLFSEKPEKNLLIFENLIDLKRRYNFPVEVEVPMERKKKYIEIRKEAREAANGDSDGPSYMSSLSYLADSTLSEEMSQFDFSTGVQSYSYSSQDPRPATGRFRRREQRDPTVHDDVLELEMDELNRHECMAPLTALVKHMHRSLGPPQGEEDSVPRDLPSWMKFLHGKLGNPIVPLNIRLFLAKLVINTEEVFRPYAKHWLSPLLQLAASENNGGEGIHYMVVEIVATILSWTGLATPTGVPKDEVLANRLLNFLMKHVFHPKRAVFRHNLEIIKTLVECWKDCLSIPYRLIFEKFSGKDPNSKDNSVGIQLLGIVMANDLPPYDPQCGIQSSEYFQALVNNMSFVRYKEVYAAAAEVLGLILRYVMERKNILEESLCELVAKQLKQHQNTMEDKFIVCLNKVTKSFPPLADRFMNAVFFLLPKFHGVLKTLCLEVVLCRVEGMTELYFQLKSKDFVQVMRHRDDERQKVCLDIIYKMMPKLKPVELRELLNPVVEFVSHPSTTCREQMYNILMWIHDNYRDPESETDNDSQEIFKLAKDVLIQGLIDENPGLQLIIRNFWSHETRLPSNTLDRLLALNSLYSPKIEVHFLSLATNFLLEMTSMSPDYPNPMFEHPLSECEFQEYTIDSDWRFRSTVLTPMFVETQASQGTLQTRTQEGSLSARWPVAGQIRATQQQHDFTLTQTADGRSSFDWLTGSSTDPLVDHTSPSSDSLLFAHKRSERLQRAPLKSVGPDFGKKRLGLPGDEVDNKVKGAAGRTDLLRLRRRFMRDQEKLSLMYARKGVAEQKREKEIKSELKMKQDAQVVLYRSYRHGDLPDIQIKHSSLITPLQAVAQRDPIIAKQLFSSLFSGILKEMDKFKTLSEKNNITQKLLQDFNRFLNTTFSFFPPFVSCIQDISCQHAALLSLDPAAVSAGCLASLQQPVGIRLLEEALLRLLPAELPAKRVRGKARLPPDVLRWVELAKLYRSIGEYDVLRGIFTSEIGTKQITQSALLAEARSDYSEAAKQYDEALNKQDWVDGEPTEAEKDFWELASLDCYNHLAEWKSLEYCSTASIDSENPPDLNKIWSEPFYQETYLPYMIRSKLKLLLQGEADQSLLTFIDKAMHGELQKAILELHYSQELSLLYLLQDDVDRAKYYIQNGIQSFMQNYSSIDVLLHQSRLTKLQSVQALTEIQEFISFISKQGNLSSQVPLKRLLNTWTNRYPDAKMDPMNIWDDIITNRCFFLSKIEEKLTPLPEDNSMNVDQDGDPSDRMEVQEQEEDISSLIRSCKFSMKMKMIDSARKQNNFSLAMKLLKELHKESKTRDDWLVSWVQSYCRLSHCRSRSQGCSEQVLTVLKTVSLLDENNVSSYLSKNILAFRDQNILLGTTYRIIANALSSEPACLAEIEEDKARRILELSGSSSEDSEKVIAGLYQRAFQHLSEAVQAAEEEAQPPSWSCGPAAGVIDAYMTLADFCDQQLRKEEENASVIDSAELQAYPALVVEKMLKALKLNSNEARLKFPRLLQIIERYPEETLSLMTKEISSVPCWQFISWISHMVALLDKDQAVAVQHSVEEITDNYPQAIVYPFIISSESYSFKDTSTGHKNKEFVARIKSKLDQGGVIQDFINALDQLSNPELLFKDWSNDVRAELAKTPVNKKNIEKMYERMYAALGDPKAPGLGAFRRKFIQTFGKEFDKHFGKGGSKLLRMKLSDFNDITNMLLLKMNKDSKPPGNLKECSPWMSDFKVEFLRNELEIPGQYDGRGKPLPEYHVRIAGFDERVVMASLRRPKRIIIRGHDEREHPFLVKGGEDLRQDQRVEQLFQVMNGILAQDSACSQRALQLRTYSVVPMTSRLGLIEWLENTVTLKDLLLNTMSQEEKAAYLSDPRAPPCEYKDWLTKMSGKHDVGAYMLMYKGANRTETVTSFRKRESKVPADLLKRAFVRMSTSPEAFLALRSHFASSHALICISHWILGIGDRHLNNFMVAMETGGVIGIDFGHAFGSATQFLPVPELMPFRLTRQFINLMLPMKETGLMYSIMVHALRAFRSDPGLLTNTMDVFVKEPSFDWKNFEQKMLKKGGSWIQEINVAEKNWYPRQKICYAKRKLAGANPAVITCDELLLGHEKAPAFRDYVAVARGSKDHNIRAQEPESGLSEETQVKCLMDQATDPNILGRTWEGWEPWM

SEQ ID NO: 50 - protein, 4097 aa, Homo sapiens
MAGSGAGVRCSLLRLQETLSAADRCGAALAGHQLIRGLGQECVLSSSPAVLALQTSLVFSRDFGLLVFVRKSLNSIEFRECREEILKFLCIFLEKMGQKIAPYSVEIKNTCTSVYTKDRAAKCKIPALDLLIKLLQTFRSSRLMDEFKIGELFSKFYGELALKKKIPDTVLEKVYELLGLLGEVHPSEMINNAENLFRAFLGELKTQMTSAVREPKLPVLAGCLKGLSSLLCNFTKSMEEDPQTSREIFNFVLKAIRPQIDLKRYAVPSAGLRLFALHASQFSTCLLDNYVSLFEVLLKWCAHTNVELKKAALSALESFLKQVSNMVAKNAEMHKNKLQYFMEQFYGIIRNVDSNNKELSIAIRGYGLFAGPCKVINAKDVDFMYVELIQRCKQMFLTQTDTGDDRVYQMPSFLQSVASVLLYLDTVPEVYTPVLEHLVVMQIDSFPQYSPKMQLVCCRAIVKVFLALAAKGPVLRNCISTVVHQGLIRICSKPVVLPKGPESESEDHRASGEVRTGKWKVPTYKDYVDLFRHLLSSDQMMDSILADEAFFSVNSSSESLNHLLYDEFVKSVLKIVEKLDLTLEIQTVGEQENGDEAPGVWMIPTSDPAANLHPAKPKDFSAFINLVEFCREILPEKQAEFFEPWVYSFSYELILQSTRLPLISGFYKLLSITVRNAKKIKYFEGVSPKSLKHSPEDPEKYSCFALFVKFGKEVAVKMKQYKDELLASCLTFLLSLPHNIIELDVRAYVPALQMAFKLGLSYTPLAEVGLNALEEWSIYIDRHVMQPYYKDILPCLDGYLKTSALSDETKNNWEVSALSRAAQKGFNKVVLKHLKKTKNLSSNEAISLEEIRIRVVQMLGSLGGQINKNLLTVTSSDEMMKSYVAWDREKRLSFAVPFREMKPVIFLDVFLPRVTELALTASDRQTKVAACELLHSMVMFMLGKATQMPEGGQGAPPMYQLYKRTFPVLLRLACDVDQVTRQLYEPLVMQLIHWFTNNKKFESQDTVALLEAILDGIVDPVDSTLRDFCGRCIREFLKWSIKQITPQQQEKSPVNTKSLFKRLYSLALHPNAFKRLGASLAFNNIYREFREEESLVEQFVFEALVIYMESLALAHADEKSLGTIQQCCDAIDHLCRIIEKKHVSLNKAKKRRLPRGFPPSASLCLLDLVKWLLAHCGRPQTECRHKSIELFYKFVPLLPGNRSPNLWLKDVLKEEGVSFLINTFEGGGCGQPSGILAQPTLLYLRGPFSLQATLCWLDLLLAALECYNTFIGERTVGALQVLGTEAQSSLLKAVAFFLESIAMHDIIAAEKCFGTGAAGNRTSPQEGERYNYSKCTVVVRIMEFTTTLLNTSPEGWKLLKKDLCNTHLMRVLVQTLCEPASIGFNIGDVQVMAHLPDVCVNLMKALKMSPYKDILETHLREKITAQSIEELCAVNLYGPDAQVDRSRLAAVVSACKQLHRAGLLHNILPSQSTDLHHSVGTELLSLVYKGIAPGDERQCLPSLDLSCKQLASGLLELAFAFGGLCERLVSLLLNPAVLSTASLGSSQGSVIHFSHGEYFYSLFSETINTELLKNLDLAVLELMQSSVDNTKMVSAVLNGMLDQSFRERANQKHQGLKLATTILQHWKKCDSWWAKDSPLETKMAVLALLAKILQIDSSVSFNTSHGSFPEVFTTYISLLADTKLDLHLKGQAVTLLPFFTSLTGGSLEELRRVLEQLIVAHFPMQSREFPPGTPRFNNYVDCMKKFLDALELSQSPMLLELMTEVLCREQQHVMEELFQSSFRRIARRGSCVTQVGLLESVYEMFRKDDPRLSFTRQSFVDRSLLTLLWHCSLDALREFFSTIVVDAIDVLKSRFTKLNESTFDTQITKKMGYYKILDVMYSRLPKDDVHAKESKINQVFHGSCITEGNELTKTLIKLCYDAFTENMAGENQLLERRRLYHCAAYNCAISVICCVFNELKFYQGFLFSEKPEKNLLIFENLIDLKRRYNFPVEVEVPMERKKKYIEIRKEAREAANGDSDGPSYMSSLSYLADSTLSEEMSQFDFSTGVQSYSYSSQDPRPATGRFRRREQRDPTVHDDVLELEMDELNRHECMAPLTALVKHMHRSLGPPQGEEDSVPRDLPSWMKFLHGKLGNPIVPLNIRLFLAKLVINTEEVFRPYAKHWLSPLLQLAASENNGGEGIHYMVVEIVATILSWTGLATPTGVPKDEVLANRLLNFLMKHVFHPKRAVFRHNLEIIKTLVECWKDCLSIPYRLIFEKFSGKDPNSKDNSVGIQLLGIVMANDLPPYDPQCGIQSSEYFQALVNNMSFVRYKEVYAAAAEVLGLILRYVMERKNILEESLCELVAKQLKQHQNTMEDKFIVCLNKVTKSFPPLADRFMNAVFFLLPKFHGVLKTLCLEVVLCRVEGMTELYFQLKSKDFVQVMRHRDDERQKVCLDIIYKMMPKLKPVELRELLNPVVEFVSHPSTTCREQMYNILMWIHDNYRDPESETDNDSQEIFKLAKDVLIQGLIDENPGLQLIIRNFWSHETRLPSNTLDRLLALNSLYSPKIEVHFLSLATNFLLEMTSMSPDYPNPMFEHPLSECEFQEYTIDSDWRFRSTVLTPMFVETQASQGTLQTRTQEGSLSARWPVAGQIRATQQQHDFTLTQTADGRSSFDWLTGSSTDPLVDHTSPSSDSLLFAHKRSERLQRAPLKSVGPDFGKKRLGLPGDEVDNKVKGAAGRTDLLRLRRRFMRDQEKLSLMYARKGVAEQKREKEIKSELKMKQDAQVVLYRSYRHGDLPDIQIKHSSLITPLQAVAQRDPIIAKQLFSSLFSGILKEMDKFKTLSEKNNITQKLLQDFNRFLNTTFSFFPPFVSCIQDISCQHAALLSLDPAAVSAGCLASLQQPVGIRLLEEALLRLLPAELPAKRVRGKARLPPDVLRWVELAKLYRSIGEYDVLRGIFTSEIGTKQITQSALLAEARSDYSEAAKQYDEALNKQDWVDGEPTEAEKDFWELASLDCYNHLAEWKSLEYCSTASIDSENPPDLNKIWSEPFYQETYLPYMIRSKLKLLLQGEADQSLLTFIDKAMHGELQKAILELHYSQELSLLYLLQDDVDRAKYYIQNGIQSFMQNYSSIDVLLHQSRLTKLQSVQALTEIQEFISFISKQGNLSSQVPLKRLLNTWTNRYPDAKMDPMNIWDDIITNRCFFLSKIEEKLTPLPEDNSMNVDQDGDPSDRMEVQEQEEDISSLIRSCKFSMKMKMIDSARKQNNFSLAMKLLKELHKESKTRDDWLVSWVQSYCRLSHCRSRSQGCSEQVLTVLKTVSLLDENNVSSYLSKNILAFRDQNILLGTTYRIIANALSSEPACLAEIEEDKARRILELSGSSSEDSEKVIAGLYQRAFQHLSEAVQAAEEEAQPPSWSCGPAAGVIDAYMTLADFCDQQLRKEEENASVIDSAELQAYPALVVEKMLKALKLNSNEARLKFPRLLQIIERYPEETLSLMTKEISSVPCWQFISWISHMVALLDKDQAVAVQHSVEEITDNYPQAIVYPFIISSESYSFKDTSTGHKNKEFVARIKSKLDQGGVIQDFINALDQLSNPELLFKDWSNDVRAELAKTPVNKKNIEKMYERMYAALGDPKAPGLGAFRRKFIQTFGKEFDKHFGKGGSKLLRMKLSDFNDITNMLLLKMNKDSKPPGNLKECSPWMSDFKVEFLRNELEIPGQYDGRGKPLPEYHVRIAGFDERVTVMASLRRPKRIIIRGHDEREHPFLVKGGEDLRQDQRVEQLFQVMNGILAQDSACSQRALQLRTYSVVPMTSSDPRAPPCEYKDWLTKMSGKHDVGAYMLMYKGANRTETVTSFRKRESKVPADLLKRAFVRMSTSPEAFLALRSHFASSHALICISHWILGIGDRHLNNFMVAMETGGVIGIDFGHAFGSATQFLPVPELMPFRLTRQFINLMLPMKETGLMYSIMVHALRAFRSDPGLLTNTMDVFVKEPSFDWKNFEQKMLKKGGSWIQEINVAEKNWYPRQKICYAKRKLAGANPAVITCDELLLGHEKAPAFRDYVAVARGSKDHNIRAQEPESGLSEETQVKCLMDQATDPNILGRTWEGWEPWM

SEQ ID NO: 51 - protein, 4033 aa, Homo sapiens
MGQKIAPYSVEIKNTCTSVYTKDRAAKCKIPALDLLIKLLQTFRSSRLMDEFKIGELFSKFYGELALKKKIPDTVLEKVYELLGLLGEVHPSEMINNAENLFRAFLGELKTQMTSAVREPKLPVLAGCLKGLSSLLCNFTKSMEEDPQTSREIFNFVLKAIRPQIDLKRYAVPSAGLRLFALHASQFSTCLLDNYVSLFEVLLKWCAHTNVELKKAALSALESFLKQVSNMVAKNAEMHKNKLQYFMEQFYGIIRNVDSNNKELSIAIRGYGLFAGPCKVINAKDVDFMYVELIQRCKQMFLTQTDTGDDRVYQMPSFLQSVASVLLYLDTVPEVYTPVLEHLVVMQIDSFPQYSPKMQLVCCRAIVKVFLALAAKGPVLRNCISTVVHQGLIRICSKPVVLPKGPESESEDHRASGEVRTGKWKVPTYKDYVDLFRHLLSSDQMMDSILADEAFFSVNSSSESLNHLLYDEFVKSVLKIVEKLDLTLEIQTVGEQENGDEAPGVWMIPTSDPAANLHPAKPKDFSAFINLVEFCREILPEKQAEFFEPWVYSFSYELILQSTRLPLISGFYKLLSITVRNAKKIKYFEGVSPKSLKHSPEDPEKYSCFALFVKFGKEVAVKMKQYKDELLASCLTFLLSLPHNIIELDVRAYVPALQMAFKLGLSYTPLAEVGLNALEEWSIYIDRHVMQPYYKDILPCLDGYLKTSALSDETKNNWEVSALSRAAQKGFNKVVLKHLKKTKNLSSNEAISLEEIRIRVVQMLGSLGGQINKNLLTVTSSDEMMKSYVAWDREKRLSFAVPFREMKPVIFLDVFLPRVTELALTASDRQTKVAACELLHSMVMFMLGKATQMPEGGQGAPPMYQLYKRTFPVLLRLACDVDQVTRQLYEPLVMQLIHWFTNNKKFESQDTVALLEAILDGIVDPVDSTLRDFCGRCIREFLKWSIKQITPQQQEKSPVNTKSLFKRLYSLALHPNAFKRLGASLAFNNIYREFREEESLVEQFVFEALVIYMESLALAHADEKSLGTIQQCCDAIDHLCRIIEKKHVSLNKAKKRRLPRGFPPSASLCLLDLVKWLLAHCGRPQTECRHKSIELFYKFVPLLPGNRSPNLWLKDVLKEEGVSFLINTFEGGGCGQPSGILAQPTLLYLRGPFSLQATLCWLDLLLAALECYNTFIGERTVGALQVLGTEAQSSLLKAVAFFLESIAMHDIIAAEKCFGTGAAGNRTSPQEGERYNYSKCTVVVRIMEFTTTLLNTSPEGWKLLKKDLCNTHLMRVLVQTLCEPASIGFNIGDVQVMAHLPDVCVNLMKALKMSPYKDILETHLREKITAQSIEELCAVNLYGPDAQVDRSRLAAVVSACKQLHRAGLLHNILPSQSTDLHHSVGTELLSLVYKGIAPGDERQCLPSLDLSCKQLASGLLELAFAFGGLCERLVSLLLNPAVLSTASLGSSQGSVIHFSHGEYFYSLFSETINTELLKNLDLAVLELMQSSVDNTKMVSAVLNGMLDQSFRERANQKHQGLKLATTILQHWKKCDSWWAKDSPLETKMAVLALLAKILQIDSSVSFNTSHGSFPEVFTTYISLLADTKLDLHLKGQAVTLLPFFTSLTGGSLEELRRVLEQLIVAHFPMQSREFPPGTPRFNNYVDCMKKFLDALELSQSPMLLELMTEVLCREQQHVMEELFQSSFRRIARRGSCVTQVGLLESVYEMFRKDDPRLSFTRQSFVDRSLLTLLWHCSLDALREFFSTIVVDAIDVLKSRFTKLNESTFDTQITKKMGYYKILDVMYSRLPKDDVHAKESKINQVFHGSCITEGNELTKTLIKLCYDAFTENMAGENQLLERRRLYHCAAYNCAISVICCVFNELKFYQGFLFSEKPEKNLLIFENLIDLKRRYNFPVEVEVPMERKKKYIEIRKEAREAANGDSDGPSYMSSLSYLADSTLSEEMSQFDFSTGVQSYSYSSQDPRPATGRFRRREQRDPTVHDDVLELEMDELNRHECMAPLTALVKHMHRSLGPPQGEEDSVPRDLPSWMKFLHGKLGNPIVPLNIRLFLAKLVINTEEVFRPYAKHWLSPLLQLAASENNGGEGIHYMVVEIVATILSWTGLATPTGVPKDEVLANRLLNFLMKHVFHPKRAVFRHNLEIIKTLVECWKDCLSIPYRLIFEKFSGKDPNSKDNSVGIQLLGIVMANDLPPYDPQCGIQSSEYFQALVNNMSFVRYKEVYAAAAEVLGLILRYVMERKNILEESLCELVAKQLKQHQNTMEDKFIVCLNKVTKSFPPLADRFMNAVFFLLPKFHGVLKTLCLEVVLCRVEGMTELYFQLKSKDFVQVMRHRDDERQKVCLDIIYKMMPKLKPVELRELLNPVVEFVSHPSTTCREQMYNILMWIHDNYRDPESETDNDSQEIFKLAKDVLIQGLIDENPGLQLIIRNFWSHETRLPSNTLDRLLALNSLYSPKIEVHFLSLATNFLLEMTSMSPDYPNPMFEHPLSECEFQEYTIDSDWRFRSTVLTPMFVETQASQGTLQTRTQEGSLSARWPVAGQIRATQQQHDFTLTQTADGRSSFDWLTGSSTDPLVDHTSPSSDSLLFAHKRSERLQRAPLKSVGPDFGKKRLGLPGDEVDNKVKGAAGRTDLLRLRRRFMRDQEKLSLMYARKGVAEQKREKEIKSELKMKQDAQVVLYRSYRHGDLPDIQIKHSSLITPLQAVAQRDPIIAKQLFSSLFSGILKEMDKFKTLSEKNNITQKLLQDFNRFLNTTFSFFPPFVSCIQDISCQHAALLSLDPAAVSAGCLASLQQPVGIRLLEEALLRLLPAELPAKRVRGKARLPPDVLRWVELAKLYRSIGEYDVLRGIFTSEIGTKQITQSALLAEARSDYSEAAKQYDEALNKQDWVDGEPTEAEKDFWELASLDCYNHLAEWKSLEYCSTASIDSENPPDLNKIWSEPFYQETYLPYMIRSKLKLLLQGEADQSLLTFIDKAMHGELQKAILELHYSQELSLLYLLQDDVDRAKYYIQNGIQSFMQNYSSIDVLLHQSRLTKLQSVQALTEIQEFISFISKQGNLSSQVPLKRLLNTWTNRYPDAKMDPMNIWDDIITNRCFFLSKIEEKLTPLPEDNSMNVDQDGDPSDRMEVQEQEEDISSLIRSCKFSMKMKMIDSARKQNNFSLAMKLLKELHKESKTRDDWLVSWVQSYCRLSHCRSRSQGCSEQVLTVLKTVSLLDENNVSSYLSKNILAFRDQNILLGTTYRIIANALSSEPACLAEIEEDKARRILELSGSSSEDSEKVIAGLYQRAFQHLSEAVQAAEEEAQPPSWSCGPAAGVIDAYMTLADFCDQQLRKEEENASVIDSAELQAYPALVVEKMLKALKLNSNEARLKFPRLLQIIERYPEETLSLMTKEISSVPCWQFISWISHMVALLDKDQAVAVQHSVEEITDNYPQAIVYPFIISSESYSFKDTSTGHKNKEFVARIKSKLDQGGVIQDFINALDQLSNPELLFKDWSNDVRAELAKTPVNKKNIEKMYERMYAALGDPKAPGLGAFRRKFIQTFGKEFDKHFGKGGSKLLRMKLSDFNDITNMLLLKMNKDSKPPGNLKECSPWMSDFKVEFLRNELEIPGQYDGRGKPLPEYHVRIAGFDERVTVMASLRRPKRIIIRGHDEREHPFLVKGGEDLRQDQRVEQLFQVMNGILAQDSACSQRALQLRTYSVVPMTSRLGLIEWLENTVTLKDLLLNTMSQEEKAAYLSDPRAPPCEYKDWLTKMSGKHDVGAYMLMYKGANRTETVTSFRKRESKVPADLLKRAFVRMSTSPEAFLALRSHFASSHALICISHWILGIGDRHLNNFMVAMETGGVIGIDFGHAFGSATQFLPVPELMPFRLTRQFINLMLPMKETGLMYSIMVHALRAFRSDPGLLTNTMDVFVKEPSFDWKNFEQKMLKKGGSWIQEINVAEKNWYPRQKICYAKRKLAGANPAVITCDELLLGHEKAPAFRDYVAVARGSKDHNIRAQEPESGLSEETQVKCLMDQATDPNILGRTWEGWEPWM

SEQ ID NO: 52 - protein, 4192 aa, Homo sapiens
GMAGSGAGVRCSLLRLQETLSAADRCGAALAGHQLIRGLGQECVLSSSPAVLALQTSLVFSRDFGLLVFVRKSLNSIEFRECREEILKFLCIFLEKMGQKIAPYSVEIKNTCTSVYTKDRAAKCKIPALDLLIKLLQTFRSSRLMDEFKIGELFSKFYGELALKKKIPDTVLEKVYELLGLLGEVHPSEMINNAENLFRAFLGELKTQMTSAVREPKLPVLAGCLKGLSSLLCNFTKSMEEDPQTSREIFNFVLKAIRPQIDLKRYAVPSAGLRLFALHASQFSTCLLDNYVSLFEVLLKWCAHTNVELKKAALSALESFLKQVSNMVAKNAEMHKNKLQYFMEQFYGIIRNVDSNNKELSIAIRGYGLFAGPCKVINAKDVDFMYVELIQRCKQMFLTQTDTGDYRVYQMPSFLQSVASVLLYLDTVPEVYTPVLEHLVVMQIDSFPQYSPKMQLVCCRAIVKVFLALAAKGPVLRNCISTVVHQGLIRICSKPVVLPKGPESESEDHRASGEVRTGKWKVPTYKDYVDLFRHLLSSDQMMDSILADEAFFSVNSSSESLNHLLYDEFVKSVLKIVEKLDLTLEIQTVGEQENGDEAPGVWMIPTSDPAANLHPAKPKDFSAFINLVEFCREILPEKQAEFFEPWVYSFSYELILQSTRLPLISGFYKLLSITVRNAKKIKYFEGVSPKSLKHSPEDPEKYSCFALFVKFGKEVAVKMKQYKDELLASCLTFLLSLPHNIIELDVRAYVPALQMAFKLGLSYTPLAEVGLNALEEWSIYIDRHVMQPYYKDILPCLDGYLKTSALSDETKNNWEVSALSRAAQKGFNKVVLKHLKKTKNLSSNEAISLEEIRIRVVQMLGSLGGQINKNLLTVTSSDEMMKSYVAWDREKRLSFAVPFREMKPVIFLDVFLPRVTELALTASDRQTKVAACELLHSMVMFMLGKATQMPEGGQGAPPMYQLYKRTFPVLLRLACDVDQVTRQLYEPLVMQLIHWFTNNKKFESQDTVSLLEAILDGIVDPVDSTLRDFCGRCIREFLKWSIKQITPQQQEKSPVNTKSLFKRLYSLALHPNAFKRLGASLAFNNIYREFREEESLVEQFVFEALVIYMESLALAHADEKSLGTIQQCCDAIDHLCRIIEKKHVSLNKAKKRRLPRGFPPSASLCLLDLVKWLLAHCGRPQTECRHKSIELFYKFVPLLPGNRSPNLWLKDVLKEEGVSFLINTFEGGGCGQPSGILAQPTLLYLRGPFSLQATLCWLDLLLAALECYNTFIGERTVGALQVLGTEAQSSLLKAVAFFLESIAMHDIIAAEKCFGTGAAGNRTSPQEGERYNYSKCTVVVRIMEFTTTLLNTSPEGWKLLKKDLCNTHLMRVLVQTLCEPASIGFNIGDVQVMAHLPDVCVNLMKALKMSPYKDILETHLREKITAQSIEELCAVNLYGPDAQVDRSRLAAVVSACKQLHRAGLLHNILPSQSTDLHHSVGTELLSLVYKGIAPGDERQCLPSLDLSCKQLASGLLELAFAFGGLCERLVSLLLNPAVLSTASLGSSQGSVIHFSHGEYFYSLFSETINTELLKNLDLAVLELMQSSVDNTKMVSAVLNGMLDQSFRERANQKHQGLKLATTILQHWKKCDSWWAKDSPLETKMAVLALLAKILQIDSSVSFNTSHGSFPEVFTTYISLLADTKLDLHLKGQAVTLLPFFTSLTGGSLEELRRVLEQLIVAHFPMQSREFPPGTPRFNNYVDCMKKFLDALELSQSPMLLELMTEVLCREQQHVMEELFQSSFRRIARRGSCVTQVGLLESVYEMFRKDDPRLSFTRQSFVDRSLLTLLWHCSLDALREFFSTIVVDAIDVLKSRFTKLNESTFDTQITKKMGYYKILDVMYSRLPKDDVHAKESKINQVFHGSCITEGNELTKTLIKLCYDAFTENMAGENQLLERRRLYHCAAYNCAISVICCVFNELKFYQGFLFSEKPEKNLLIFENLIDLKRRYNFPVEVEVPMERKKKYIEIRKEAREAANGDSDGPSYMSSLSYLADSTLSEEMSQFDFSTGVQSYSYSSQDPRPATGRFRRREQRDPTVHDDVLELEMDELNRHECMAPLTALVKHMHRSLGPPQGEEDSVPRDLPSWMKFLHGKLGNPIVPLNIRLFLAKLVINTEEVFRPYAKHWLSPLLQLAASENNGGEGIHYMVVEIVATILSWTGLATPTGVPKDEVLANRLLNFLMKHVFHPKRAVFRHNLEIIKTLVECWKDCLSIPYRLIFEKFSGKDPNSKDNSVGIQLLGIVMANDLPPYDPQCGIQSSEYFQALVNNMSFVRYKEVYAAAAEVLGLILRYVMERKNILEESLCELVAKQLKQHQNTMEDKFIVCLNKVTKSFPPLADRFMNAVFFLLPKFHGVLKTLCLEVVLCRVEGMTELYFQLKSKDFVQVMRHRDERQKVCLDIIYKMMPKLKPVELRELLNPVVEFVSHPSTTCREQMYNILMWIHDNYRDPESETDNDSQEIFKLAKDVLIQGLIDENPGLQLIIRNFWSHETRLPSNTLDRLLALNSLYSPKIEVHFLSLATNFLLEMTSMSPDYPNPMFEHPLSECEFQEYTIDSDWRFRSTVLTPMFVETQASQGTLQTRTQEGSLSARWPVAGQIRATQQQHDFTLTQTADGRSSFDWLTGSSTDPLVDHTSPSSDSLLFAHKRSERLQRAPLKSVGPDFGKKRLGLPGDEVDNKVKGAAGRTDLLRLRRRFMRDQEKLSLMYARKGVAEQKREKEIKSELKMKQDAQVVLYRSYRHGDLPDIQIKHSSLITPLQAVAQRDPIIAKQLFSSLFSGILKEMDKFKTLSEKNNITQKLLQDFNRFLNTTFSFFPPFVSCIQDISCQHAALLSLDPAAVSAGCLASLQQPVGIRLLEEALLRLLPAELPAKRVRGKARLPPDVLRWVELAKLYRSIGEYDVLRGIFTSEIGTKQITQSALLAEARSDYSEAAKQYDEALNKQDWVDGEPTEAEKDFWELASLDCYNHLAEWKSLEYCSTASIDSENPPDLNKIWSEPFYQETYLPYMIRSKLKLLLQGEADQSLLTFIDKAMHGELQKAILELHYSQELSLLYLLQDDVDRAKYYIQNGIQSFMQNYSSIDVLLHQSRLTKLQSVQALTEIQEFISFISKQGNLSSQVPLKRLLNTWTNRYPDAKMDPMNIWDDIITNRCFFLSKIEEKLTPLPEDNSMNVDQDGDPSDRMEVQEQEEDISSLIRSCKFSMKMKMIDSARKQNNFSLAMKLLKELHKESKTRDDWLVSWVQSYCRLSHCRSRSQGCSEQVLTVLKTVSLLDENNVSSYLNKNILAFRDQNILLGTTYRIIANALSSEPACLAEIEEDKARRILELSGSSSEDSEKVIAGLYQRAFQHLSEAVQAAEEEAQPPSWSCGPAAGVIDAYMTLADFCDQQLRKEEENASVTDSAELQAYPALVVEKMLKALKLNSNEARLKFPRLLQIIERYPEETLSLMTKEISSVPCWQFISWISHMVALLDKDQAVAVQHSVEEITDNYPQAIVYPFIISSESYSFKDTSTGHKNKEFVARIKSKLDQGGVIQDFINALDQLSNPELLFKDWSNDVRAELAKTPVNKKNIEKMYERMYAALGDPKAPGLGAFRRKFIQTFGKEFDKHFGKGGSKLLRMKLSDFNDITNMLLLKMNKDSKPPGNLKECSPWMSDFKVEFLRNELEIPGQYDGRGKPLPEYHVRIAGFDERVTVMASLRRPKRIIIRGHDEREHPFLVKGGEDLRQDQRVEQLFQVMNGILAQDSACSQRALQLRTYSVVPMTSSDPRAPPCEYKDWLTKMSGKHDVGAYMLMYKGANRTETVTSFRKRESKVPADLLKRAFVRMSTSPEAFLALRSHFASSHALICISHWILGIGDRHLNNFMVAMETGGVIGIDFGHAFGSATQFLPVPELMPFRLTRQFINLMLPMKETGLMYSIMVHALRAFRSDPGLLTNTMDVFVKEPSFDWKNFEQKMLKKGGSWIQEINVAEKNWYPRQKICYAKRKLAGANPAVITCDELLLGHEKAPAFRDYVAVARGSKDHNIRAQEPESGLSEETQVKCLMDQATDPNILGRTWEGWEPWMGLWESADRKHYIVRIYYTWLAAFHELIFLKHREMSFVLQFRSMSLNQDYDEMCMGIKDKVIVTSKIRGLKDRYPGLPKYVKNIICDQLSKHLQVL

SEQ ID NO: 53 - protein, 4128 aa, Homo sapiens [sequence omitted]

SEQ ID NO: 54 - protein, 4128 aa, Homo sapiens [sequence omitted]

SEQ ID NO: 55 - protein, 573 aa, Homo sapiens
MLRLPTVFRQMRPVSRVLAPHLTRAYAKDVKFGADARALMLQGVDLLADAVAVTMGPKGRTVIIEQSWGSPKVTKDGVTVAKSIDLKDKYKNIGAKLVQDVANNTNEEAGDGTTTATVLARSIAKEGFEKISKGANPVEIRRGVMLAVDAVIAELKKQSKPVTTPEEIAQVATISANGDKEIGNIISDAMKKVGRKGVITVKDGKTLNDELEIIEGMKFDRGYISPYFINTSKGQKCEFQDAYVLLSEKKISSIQSIVPALEIANAHRKPLVIIAEDVDGEALSTLVLNRLKVGLQVVAVKAPGFGDNRKNQLKDMAIATGGAVFGEEGLTLNLEDVQPHDLGKVGEVIVTKDDAMLLKGKGDKAQIEKRIQEIIEQLDVTTSEYEKEKLNERLAKLSDGVAVLKVGGTSDVEVNEKKDRVTDALNATRAAVEEGIVLGGGCALLRCIPALDSLTPANEDQKIGIEIIKRTLKIPAMTIAKNAGVEGSLIVEKIMQSSSEVGYDAMAGDFVNMVEKGIIDPTKVVRTALLDAAGVASLLTTAEVVVTEIPKEEKDPGMGAMGGMGGGMGGGMF

SEQ ID NO: 56 - protein, 573 aa, Homo sapiens; identical to SEQ ID NO: 55

SEQ ID NO: 57 - protein, 573 aa, Homo sapiens; identical to SEQ ID NO: 55

SEQ ID NO: 58 - protein, 573 aa, Homo sapiens; identical to SEQ ID NO: 55

SEQ ID NO: 59 - protein, 384 aa, Homo sapiens
MKKVGRKGVITVKDGKTLNDELEIIEGMKFDRGYISPYFINTSKGQKCEFQDAYVLLSEKKISSIQSIVPALEIANAHRKPLVIIAEDVDGEALSTLVLNRLKVGLQVVAVKAPGFGDNRKNQLKDMAIATGGAVFGEEGLTLNLEDVQPHDLGKVGEVIVTKDDAMLLKGKGDKAQIEKRIQEIIEQLDVTTSEYEKEKLNERLAKLSDGVAVLKVGGTSDVEVNEKKDRVTDALNATRAAVEEGIVLGGGCALLRCIPALDSLTPANEDQKIGIEIIKRTLKIPAMTIAKNAGVEGSLIVEKIMQSSSEVGYDAMAGDFVNMVEKGIIDPTKVVRTALLDAAGVASLLTTAEVVVTEIPKEEKDPGMGAMGGMGGGMGGGMF

SEQ ID NO: 60 - protein, 573 aa, Homo sapiens; identical to SEQ ID NO: 55

SEQ ID NO: 61 - protein, 575 aa, Homo sapiens [sequence omitted]

SEQ ID NO: 62 - protein, 592 aa, Homo sapiens
MEGKWLLCMLLVLGTAIVEAHDGHDDDVIDIEDDLDDVIEEVEDSKPDTTAPPSSPKVTYKAPVPTGEVYFADSFDRGTLSGWILSKAKKDDTDDEIAKYDGKWEVEEMKESKLPGDKGLVLMSRAKHHAISAKLNKPFLFDTKPLIVQYEVNFQNGIECGGAYVKLLSKTPELNLDQFHDKTPYTIMFGPDKCGEDYKLHFIFRHKNPKTGIYEEKHAKRPDADLKTYFTDKKTHLYTLILNPDNSFEILVDQSVVNSGNLLNDMTPPVNPSREIEDPEDRKPEDWDERPKIPDPEAVKPDDWDEDAPAKIPDEEATKPEGWLDDEPEYVPDPDAEKPEDWDEDMDGEWEAPQIANPRCESAPGCGVWQRPVIDNPNYKGKWKPPMIDNPSYQGIWKPRKIPNPDFFEDLEPFRMTPFSAIGLELWSMTSDIFFDNFIICADRRIVDDWANDGWGLKKAADGAAEPGVVGQMIEAAEERPWLWVVYILTVALPVFLVILFCCSGKKQTSGMEYKKTDAPQPDVKEEEEEKEEEKDKGDEEEEGEEKLEEKQKSDAEEDGGTVSQEEEDRKPKAEEDEILNRSPRNRKPRRE

SEQ ID NO: 63 - protein, 592 aa, Homo sapiens; identical to SEQ ID NO: 62

SEQ ID NO: 64 - protein, 592 aa, Homo sapiens; identical to SEQ ID NO: 62

SEQ ID NO: 65 - protein, 592 aa, Homo sapiens; identical to SEQ ID NO: 62

SEQ ID NO: 66 - protein, 464 aa, Homo sapiens
MGHLSAPLHRVRVPWQGLLLTASLLTFWNPPTTAQLTTESMPFNVAEGKEVLLLVHNLPQQLFGYSWYKGERVDGNRQIVGYAIGTQQATPGPANSGRETIYPNASLLIQNVTQNDTGFYTLQVIKSDLVNEEATGQFHVYPELPKPSISSNNSNPVEDKDAVAFTCEPETQDTTYLWWINNQSLPVSPRLQLSNGNRTLTLLSVTRNDTGPYECEIQNPVSANRSDPVTLNVTYGPDTPTISPSDTYYRPGANLSLSCYAASNPPAQYSWLINGTFQQSTQELFIPNITVNNSGSYTCHANNSVTGCNRTTVKTIIVTELSPVVAKPQIKASKTTVTGDKDSVNLTCSTNDTGISIRWFFKNQSLPSSERMKLSQGNTTLSINPVKREDAGTYWCEVFNPISKNQSDPIMLNVNYNALPQENGLSPGAIAGIVIGVVALVALIAVALACFLHFGKTGSSGPLQ

SEQ ID NO: 67 - protein, 401 aa, Homo sapiens
MMGLGNGRRSMKSPPLVLAALVACIIVLGFNYWIASSRSVDLQTRIMELEGRVRRAAAERGAVELKKNEFQGELEKQREQLDKIQSSHNFQLESVNKLYQDEKAVLVNNITTGERLIRVLQDQLKTLQRNYGRLQQDVLQFQKNQTNLERKFSYDLSQCINQMKEVKEQCEERIEEVTKKGNEAVASRDLSENNDQRQQLQALSEPQPRLQAAGLPHTEVPQGKGNVLGNSKSQTPAPSSEVVLDSKRQVEKEETNEIQVVNEEPQRDRLPQEPGREQVVEDRPVGGRGFGGAGELGQTPQVQAALSVSQENPEMEGPERDQLVIPDGQEEEQEAAGEGRNQQKLRGEDDYNMDENEAESETDKQAALAGNDRNIDVFNVEDQKRDTINLLDQREKRNHTL

SEQ ID NO: 68 - protein, 401 aa, Homo sapiens; identical to SEQ ID NO: 67

SEQ ID NO: 69 - protein, 401 aa, Homo sapiens; identical to SEQ ID NO: 67

SEQ ID NO: 70 - protein, 290 aa, Homo sapiens
NRRLASVPHTPRPRTCLAAAWCSPPQPPHPWVSVALQFLRVTKQYLPHVARLCLISTFLEDGIRMWFQWSEQRDYIDTTWNCGYLLASSFVFLNLLGQLTGCVLVLSRNFVQYACFGLFGIIALQTIAYSILWDLKFLMRNLALGGGLLLLLAESRSEGKSMFAGVPTMRESSPKQYMQLGGRVLLVLMFMTLLHFDASFFSIVQNIVGTALMILVAIGFKTKLAALTLVVWLFAINVYFNAFWTIPVYKPMHDFLKYDFFQTMSVIGGLLLVVALGPGGVSMDEKKKEW

SEQ ID NO: 71 - protein, 128 aa, Homo sapiens
MGQNDLMGTAEDFADQFLRVTKQYLPHVARLCLISTFLEDGIRMWFQWSEQRDYIDTTWNCGYLLASSFVFLNLLGQLTGCVLVLSRNFVQYACFGLFGIIALQTIAYSILWDLKFLMRLSRTSWAQL

SEQ ID NO: 72 - protein, 269 aa, Homo sapiens
MGQNDLMGTAEDFADQFLRVTKQYLPHVARLCLISTFLEDGIRMWFQWSEQRDYIDTTWNCGYLLASSFVFLNLLGQLTGCVLVLSRNFVQYACFGLFGIIALQTIAYSILWDLKFLMRNLALGGGLLLLLAESRSEGKSMFAGVPTMRESSPKQYMQLGGRVLLVLMFMTLLHFDASFFSIVQNIVGTALMILVAIGFKTKLAALTLVVWLFAINVYFNAFWTIPVYKPMHDFLKYDFFQTMSVIGGLLLVVALGPGGVSMDEKKKEW

SEQ ID NO: 73 - protein, 269 aa, Homo sapiens; identical to SEQ ID NO: 72

SEQ ID NO: 74 - protein, 353 aa, Homo sapiens
GLAYVAAAGAAADAERGRPPGTSCGGRSGCGRRRARASERASEPSRASRRRHGPERPDGHGRGLRRPASVPHTPRPRTCLAAAWCSPPQPPHPWVSVALQFLRVTKQYLPHVARLCLISTFLEDGIRMWFQWSEQRDYIDTTWNCGYLLASSFVFLNLLGQLTGCVLVLSRNFVQYACFGLFGIIALQTIAYSILWDLKFLMRNLALGGGLLLLLAESRSEGKSMFAGVPTMRESSPKQYMQLGGRVLLVLMFMTLLHFDASFFSIVQNIVGTALMILVAIGFKTKLAALTLVVWLFAINVYFNAFWTIPVYKPMHDFLKYDFFQTMSVIGGLLLVVALGPGGVSMDEKKKEW

SEQ ID NO: 75 - protein, 379 aa, Homo sapiens
MHPPKTPSGALHRKRKMAAWPFSRLWKVSDPILFQMTLIAALLPAVLGNCGPPPTLSFAAPMDITLTETRFKTGTTLKYTCLPGYVRSHSTQTLTCNSDGEWVYNTFCIYKRCRHPGELRNGQVEIKTDLSFGSQIEFSCSEGFFLIGSTTSRCEVQDRGVGWSHPLPQCEIVKCKPPPDIRNGRHSGEENFYAYGFSVTYSCDPRFSLLGHASISCTVENETIGVWRPSPPTCEKITCRKPDVSHGEMVSGFGPIYNYKDTIVFKCQKGFVLRGSSVIHCDADSKWNPSPPACEPICNFPPKIAHGHYKQSSSYSFFKEEIIYECDKGYILVGQAKLSCSYSHWSAPAPQCKEKRCRNPELINGIVEVKKDLLLGSTI

SEQ ID NO: 76 - protein, 597 aa, Homo sapiens
MHPPKTPSGALHRKRKMAAWPFSRLWKVSDPILFQMTLIAALLPAVLGNCGPPPTLSFAAPMDITLTETRFKTGTTLKYTCLPGYVRSHSTQTLTCNSDGEWVYNTFCIYKRCRHPGELRNGQVEIKTDLSFGSQIEFSCSEGFFLIGSTTSRCEVQDRGVGWSHPLPQCEIVKCKPPPDIRNGRHSGEENFYAYGFSVTYSCDPRFSLLGHASISCTVENETIGVWRPSPPTCEKITCRKPDVSHGEMVSGFGPIYNYKDTIVFKCQKGFVLRGSSVIHCDADSKWNPSPPACEPNSCINLPDIPHASWETYPRPTKEDVYVVGTVLRYRCHPGYKPTTDEPTTVICQKNLRWTPYQGCEALCCPEPKLNNGEITQHRKSRPANHCVYFYGDEISFSCHETSRFSAICQGDGTWSPRTPSCGDICNFPPKIAHGHYKQSSSYSFFKEEIIYECDKGYILVGQAKLSCSYSHWSAPAPQCKALCRKPELVNGRLSVDKDQYVEPENVTIQCDSGYGVVGPQSITCSGNRTWYPEVPKCEWETPEGCEQVLTGKRLMQCLPNPEDVKMALEVYKLSLEIEQLELQRDSARQSTLDKEL

SEQ ID NO: 77 - protein, 597 aa, Homo sapiens; identical to SEQ ID NO: 76

SEQ ID NO: 78 - protein, 597 aa, Homo sapiens; identical to SEQ ID NO: 76

SEQ ID NO: 79 - protein, 742 aa, Homo sapiens
MGGRVFLAFCVWLTLPGAETQDSRGCARWCPQNSSCVNATACRCNPGFSSFSEIITTPTETCDDINECATPSKVSCGKFSDCWNTEGSYDCVCSPGYEPVSGAKTFKNESENTCQDVDECSSGQHQCDSSTVCFNTVGSYSCRCRPGWKPRHGIPNNQKDTVCEDMTFSTWTPPPGVHSQTLSRFFDKVQDLGRDSKTSSAEVTIQNVIKLVDELMEAPGDVEALAPPVRHLIATQLLSNLEDIMRILAKSLPKGPFTYISPSNTELTLMIQERGDKNVTMGQSSARMKLNWAVAAGAEDPGPAVAGILSIQNMTTLLANASLNLHSKKQAELEEIYESSIRGVQLRRLSAVNSIFLSHNNTKELNSPILFAFSHLESSDGEAGRDPPAKDVMPGPRQELLCAFWKSDSDRGGHWATEGCQVLGSKNGSTTCQCSHLSSFAILMAHYDVEDWKLTLITRVGLALSLFCLLLCILTFLLVRPIQGSRTTIHLHLCICLFVGSTIFLAGIENEGGQVGLRCRLVAGLLHYCFLAAFCWMSLEGLELYFLVVRVFQGQGLSTRWLCLIGYGVPLLIVGVSAAIYSKGYGRPRYCWLDFEQGFLWSFLGPVTFIILCNAVIFVTTVWKLTQKFSEINPDMKKLKKARALTITAIAQLFLLGCTWVFGLFIFDDRSLVLTYVFTILNCLQGAFLYLLHCLLNKKVREEYRKWACLVAGGSKYSEFTSTTSGTGHNQTRALRASESGI

SEQ ID NO: 80 - protein, 584 aa, Homo sapiens
MCYTHALFLQRQLRPRRSEAGRFRPRALRPDVSVARSAVTKSAGLYWRGPDGRGLCGAVLGDTRRCPVLAMADYLISGGTSYVPDDGLTAQQLFNCGDGLTYNDFLILPGYIDFTADQVDLTSALTKKITLKTPLVSSPMDTVTEAGMAIAMALTGGIGFIHHNCTPEFQANEVRKVKKYEQGFITDPVVLSPKDRVRDVFEAKARHGFCGIPITDTGRMGSRLVGIISSRDIDFLKEEEHDCFLEEIMTKREDLVVAPAGITLKEANEILQRSKKGKLPIVNEDDELVAIIARTDLKKNRDYPLASKDAKKQLLCGAAIGTHEDDKYRLDLLAQAGVDVVVLDSSQGNSIFQINMIKYIKDKYPNLQVIGGNVVTAAQAKNLIDAGVDALRVGMGSGSICITQEVLACGRPQATAVYKVSEYARRFGVPVIADGGIQNVGHIAKALALGASTVMMGSLLAATTEAPGEYFFSDGIRLKKYRGMGSLDAMDKHLSSQNRYFSEADKIKVAQGVSGAVQDKGSIHKFVPYLIAGIQHSCQDIGAKSLTQVRAMMYSGELKFEKRTSSAQVEGGVHSLHSYEKRLF

SEQ ID NO: 81 - protein, 212 aa, Homo sapiens
MWSLLPRPRTSLMQVWMPCGWAWEVAPSALRRKCWPVGGPKQQQCTRCQSMHGALVFRSLLMEESKMWVILRKPWPLGLSAVMMGSLLAATTEAPGEYFFSDGIRLKKYRGMGSLDAMDKHLSSQNRYFSEADKIKVAQGVSGAVQDKGSIHKFVPYLIAGIQHSCQDIGAKSLTQVRAMMYSGELKFEKRTSSAQVEGGVHSLHSYEKRLF

SEQ ID NO: 82 - protein, 417 aa, Homo sapiens
MLLSVPLLLGLLGLAVAEPAVYFKEQFLDGDGWTSRWIESKHKSDFGKFVLSSGKFYGDEEKDKGLQTSQDARFYALSASFEPFSNKGQTLVVQFTVKHEQNIDCGGGYVKLFPNSLDQTDMHGDSEYNIMFGPDICGPGTKKVHVIFNYKGKNVLINKDIRCKDDEFTHLYTLIVRPDNTYEVKIDNSQVESGSLEDDWDFLPPKKIKDPDASKPEDWDERAKIDDPTDSKPEDWDKPEHIPDPDAKKPEDWDEEMDGEWEPPVIQNPEYKGEWKPRQIDNPDYKGTWIHPEIDNPEYSPDPSIYAYDNFGVLGLDLWQVKSGTIFDNFLITNDEAYAEEFGNETWGVTKAAEKQMKDKQDEEQRLKEEEEDKKRKEEEEAEDKEDDEDKDEDEEDEEDKEEDEEEDVPGQAKDEL

SEQ ID NO: 83 - protein, 4391 aa, Homo sapiens
MGWRAPGALLLALLLHGRLLAVTHGLRAYDGLSLPEDIETVTASQMRWTHSYLSDDEDMLADSISGDDLGSGDLGSGDFQMVYFRALVNFTRSIEYSPQLEDAGSREFREVSEAVVDTLESEYLKIPGDQVVSVVFIKELDGWVFVELDVGSEGNADGAQIQEMLLRVISSGSVASYVTSPQGFQFRRLGTVPQFPRACTEAEFACHSYNECVALEYRCDRRPDCRDMSDELNCEEPVLGISPTFSLLVETTSLPPRPETTIMRQPPVTHAPQPLLPGSVRPLPCGPQEAACRNGHCIPRDYLCDGQEDCEDGSDELDCGPPPPCEPNEFPCGNGHCALKLWRCDGDFDCEDRTDEANCPTKRPEEVCGPTQFRCVSTNMCIPASFHCDEESDCPDRSDEFGCMPPQVVTPPRESIQASRGQTVTFTCVAIGVPTPIINWRLNWGHIPSHPRVTVTSEGGRGTLIIRDVKESDQGAYTCEAMNARGMVFGIPDGVLELVPQRGPCPDGHFYLEHSAACLPCFCFGITSVCQSTRRFRDQIRLRFDQPDDFKGVNVTMPAQPGTPPLSSTQLQIDPSLHEFQLVDLSRRFLVHDSFWALPEQFLGNKVDSYGGSLRYNVRYELARGMLEPVQRPDVVLVGAGYRLLSRGHTPTQPGALNQRQVQFSEEHWVHESGRPVQRAELLQVLQSLEAVLIQTVYNTKMASVGLSDIAMDTTVTHATSHGRAHSVEECRCPIGYSGLSCESCDAHFTRVPGGPYLGTCSGCSCNGHASSCDPVYGHCLNCQHNTEGPQCNKCKAGFFGDAMKATATSCRPCPCPYIDASRRFSDTCFLDTDGQATCDACAPGYTGRRCESCAPGYEGNPIQPGGKCRPVNQEIVRCDERGSMGTSGEACRCKNNVVGRLCNECADGSFHLSTRNPDGCLKCFCMGVSRHCTSSSWSRAQLHGASEEPGHFSLTNAASTHTTNEGIFSPTPGELGFSSFHRLLSGPYFWSLPSRFLGDKVTSYGGELRFTVTQRSQPGSTPLHGQPLVVLQGNNIILEHHVAQEPSPGQPSTFIVPFREQAWQRPDGQPATREHLLMALAGIDTLLIRASYAQQPAESRVSGISMDVAVPEETGQDPALEVEQCSCPPGYRGPSCQDCDTGYTRTPSGLYLGTCERCSCHGHSEACEPETGACQGCQHHTEGPRCEQCQPGYYGDAQRGTPQDCQLCPCYGDPAAGQAAHTCFLDTDGHPTCDACSPGHSGRHCERCAPGYYGNPSQGQPCQRDSQVPGPIGCNCDPQGSVSSQCDAAGQCQCKAQVEGLTCSHCRPHHFHLSASNPDGCLPCFCMGITQQCASSAYTRHLISTHFAPGDFQGFALVNPQRNSRLTGEFTVEPVPEGAQLSFGNFAQLGHESFYWQLPETYQGDKVAAYGGKLRYTLSYTAGPQGSPLSDPDVQITGNNIMLVASQPALQGPERRSYEIMFREEFWRRPDGQPATREHLLMALADLDELLIRATFSSVPLVASISAVSLEVAQPGPSNRPRALEVEECRCPPGYIGLSCQDCAPGYTRTGSGLYLGHCELCECNGHSDLCHPETGACSQCQHNAAGEFCELCAPGYYGDATAGTPEDCQPCACPLTNPENMFSRTCESLGAGGYRCTACEPGYTGQYCEQCGPGYVGNPSVQGGQCLPETNQAPLVVEVHPARSIVPQGGSHSLRCQVSGSPPHYFYWSREDGRPVPSGTQQRHQGSELHFPSVQPSDAGVYICTCRNLHQSNTSRAELLVTEAPSKPITVTVEEQRSQSVRPGADVTFICTAKSKSPAYTLVWTRLHNGKLPTRAMDFNGILTIRNVQLSDAGTYVCTGSNMFAMDQGTATLHVQASGTLSAPVVSIHPPQLTVQPGQLAEFRCSATGSPTPTLEWTGGPGGQLPAKAQIHGGILRLPAVEPTDQAQYLCRAHSSAGQQVARAVLHVHGGGGPRVQVSPERTQVHAGRTVRLYCRAAGVPSATITWRKEGGSLPPQARSERTDIATLLIPAITTADAGFYLCVATSPAGTAQARIQVVVLSASDASPPPVKIESSSPSVTEGQTLDLNCVVAGSAHAQVTWYRRGGSLPPHTQVHGSRLRLPQVSPADSGEYVCRVENGSGPKEASITVSVLHGTHSGPSYTPVPGSTRPIRIEPSSSHVAEGQTLDLNCVVPGQAHAQVTWHKRGGSLPARHQTHGSLLRLHQVTPADSGEYVCHVVGTSGPLEASVLVTIEASVIPGPIPPVRIESSSSTVAEGQTLDLSCVVAGQAHAQVTWYKRGGSLPARHQVRGSRLYIFQASPADAGQYVCRASNGMEASITVTVTGTQGANLAYPAGSTQPIRIEPSSSQVAEGQTLDLNCVVPGQSHAQVTWHKRGGSLPVRHQTHGSLLRLYQASPADSGEYVCRVLGSSVPLEASVLVTIEPAGSVPALGVTPTVRIESSSSQVAEGQTLDLNCLVAGQAHAQVTWHKRGGSLPARHQVHGSRLRLLQVTPADSGEYVCRVVGSSGTQEASVLVTIQQRLSGSHSQGVAYPVRIESSSASLANGHTLDLNCLVASQAPHTITWYKRGGSLPSRHQIVGSRLRIPQVTPADSGEYVCHVSNGAGSRETSLIVTIQGSGSSHVPSVSPPIRIESSSPTVVEGQTLDLNCVVARQPQAIITWYKRGGSLPSRHQTHGSHLRLHQMSVADSGEYVCRANNNIDALEASIVISVSPSAGSPSAPGSSMPIRIESSSSHVAEGETLDLNCVVPGQAHAQVTWHKRGGSLPSHHQTRGSRLRLHHVSPADSGEYVCRVMGSSGPLEASVLVTIEASGSSAVHVPAPGGAPPIRIEPSSSRVAEGQTLDLKCVVPGQAHAQVTWHKRGGNLPARHQVHGPLLRLNQVSPADSGEYSCQVTGSSGTLEASVLVTIEPSSPGPIPAPGLAQPIYIEASSSHVTEGQTLDLNCVVPGQAHAQVTWYKRGGSLPARHQTHGSQLRLHLVSPADSGEYVCRAASGPGPEQEASFTVTVPPSEGSSYRLRSPVISIDPPSSTVQQGQDASFKCLIHDGAAPISLEWKTRNQELEDNVHISPNGSIITIVGTRPSNHGTYRCVASNAYGVAQSVVNLSVHGPPTVSVLPEGPVWVKVGKAVTLECVSAGEPRSSARWTRISSTPAKLEQRTYGLMDSHAVLQISSAKPSDAGTYVCLAQNALGTAQKQVEVIVDTGAMAPGAPQVQAEEAELTVEAGHTATLRCSATGSPAPTIHWSKLRSPLPWQHRLEGDTLIIPRVAQQDSGQYICNATSPAGHAEATIILHVESPPYATTVPEHASVQAGETVQLQCLAHGTPPLTFQWSRVGSSLPGRATARNELLHFERAAPEDSGRYRCRVTNKVGSAEAFAQLLVQGPPGSLPATSIPAGSTPTVQVTPQLETKSIGASVEFHCAVPSDRGTQLRWFKEGGQLPPGHSVQDGVLRIQNLDQSCQGTYICQAHGPWGKAQASAQLVIQALPSVLINIRTSVQTVVVGHAVEFECLALGDPKPQVTWSKVGGHLRPGIVQSGGVVRIAHVELADAGQYRCTATNAAGTTQSHVLLLVQALPQISMPQEVRVPAGSAAVFPCIASGYPTPDISWSKLDGSLPPDSRLENNMLMLPSVRPQDAGTYVCTATNRQGKVKAFAHLQVPERVVPYFTQTPYSFLPLPTIKDAYRKFEIKITFRPDSADGMLLYNGQKRVPGSPTNLANRQPDFISFGLVGGRPEFRFDAGSGMATIRHPTPLALGHFHTVTLLRSLTQGSLIVGDLAPVNGTSQGKFQGLDLNEELYLGGYPDYGAIPKAGLSSGFIGCVRELRIQGEEIVFHDLNLTAHGISHCPTCRDRPCQNGGQCHDSESSSYVCVCPAGFTGSRCEHSQALHCHPEACGPDATCVNRPDGRGYTCRCHLGRSGLRCEEGVTVTTPSLSGAGSYLALPALTNTHHELRLDVEFKPLAPDGVLLFSGGKSGPVEDFVSLAMVGGHLEFRYELGSGLAVLRSAEPLALGRWHRVSAERLNKDGSLRVNGGRPVLRSSPGKSQGLNLHTLLYLGGVEPSVPLSPATNMSAHFRGCVGEVSVNGKRLDLTYSFLGSQGIGQCYDSSPCERQPCQHGATCMPAGEYEFQCLCRDGFKGDLCEHEENPCQLREPCLHGGTCQGTRCLCLPGFSGPRCQQGSGHGIAESDWHLEGSGGNDAPGQYGAYFHDDGFLAFPGHVFSRSLPEVPETIELEVRTSTASGLLLWQGVEVGEAGQGKDFISLGLQDGHLVFRYQLGSGEARLVSEDPINDGEWHRVTALREGRRGSIQVDGEELVSGRSPGPNVAVNAKGSVYIGGAPDVATLTGGRFSSGITGCVKNLVLHSARPGAPPPQPLDLQHRAQAGANTRPCPS

SEQ ID NO: 84 - protein, 3588 aa, Homo sapiens
MKATATSCRPCPCPYIDASRRFSDTCFLDTDGQATCDACAPGYTGRRCESCAPGYEGNPIQPGGKCRPVNQEIVRCDERGSMGTSGEACRCKNNVVGRLCNECADGSFHLSTRNPDGCLKCFCMGVSRHCTSSSWSRAQLHGASEEPGHFSLTNAASTHTTNEGIFSPTPGELGFSSFHRLLSGPYFWSLPSRFLGDKVTSYGGELRFTVTQRSQPGSTPLHGQPLVVLQGNNIILEHHVAQEPSPGQPSTFIVPFREQAWQRPDGQPATREHLLMALAGIDTLLIRASYAQQPAESRVSGISMDVAVPEETGQDPALEVEQCSCPPGYRGPSCQDCDTGYTRTPSGLYLGTCERCSCHGHSEACEPETGACQGCQHHTEGPRCEQCQPGYYGDAQRGTPQDCQLCPCYGDPAAGQAAHTCFLDTDGHPTCDACSPGHSGRHCERCAPGYYGNPSQGQPCQRDSQVPGPIGCNCDPQGSVSSQCDAAGQCQCKAQVEGLTCSHCRPHHFHLSASNPDGCLPCFCMGITQQCASSAYTRHLISTHFAPGDFQGFALVNPQRNSRLTGEFTVEPVPEGAQLSFGNFAQLGHESFYWQLPETYQGDKVAAYGGKLRYTLSYTAGPQGSPLSDPDVQITGNNIMLVASQPALQGPERRSYEIMFREEFWRRPDGQPATREHLLMALADLDELLIRATFSSVPLAASISAVSLEVAQPGPSNRPRALEVEECRCPPGYIGLSCQDCAPGYTRTGSGLYLGHCELCECNGHSDLCHPETGACSQCQHNAAGEFCELCAPGYYGDATAGTPEDCQPCACPLTNPENMFSRTCESLGAGGYRCTACEPGYTGQYCEQCGPGYVGNPSVQGGQCLPETNQAPLVVEVHPARSIVPQGGSHSLRCQVSGSPPHYFYWSREDGRPVPSGTQQRHQGSELHFPSVQPSDAGVYICTCRNLHQSNTSRAELLVTEAPSKPITVTVEEQRSQSVRPGADVTFICTAKSKSPAYTLVWTRLHNGKLPTRAMDFNGILTIRNVQLSDAGTYVCTGSNMFAMDQGTATLHVQASGTLSAPVVSIHPPQLTVQPGQLAEFRCSATGSPTPTLEWTGGPGGQLPAKAQIHGGILRLPAVEPTDQAQYLCRAHSSAGQQVARAVLHVHGGGGPRVQVSPERTQVHAGRTVRLYCRAAGVPSATITWRKEGGSLPPQARSERTDIATLLIPAITTADAGFYLCVATSPAGTAQARIQVVVLSASDASPPPVKIESSSPSVTEGQTLDLNCVVAGSAHAQVTWYRRGGSLPPHTQVHGSRLRLPQVSPADSGEYVCRVENGSGPKEASITVSVLHGTHSGPSYTPVPGSTRPIRIEPSSSHVAEGQTLDLNCVVPGQAHAQVTWHKRGGSLPARHQTHGSLLRLHQVTPADSGEYVCHVVGTSGPLEASVLVTIEASVIPGPIPPVRIESSSSTVAEGQTLDLSCVVAGQAHAQVTWYKRGGSLPARHQVRGSRLYIFQASPADAGQYVCRASNGMEASITVTVTGTQGANLAYPAGSTQPIRIEPSSSQVAEGQTLDLNCVVPGQSHAQVTWHKRGGSLPVRHQTHGSLLRLYQASPADSGEYVCRVLGSSVPLEASVLVTIEPAGSVPALGVTPTVRIESSSSQVAEGQTLDLNCLVAGQAHAQVTWHKRGGSLPARHQVHGSRLRLLQVTPADSGEYVCRVVGSSGTQEASVLVTIQQRLSGSHSQGVAYPVRIESSSASLANGHTLDLNCLVASQAPHTITWYKRGGSLPSRHQIVGSRLRIPQVTPADSGEYVCHVSNGAGSRETSLIVTIQGSGSSHVPSVSPPIRIESSSPTVVEGQTLDLNCVVARQPQAIITWYKRGGSLPSRHQTHGSHLRLHQMSVADSGEYVCRANNNIDALEASIVISVSPSAGSPSAPGSSMPIRIESSSSHVAEGETLDLNCVVPGQAHAQVTWHKRGGSLPSHHQTRGSRLRLHHVSPADSGEYVCRVMGSSGPLEASVLVTIEASGSSAVHVPAPGGAPPIRIEPSSSRVAEGQTLDLKCVVPGQAHAQVTWHKRGGNLPARHQVHGPLLRLNQVSPADSGEYSCQVTGSSGTLEASVLVTIEPSSPGPIPAPGLAQPIYIEASSSHVTEGQTLDLNCVVPGQAHAQVTWYKRGGSLPARHQTHGSQLRLHLVSPADSGEYVCRAASGPGPEQEASFTVTVPPSEGSSYRLRSPVISIDPPSSTVQQGQDASFKCLIHDGAAPISLEWKTRNQELEDNVHISPNGSIITIVGTRPSNHGTYRCVASNAYGVAQSVVNLSVHGPPTVSVLPEGPVWVKVGKAVTLECVSAGEPRSSARWTRISSTPAKLEQRTYGLMDSHAVLQISSAKPSDAGTYVCLAQNALGTAQKQVEVIVDTGAMAPGAPQVQAEEAELTVEAGHTATLRCSATGSPAPTIHWSKLRSPLPWQHRLEGDTLIIPRVAQQDSGQYICNATSPAGHAEATIILHVESPPYATTVPEHASVQAGETVQLQCLAHGTPPLTFQWSRVGSSLPGRATARNELLHFERAAPEDSGRYRCRVTNKVGSAEAFAQLLVQGPPGSLPATSIPAGSTPTVQVTPQLETKSIGASVEFHCAVPSDRGTQLRWFKEGGQLPPGHSVQDGVLRIQNLDQSCQGTYICQAHGPWGKAQASAQLVIQALPSVLINIRTSVQTVVVGHAVEFECLALGDPKPQVTWSKVGGHLRPGIVQSGGVVRIAHVELADAGQYRCTATNAAGTTQSHVLLLVQALPQISMPQEVRVPAGSAAVFPCIASGYPTPDISWSKLDGSLPPDSRLENNMLMLPSVRPQDAGTYVCTATNRQGKVKAFAHLQVPERVVPYFTQTPYSFLPLPTIKDAYRKFEIKITFRPDSADGMLLYNGQKRVPGSPTNLANRQPDFISFGLVGGRPEFRFDAGSGMATIRHPTPLALGHFHTVTLLRSLTQGSLIVGDLAPVNGTSQGKFQGLDLNEELYLGGYPDYGAIPKAGLSSGFIGCVRELRIQGEEIVFHDLNLTAHGISHCPTCRDRPCQNGGQCHDSESSSYVCVCPAGFTGSRCEHSQALHCHPEACGPDATCVNRPDGRGYTCRCHLGRSGLRCEEGVTVTTPSLSGAGSYLALPALTNTHHELRLDVEFKPLAPDGVLLFSGGKSGPVEDFVSLAMVGGHLEFRYELGSGLAVLRSAEPLALGRWHRVSAERLNKDGSLRVNGGRPVLRSSPGKSQGLNLHTLLYLGGVEPSVPLSPATNMSAHFRGCVGEVSVNGKRLDLTYSFLGSQGIGQCYDSSPCERQPCQHGATCMPAGEYEFQCLCRDGFKGDLCEHEENPCQLREPCLHGGTCQGTRCLCLPGFSGPRCQQGSGHGIAESDWHLEGSGGNDAPGQYGAYFHDDGFLAFPGHVFSRSLPEVPETIELEVRTSTASGLLLWQGVEVGEAGQGKDFISLGLQDGHLVFRYQLGSGEARLVSEDPINDGEWHRVTALREGRRGSIQVDGEELVSGRSPGPNVAVNAKGSVYIGGAPDVATLTGGRFSSGITGCVKNLVLHSARPGAPPPQPLDLQHRAQAGANTRPCPS

SEQ ID NO: 85 - protein, 4347 aa, Homo sapiens [sequence omitted]

SEQ ID NO: 86 - protein, 4346 aa, Homo sapiens [sequence omitted]

SEQ ID NO: 87 - protein, 4346 aa, Homo sapiens [sequence omitted]

SEQ ID NO: 88 - protein, 138 aa, Homo sapiens
MLQQVPENINFPAEEEKILEFWTEFNCFQECLKQSKHKPKFTFYDGPPFATGLPHYGHILAGTIKDIVTRYAHQSGFHVDRRFGWDCHGLPVEYEIDKTLGIRGPEDVAKMGITEYNNQCRAIVMRYSAEWKQTWPMD

SEQ ID NO: 89 - protein, 367 aa, Homo sapiens
RCEDPNPGVGGGGGSCDRRGLETHRPHAMRALWVLGLCCVLLTFGSVRADDEVDVDGTVEEDLGKSREGSRTDDEVVQREEEAIQLDGLNASQIRELREKSEKFAFQAEVNRMMKLIINSLYKNKEIFLRELISNASDALDKIRLISLTDENALSGNEELTVKIKCDKEKNLLHVTDTGVGMTREELVKNLGTIAKSGTSEFLNKMTEAQEDGQSTSELIGQFGVGFYSAFLVADKVIVTSKHNNDTQHIWESDSNEFSVIADPRGNTLGRGTTITLVLKEEASDYLELDTIKNLVKKYSQFINFPIYVWSSKTETVEEPMEEEEAAKEEKEESDDEAAQDEDEEMDVGTDEEEETAKESTAEKDEL

SEQ ID NO: 90 - protein, 559 aa, Homo sapiens [sequence omitted]

SEQ ID NO: 91 - protein, 559 aa, Homo sapiens
MSACRSFAVAICILEISILTAQYTTSYDPELTESSGSASHIDCRMSPWSEWSQCDPCLRQMFRSRSIEVFGQFNGKRCTDAVGDRRQCVPTEPCEDAEDDCGNDFQCSTGRCIKMRLRCNGDNDCGDFSDEDDCESEPRPPCRDRVVEESELARTAGYGINILGMDPLSTPFDNEFYNGLCNRDRDGNTLTYYRRPWNVASLIYETKGEKNFRTEHYEEQIEAFKSIIQEKTSNFNAAISLKFTPTETNKAEQCCEETASSISLHGKGSFRFSYSKNETYQLFLSYSSKKEKMFLHVKGEIHLGRFVMRNRDVVLTTTFVDDIKALPTTYEKGEYFAFLETYGTHYSSSGSLGGLYELIYVLDKASMKRKGVELKDIKRCLGYHLDVSLAFSEISVGAEFNKDDCVKRGEGRAVNITSENLIDDVVSLIRGGTRKYAFELKEKLLRGTVIDVTDFVNWASSINDAPVLISQKLSPIYNLVPVKMKNAHLKKQNLERAIEDYINEFSVRKCHTCQNGGTVILMDGKCLCACPFKFEGIACEISKQKISEGLPALEFPNEK

SEQ ID NO: 92 - protein, 567 aa, Homo sapiens [sequence omitted]

SEQ ID NO: 93 - protein, 559 aa, Homo sapiens [sequence omitted]

SEQ ID NO: 94 - protein, 344 aa, Homo sapiens
MGPPSAPPCRLHVPWKEVLLTASLLTFWNPPTTAKLTIESTPFNVAEGKEVLLLAHNLPQNRIGYSWYKGERVDGNSLIVGYVIGTQQATPGPAYSGRETIYPNASLLIQNVTQNDTGFYTLQVIKSDLVNEEATGQFHVYPELPKPSISSNNSNPVEDKDAVAFTCEPEVQNTTYLWWVNGQSLPVSPRLQLSNGNMTLTLLSVKRNDAGSYECEIQNPASANRSDPVTLNVLYGPDGPTISPSKANYRPGENLNLSCHAASNPPAQYSWFINGTFQQSTQELFIPNITVNNSGSYMCQAHNSATGLNRTTVTMITVSGSAPVLSAVATVGITIGVLARVALI

SEQ ID NO: 95 - protein, 344 aa, Homo sapiens
MGPPSAPPCRLHVPWKEVLLTASLLTFWNPPTTAKLTIESTPFNVAEGKEVLLLAHNLPQNRIGYSWYKGERVDGNSLIVGYVIGTQQATPGPAYSGRETIYPNASLLIQNVTQNDTGFYTLQVIKSDLVNEEATGQFHVYPELPKPSISSNNSNPVEDKDAVAFTCEPEVQNTTYLWWVNGQSLPVSPRLQLSNGNMTLTLLSVKRNDAGSYECEIQNPASANRSDPVTLNVLYGPDVPTISPSKANYRPGENLNLSCHAASNPPAQYSWFINGTFQQSTQELFIPNITVNNSGSYMCQAHNSATGLNRTTVTMITVSGSAPVLSAVATVGITIGVLARVALI

SEQ ID NO: 96 - protein, 71 aa, Homo sapiens
FQPSFLGMESCGIHETTFNSIMKCDVDIRKDLYANTVLSGGTTMYPGIADRMQKEITALAPSTMKIKIIAP

SEQ ID NO: 97 - protein, 1192 aa, Homo sapiens
MEDLDQSPLVSSSDSPPRPQPAFKYQFVREPEDEEEEEEEEEEDEDEDLEELEVLERKPAAGLSAAPVPTAPAAGAPLMDFGNDFVPPAPRGPLPAAPPVAPERQPSWDPSPVSSTVPAPSPLSAAAVSPSKLPEDDEPPARPPPPPPASVSPQAEPVWTPPAPAPAAPPSTPAAPKRRGSSGSVDETLFALPAASEPVIRSSAENMDLKEQPGNTISAGQEDFPSVLLETAASLPSLSPLSAASFKEHEYLGNLSTVLPTEGTLQENVSEASKEVSEKAKTLLIDRDLTEFSELEYSEMGSSFSVSPKAESAVIVANPREEIIVKNKDEEEKLVSNNILHNQQELPTALTKLVKEDEVVSSEKAKDSFNEKRVAVEAPMREEYADFKPFERVWEVKDSKEDSDMLAAGGKIESNLESKVDKKCFADSLEQTNHEKDSESSNDDTSFPSTPEGIKDRSGAYITCAPFNPAATESIATNIFPLLGDPTSENKTDEKKIEEKKAQIVTEKNTSTKTSNPFLVAAQDSETDYVTTDNLTKVTEEVVANMPEGLTPDLVQEACESELNEVTGTKIAYETKMDLVQTSEVMQESLYPAAQLCPSFEESEATPSPVLPDIVMEAPLNSAVPSAGASVIQPSSSPLEASSVNYESIKHEPENPPPYEEAMSVSLKKVSGIKEEIKEPENINAALQETEAPYISIACDLIKETKLSAEPAPDFSDYSEMAKVEQPVPDHSELVEDSSPDSEPVDLFSDDSIPDVPQKQDETVMLVKESLTETSFESMIEYENKEKLSALPPEGGKPYLESFKLSLDNTKDTLLPDEVSTLSKKEKIPLQMEELSTAVYSNDDLFISKEAQIRETETFSDSSPIEIIDEFPTLISSKTDSFSKLAREYTDLEVSHKSEIANAPDGAGSLPCTELPHDLSLKNIQPKVEEKISFSDDFSKNGSATSKVLLLPPDVSALATQAEIESIVKPKVLVKEAEKKLPSDTEKEDRSPSAIFSAELSKTSVVDLLYWRDIKKTGVVFGASLFLLLSLTVFSIVSVTAYIALALLSVTISFRIYKGVIQAIQKSDEGHPFRAYLESEVAISEELVQKYSNSALGHVNCTIKELRRLFLVDDLVDSLKFAVLMWVFTYVGALFNGLTLLILALISLFSVPVIYERHQAQIDHYLGLANKNVKDAMAKIQAKIPGLKRKAE

SEQ ID NO: 98 - protein, 986 aa, Homo sapiens
MDLKEQPGNTISAGQEDFPSVLLETAASLPSLSPLSAASFKEHEYLGNLSTVLPTEGTLQENVSEASKEVSEKAKTLLIDRDLTEFSELEYSEMGSSFSVSPKAESAVIVANPREEIIVKNKDEEEKLVSNNILHNQQELPTALTKLVKEDEVVSSEKAKDSFNEKRVAVEAPMREEYADFKPFERVWEVKDSKEDSDMLAAGGKIESNLESKVDKKCFADSLEQTNHEKDSESSNDDTSFPSTPEGIKDRSGAYITCAPFNPAATESIATNIFPLLGDPTSENKTDEKKIEEKKAQIVTEKNTSTKTSNPFLVAAQDSETDYVTTDNLTKVTEEVVANMPEGLTPDLVQEACESELNEVTGTKIAYETKMDLVQTSEVMQESLYPAAQLCPSFEESEATPSPVLPDIVMEAPLNSAVPSAGASVIQPSSSPLEASSVNYESIKHEPENPPPYEEAMSVSLKKVSGIKEEIKEPENINAALQETEAPYISIACDLIKETKLSAEPAPDFSDYSEMAKVEQPVPDHSELVEDSSPDSEPVDLFSDDSIPDVPQKQDETVMLVKESLTETSFESMIEYENKEKLSALPPEGGKPYLESFKLSLDNTKDTLLPDEVSTLSKKEKIPLQMEELSTAVYSNDDLFISKEAQIRETETFSDSSPIEIIDEFPTLISSKTDSFSKLAREYTDLEVSHKSEIANAPDGAGSLPCTELPHDLSLKNIQPKVEEKISFSDDFSKNGSATSKVLLLPPDVSALATQAEIESIVKPKVLVKEAEKKLPSDTEKEDRSPSAIFSAELSKTSVVDLLYWRDIKKTGVVFGASLFLLLSLTVFSIVSVTAYIALALLSVTISFRIYKGVIQAIQKSDEGHPFRAYLESEVAISEELVQKYSNSALGHVNCTIKELRRLFLVDDLVDSLKFAVLMWVFTYVGALFNGLTLLILALISLFSVPVIYERHQAQIDHYLGLANKNVKDAMAKIQAKIPGLKRKAE

SEQ ID NO: 99 - protein, 986 aa, Homo sapiens; identical to SEQ ID NO: 98

SEQ ID NO: 100 - protein, 986 aa, Homo sapiens; identical to SEQ ID NO: 98

SEQ ID NO: 101 - protein, 986 aa, Homo sapiens; identical to SEQ ID NO: 98

SEQ ID NO: 102 - protein, 986 aa, Homo sapiens; identical to SEQ ID NO: 98

SEQ ID NO: 103 - protein, 893 aa, Homo sapiens
MGSSFSVSPKAESAVIVANPREEIIVKNKDEEEKLVSNNILHNQQELPTALTKLVKEDEVVSSEKAKDSFNEKRVAVEAPMREEYADFKPFERVWEVKDSKEDSDMLAAGGKIESNLESKVDKKCFADSLEQTNHEKDSESSNDDTSFPSTPEGIKDRSGAYITCAPFNPAATESIATNIFPLLGDPTSENKTDEKKIEEKKAQIVTEKNTSTKTSNPFLVAAQDSETDYVTTDNLTKVTEEVVANMPEGLTPDLVQEACESELNEVTGTKIAYETKMDLVQTSEVMQESLYPAAQLCPSFEESEATPSPVLPDIVMEAPLNSAVPSAGASVIQPSSSPLEASSVNYESIKHEPENPPPYEEAMSVSLKKVSGIKEEIKEPENINAALQETEAPYISIACDLIKETKLSAEPAPDFSDYSEMAKVEQPVPDHSELVEDSSPDSEPVDLFSDDSIPDVPQKQDETVMLVKESLTETSFESMIEYENKEKLSALPPEGGKPYLESFKLSLDNTKDTLLPDEVSTLSKKEKIPLQMEELSTAVYSNDDLFISKEAQIRETETFSDSSPIEIIDEFPTLISSKTDSFSKLAREYTDLEVSHKSEIANAPDGAGSLPCTELPHDLSLKNIQPKVEEKISFSDDFSKNGSATSKVLLLPPDVSALATQAEIESIVKPKVLVKEAEKKLPSDTEKEDRSPSAIFSAELSKTSVVDLLYWRDIKKTGVVFGASLFLLLSLTVFSIVSVTAYIALALLSVTISFRIYKGVIQAIQKSDEGHPFRAYLESEVAISEELVQKYSNSALGHVNCTIKELRRLFLVDDLVDSLKFAVLMWVFTYVGALFNGLTLLILALISLFSVPVIYERHQAQIDHYLGLANKNVKDAMAKIQAKIPGLKRKAE

SEQ ID NO: 104 - protein, 986 aa, Homo sapiens; identical to SEQ ID NO: 98

SEQ ID NO: 105 - protein, 392 aa, Homo sapiens
MEDLDQSPLVSSSDSPPRPQPAFKYQFVREPEDEEEEEEEEEEDEDEDLEELEVLERKPAAGLSAAPVPTAPAAGAPLMDFGNDFVPPAPRGPLPAAPPVAPERQPSWDPSPVSSTVPAPSPLSAAAVSPSKLPEDDEPPARPPPPPPASVSPQAEPVWTPPAPAPAAPPSTPAAPKRRGSSGSVDETLFALPAASEPVIRSSAVVDLLYWRDIKKTGVVFGASLFLLLSLTVFSIVSVTAYIALALLSVTISFRIYKGVIQAIQKSDEGHPFRAYLESEVAISEELVQKYSNSALGHVNCTIKELRRLFLVDDLVDSLKFAVLMWVFTYVGALFNGLTLLILALISLFSVPVIYERHQAQIDHYLGLANKNVKDAMAKIQAKIPGLKRKAE

SEQ ID NO: 106 - protein, 986 aa, Homo sapiens; identical to SEQ ID NO: 98

SEQ ID NO: 107 - protein, 384 aa, Homo sapiens
MAGILAWFWNERFWLPHNVTWADLKNTEEATFPQAEDLYLAFPLAFCIFMVRLIFERFVAKPCAIALNIQANGPQIAPPNAILEKVFTAITKHPDEKRLEGLSKQLDWDVRSIQRWFRQRRNQEKPSTLTRFCESMWRFSFYLYVFTYGVRFLKKTPWLWNTRHCWYNYPYQPLTTDLHYYYILELSFYWSLMFSQFTDIKRKDFGIMFLHHLVSIFLITFSYVNNMARVGTLVLCLHDSADALLEAAKMANYAKFQKMCDLLFVMFAVVFITTRLGIFPLWVLNTTLFESWEIVGPYPSWWVFNLLLLLVQGLNCFWSYLIVKIACKAVSRGKVSKDDRSDIESSSDEEDSEPPGKNPHTATTTNGTSGTNGYLLTGSCSMDD

SEQ ID NO: 108 - protein, 209 aa, Homo sapiens
MAGILAWFWNERFWLPHNVTWADLKNTEEATFPQAEDLYLAFPLAFCIFMVRLIFERFVAKPCAIALNIQANGPQIAPPNAILEKVFTAITKHPDEKRLEGLSKQLDWDVRSIQRWFRQRRNQEKPSTLTRFCESMWRFSFYLYVFTYGVRFLKKTPWLWNTRHCWYNYPYQPLTTDLHYYYILELSFYWSLMFSQFTDIKRKVRAVMS

SEQ ID NO: 109 - protein, 2105 aa, Homo sapiens
MMPSACGRPSLSWSVRRRSSNRRPNCCSSSLRRMQTVQQEQLLQETQALQQSFLSEKDSLLQRERFIEQEKAKLEQLFQDEVAKAQQLREEQQRQQQQMEQERQRLVASMEEARRRQHEAEEGVRRKQEELQQLEQQRRQQEELLAEENQRLREQLQLLEEQHRAALAHSEEVTASQVAATKTLPNGRDALDGPAAEAEPEHSFDGLRRKVSAQRLQEAGILSAEELQRLAQGHTTVDELARREDVRHYLQGRSSIAGLLLKATNEKLSVYAALQRQLLSPGTALILLEAQAASGFLLDPVRNRRLTVNEAVKEGVVGPELHHKLLSAERAVTGYKDPYTGQQISLFQAMQKGLIVREHGIRLLEAQIATGGVIDPVHSHRVPVDVAYRRGYFDEEMNRVLADPSDDTKGFFDPNTHENLTYLQLLERCVEDPETGLCLLPLTDKAAKGGELVYTDSEARDVFEKATVSAPFGKFQGKTVTIWEIINSEYFTAEQRRDLLRQFRTGRITVEKIIKIIITVVEEQEQKGRLCFEGLRSLVPAAELLESRVIDRELYQQLQRGERSVRDVAEVDTVRRALRGANVIAGVWLEEAGQKLSIYNALKKDLLPSDMAVALLEAQAGTGHIIDPATSARLTVDEAVRAGLVGPEFHEKLLSAEKAVTGYRDPYTGQSVSLFQALKKGLIPREQGLRLLDAQLSTGGIVDPSKSHRVPLDVACARGCLDEETSRALSAPRADAKAYSDPSTGEPATYGELQQRCRPDQLTGLSLLPLSEKAARARQEELYSELQARETFEKTPVEVPVGGFKGRTVTVWELISSEYFTAEQRQELLRQFRTGKVTVEKVIKILITIVEEVETLRQERLSFSGLRAPVPASELLASGVLSRAQFEQLKDGKTTVKDLSELGSVRTLLQGSGCLAGIYLEDTKEKVSIYEAMRRGLLRATTAALLLEAQAATGFLVDPVRNQRLYVHEAVKAGVVGPELHEQLLSAEKAVTGYRDPYSGSTISLFQAMQKGLVLRQHGIRLLEAQIATGGIIDPVHSHRVPVDVAYQRGYFSEEMNRVLADPSDDTKGFFDPNTHENLTYRQLLERCVEDPETGLRLLPLKGAEKAEVVETTQVYTEEETRRAFEETQIDIPGGGSHGGSTMSLWEVMQSDLIPEEQRAQLMADFQAGRVTKERMIIIIIEIIEKTEIIRQQGLASYDYVRRRLTAEDLFEARIISLETYNLLREGTRSLREALEAESAWCYLYGTGSVAGVYLPGSRQTLSIYQALKKGLLSAEVARLLLEAQAATGFLLDPVKGERLTVDEAVRKGLVGPELHDRLLSAERAVTGYRDPYTEQTISLFQAMKKELIPTEEALRLLDAQLATGGIVDPRLGFHLPLEVAYQRGYLNKDTHDQLSEPSEVRSYVDPSTDERLSYTQLLRRCRRDDGTGQLLLPLSDARKLTFRGLRKQITMEELVRSQVMDEATALQLREGLTSIEEVTKNLQKFLEGTSCIAGVFVDATKERLSVYQAMKKGIIRPGTAFELLEAQAATGYVIDPIKGLKLTVEEAVRMGIVGPEFKDKLLSAERAVTGYKDPYSGKLISLFQAMKKGLILKDHGIRLLEAQIATGGIIDPEESHRLPVEVAYKRGLFDEEMNEILTDPSDDTKGFFDPNTEENLTYLQLMERCITDPQTGLCLLPLKEKKRERKTSSKSSVRKRRVVIVDPETGKEMSVYEAYRKGLIDHQTYLELSEQECEWEEITISSSDGVVKSMIIDRRSGRQYDIDDAIAKNLIDRSALDQYRAGTLSITEFADMLSGNAGGFRSRSSSVGSSSSYPISPAVSRTQLASWSDPTEETGPVAGILDTETLEKVSITEAMHRNLVDNITGQRLLEAQACTGGIIDPSTGERFPVTDAVNKGLVDKIMVDRINLAQKAFCGFEDPRTKTKMSAAQALKKGWLYYEAGQRFLEVQYLTGGLIEPDTPGRVPLDEALQRGTVDARTAQKLRDVGAYSKYLTCPKTKLKISYKDALDRSMVEEGTGLRLLEAAAQSTKGYYSPYSVSGSGSTAGSRTGSRTGSRAGSRRGSFDATGSGFSMTFSSSSYSSSGYGRRYASGSSASLGGPESAVA

SEQ ID NO: 110 - protein, 2105 aa, Homo sapiens; identical to SEQ ID NO: 109

SEQ ID NO: 111 - protein, 2105 aa, Homo sapiens; identical to SEQ ID NO: 109

SEQ ID NO: 112 - protein, 4684 aa, Homo sapiens [sequence omitted]

SEQ ID NO: 113 - protein, 2105 aa, Homo sapiens; identical to SEQ ID NO: 109

SEQ ID NO: 114 - protein, 538 aa, Homo sapiens
MARAAALLPSRSPPTPLLWPLLLLLLLETGAQDVRVQVLPEVRGQLGGTVELPCHLLPPVPGLYISLVTWQRPDAPANHQNVAAFHPKMGPSFPSPKPGSERLSFVSAKQSTGQDTEAELQDATLALHGLTVEDEGNYTCEFATFPKGSVRGMTWLRVIAKPKNQAEAQKVTFSQDPTTVALCISKEGRPPARISWLSSLDWEAKETQVSGTLAGTVTVTSRFTLVPSGRADGVTVTCKVEHESFEEPALIPVTLSVRYPPEVSISGYDDNWYLGRTDATLSCDVRSNPEPTGYDWSTTSGTFPTSAVAQGSQLVIHAVDSLFNTTFVCTVTNAVGMGRAEQVIFVRETPNTAGAGATGGIIGGIIAAIIATAVAATGILICRQQRKEQTLQGAEEDEDLEGPPSYKPPTPKAKLEAQEMPSQLFTLGASEHSPLKTPYFDAGASCTEQEMPRYHELPTLEERSGPLHPGATSLGSPIPVPPGPPAVEDVSLDLEDEEGEEEEEYLDKINPIYDALSYSSPSDSYQGKGFVMSRAMYV

SEQ ID NO: 115 - protein, 538 aa, Homo sapiens; identical to SEQ ID NO: 114

SEQ ID NO: 116 - protein, 479 aa, Homo sapiens
MARAAALLPSRSPPTPLLWPLLLLLLLETGAQDVRVQVLPEVRGQLGGTVELPCHLLPPVPGLYISLVTWQRPDAPANHQNVAAFHPKMGPSFPSPKPGSERLSFVSAKQSTGQDTEAELQDATLALHGLTVEDEGNYTCEFATFPKGSVRGMTWLRVIAKPKNQAEAQKVTFSQDPTTVALCISKEGRPPARISWLSSLDWEAKETQVSGTLAGTVTVTSRFTLVPSGRADGVTVTCKVEHESFEEPALIPVTLSVRYPPEVSISGYDDNWYLGRTDATLSCDVRSNPEPTGYDWSTTSGTFPTSAVAQGSQLVIHAVDSLFNTTFVCTVTNAVGMGRAEQVIFVRETPRASPRDVGPLVWGAVGGTLLVLLLLAGGSLAFILLRVRRRRKSPGGAGGGASGDGGFYDPKAQVLGNGDPVFWTPVVPGPMEPDGKDEEEEEEEEKAEKGLMLPPPPALEDDMESQLDGSLISRRAVYV

SEQ ID NO: 117 - protein, 538 aa, Homo sapiens
MTTPGKENFRLKSYKNKSLNPDEMRRRREEEGLQLRKQKREEQLFKRRNVATAEEETEEEVMSDGGFHEAQINNMEMAPGGVITSDMIEMIFSKSPEQQLSATQKFRKLLSKEPNPPIDEVISTPGVVARFVEFLKRKENCTLQFESAWVLTNIASGNSLQTRIVIQAGAVPIFIELLSSEFEDVQEQAVWALGNIAGDSTMCRDYVLDCNILPPLLQLFSKQNRLTMTRNAVWALSNLCRGKSPPPEFAKVSPCLNVLSWLLFVSDTDVLADACWALSYLSDGPNDKIQAVIDAGVCRRLVELLMHNDYKVVSPALRAVGNIVTGDDIQTQVILNCSALQSLLHLLSSPKESIKKEACWTISNITAGNRAQIQTVIDANIFPALISILQTAEFRTRKEAAWAITNATSGGSAEQIKYLVELGCIKPLCDLLTVMDSKIVQVALNGLENILRLGEQEAKRNGTGINPYCALIEEAYGLDKIEFLQSHENQEIYQKAFDLIEHYFGTEDEDSSIAPQVDLNQQQYIFQQCEAPMEGFQL

SEQ ID NO: 118 - protein, 536 aa, Homo sapiens
METMASPGKDNYRMKSYKNNALNPEEMRRRREEEGIQLRKQKREQQLFKRRNVELINEEAAMFDSLLMDSYVSSTTGESVITREMVEMLFSDDSDLQLATTQKFRKLLSKEPSPPIDEVINTPRVVDRFVEFLKRNENCTLQFEAAWALTNIASGTSQQTKIVIEAGAVPIFIELLNSDFEDVQEQAVWALGNIAGDSSVCRDYVLNCSILNPLLTLLTKSTRLTMTRNAVWALSNLCRGKNPPPEFAKVSPCLPVLSRLLFSSDSDLLADACWALSYLSDGPNEKIQAVIDSGVCRRLVELLMHNDYKVASPALRAVGNIVTGDDIQTQVILNCSALPCLLHLLSSPKESIRKEACWTISNITAGNRAQIQAVIDANIFPVLIEILQKAEFRTRKEAAWAITNATSGGTPEQIRYLVSLGCIKPLCDLLTVMDSKIVQVALNGLENILRLGEQEGKRSGSGVNPYCGLIEEAYGLDKIEFLQSHENQEIYQKAFDLIEHYFGVEDDDSSLAPQVDETQQQFIFQQPEAPMEGFQL

SEQ ID NO: 119 - protein, 538 aa, Homo sapiens; identical to SEQ ID NO: 117

SEQ ID NO: 120 - protein, 538 aa, Homo sapiens; identical to SEQ ID NO: 117

SEQ ID NO: 121 - protein, 536 aa, Homo sapiens; identical to SEQ ID NO: 118

SEQ ID NO: 122 - protein, 536 aa, Homo sapiens; identical to SEQ ID NO: 118

SEQ ID NO: 123 - protein, 536 aa, Homo sapiens
MASPGKDNYRMKSYKNKALNPQEMRRRREEEGIQLRKQKREEQLFKRRNVYLPRNDESMLESPIQDPDISSTVPIPEEEVVTTDMVQMIFSNNADQQLTATQKFRKLLSKEPNPPIDQVIQKPGVVQRFVKFLERNENCTLQFEAAWALTNIASGTFLHTKVVIETGAVPIFIKLLNSEHEDVQEQAVWALGNIAGDNAECRDFVLNCEILPPLLELLTNSNRLTTTRNAVWALSNLCRGKNPPPNFSKVSPCLNVLSRLLFSSDPDVLADVCWALSYLSDGPNDKIQAVIDSGVCRRLVELLMHNDYKVVSPALRAVGNIVTGDDIQTQVILNCSALPCLLHLLSSPKESIRKEACWTVSNITAGNRAQIQAVIDANIFPVLIEILQKAEFRTRKEAAWAITNATSGGTPEQIRYLVALGCIKPLCDLLTVMDSKIVQVALNGLENILRLGEQESKQNGIGINPYCALIEEAYGLDKIEFLQSHENQEIYQKAFDLIEHYFGVEEDDPSIVPQVDENQQQFIFQQQEAPMDGFQL

SEQ ID NO: 124 - protein, 536 aa, Homo sapiens
MASPGKDNYRMKSYKNKALNPQEMRRRREEEGIQLRKQKREEQLFKRRNVYLPRNDESMLESPIQDSDISSTVPIPEEGVVTTDMVQMIFSNNADQQLTATQKFRKLLSKEPNPPIDQVIQKPGVVQRFVKFLERNENCTLQFEAAWALTNIASGTFLHTKVVIETGAVPIFIKLLNSEHEDVQEQAVWALGNIAGDNAECRDFVLNCEILPPLLELLTNSNRLTTTRNAVWALSNLCRGKNPPPNFSKVSPCLNVLSRLLFSSDPDVLADVCWALSYLSDGPNDKIQAVIDSGVCRRLVELLMHNDYKVVSPALRAVGNIVTGDDIQTQVILNCSALPCLLHLLSSPKESIRKEACWTVSNITAGNRAQIQAVIDANIFPVLIEILQKAEFRTRKEAAWAITNATSGGTPEQIRYLVALGCIKPLCDLLTVMDSKIVQVALNGLENILRLGEQESKQNGIGINPYCALIEEAYGLDKIEFLQSHENQEIYQKAFDLIEHYFGVEEDDPSIVPQVDENQQQFIFQQQEAPMDGFQL

SEQ ID NO: 125 - protein, 311 aa, Homo sapiens
MTRNAVWALSNLCRGKNPPPEFAKVSPCLPVLSRLLFSSDSDLLADACWALSYLSDGPNEKIQAVIDSGVCRRLVELLMHNDYKVASPALRAVGNIVTGDDIQTQVILNCSALPCLLHLLSSPKESIRKEACWTISNITAGNRAQIQAVIDANIFPVLIEILQKAEFRTRKEAAWAITNATSGGTPEQIRYLVSLGCIKPLCDLLTVMDSKIVQVALNGLENILRLGEQEGKRSGSGVNPYCGLIEEAYGLDKIEFLQSHENQEIYQKAFDLIEHYFGVEDDDSSLAPQVDETQQQFIFQQPEAPMEGFQL

SEQ ID NO: 126 - protein, 339 aa, Homo sapiens
MSTVHEILCKLSLEGDHSTPPSAYGSVKAYTNFDAERDALNIETAIKTKGVDEVTIVNILTNRSNAQRQDIAFAYQRRTKKELASALKSALSGHLETVILGLLKTPAQYDASELKASMKGLGTDEDSLIEIICSRTNQELQEINRVYKEMYKTDLEKDIISDTSGDFRKLMVALAKGRRAEDGSVIDYELIDQDARDLYDAGVKRKGTDVPKWISIMTERSVPHLQKVFDRYKSYSPYDMLESIRKEVKGDLENAFLNLVQCIQNKPLYFADRLYDSMKGKGTRDKVLIRIMVSRSEVDMLKIRSEFKRKYGKSLYYYIQQDTKGDYQKALLYLCGGDD

SEQ ID NO: 127 - protein, 357 aa, Homo sapiens
MGRQLAGCGDAGKKASFKMSTVHEILCKLSLEGDHSTPPSAYGSVKAYTNFDAERDALNIETAIKTKGVDEVTIVNILTNRSNAQRQDIAFAYQRRTKKELASALKSALSGHLETVILGLLKTPAQYDASELKASMKGLGTDEDSLIEIICSRTNQELQEINRVYKEMYKTDLEKDIISDTSGDFRKLMVALAKGRRAEDGSVIDYELIDQDARDLYDAGVKRKGTDVPKWISIMTERSVPHLQKVFDRYKSYSPYDMLESIRKEVKGDLENAFLNLVQCIQNKPLYFADRLYDSMKGKGTRDKVLIRIMVSRSEVDMLKIRSEFKRKYGKSLYYYIQQDTKGDYQKALLYLCGGDD

SEQ ID NO: 128 - protein, 357 aa, Homo sapiens; identical to SEQ ID NO: 127

SEQ ID NO: 129 - protein, 339 aa, Homo sapiens; identical to SEQ ID NO: 126

SEQ ID NO: 130 - protein, 287 aa, Homo sapiens [sequence omitted]

SEQ ID NO: 131 - protein, 339 aa, Homo sapiens; identical to SEQ ID NO: 126

SEQ ID NO: 132 - protein, 339 aa, Homo sapiens; identical to SEQ ID NO: 126

SEQ ID NO: 133 - protein, 338 aa, Homo sapiens
STVHEILCKLSLEGDHSTPPSAYGSVKAYTNFDAERDALNIETAIKTKGVDEVTIVNILTNRSNAQRQDIAFAYQRRTKKELASALKSALSGHLETVILGLLKTPAQYDASELKASMKGLGTDEDSLIEIICSRTNQELQEINRVYKEMYKTDLEKDIISDTSGDFRKLMVALAKGRRAEDGSVIDYELIDQDARDLYDAGVKRKGTDVPKWISIMTERSVPHLQKVFDRYKSYSPYDMLESIRKEVKGDLENAFLNLVQCIQNKPLYFADRLYDSMKGKGTRDKVLIRIMVSRSEVDMLKIRSEFKRKYGKSLYYYIQQDTKGDYQKALLYLCGGDD

SEQ ID NO: 134 - protein, 416 aa, Homo sapiens
MSEADGLRQRRPLRPQVVTDDDGQAPEAKDGSSFSGRVFRVTFLMLAVSLTVPLLGAMMLLESPIDPQPLSFKEPPLLLGVLHPNTKLRQAERLFENQLVGPESIAHIGDVMFTGTADGRVVKLENGEIETIARFGSGPCKTRDDEPVCGRPLGIRAGPNGTLFVADAYKGLFEVNPWKREVKLLLSSETPIEGKNMSFVNDLTVTQDGRKIYFTDSSSKWQRRDYLLLVMEGTDDGRLLEYDTVTREVKVLLDQLRFPNGVQLSPAEDFVLVAETTMARIRRVYVSGLMKGGADLFVENMPGFPDNIRPSSSGGYWVGMSTIRPNPGFSMLDFLSERPWIKRMIFKLFSQETVMKFVPRYSLVLELSDSGAFRRSLHDPDGLVATYISEVHEHDGHLYLGSFRSPFLCRLSLQAV

SEQ ID NO: 135 - protein, 380 aa, Homo sapiens
MLAVSLTVPLLGAMMLLESPIDPQPLSFKEPPLLLGVLHPNTKLRQAERLFENQLVGPESIAHIGDVMFTGTADGRVVKLENGEIETIARFGSGPCKTRDDEPVCGRPLGIRAGPNGTLFVADAYKGLFEVNPWKREVKLLLSSETPIEGKNMSFVNDLTVTQDGRKIYFTDSSSKWQRRDYLLLVMEGTDDGRLLEYDTVTREVKVLLDQLRFPNGVQLSPAEDFVLVAETTMARIRRVYVSGLMKGGADLFVENMPGFPDNIRPSSSGGYWVGMSTIRPNPGFSMLDFLSERPWIKRMIFKGSCAGCDLLFSQETVMKFVPRYSLVLELSDSGAFRRSLHDPDGLVATYISEVHEHDGHLYLGSFRSPFLCRLSLQAV

SEQ ID NO: 136 - protein, 416 aa, Homo sapiens; identical to SEQ ID NO: 134

SEQ ID NO: 137 - protein, 1025 aa, Homo sapiens [sequence omitted]

SEQ ID NO: 138 - protein, 1025 aa, Homo sapiens
MEPFTNDRLQLPRNMIENSMFEEEPDVVDLAKEPCLHPLEPDEVEYEPRGSRLLVRGLGEHEMEEDEEDYESSAKLLGMSFMNRSSGLRNSATGYRQSPDGACSVPSARTMVVCAFVIVVAVSVIMVIYLLPRCTFTKEGCHKKNQSIGLIQPFATNGKLFPWAQIRLPTAVVPLRYELSLHPNLTSMTFRGSVTISVQALQVTWNIILHSTGHNISRVTFMSAVSSQEKQAEILEYAYHGQIAIVAPEALLAGHNYTLKIEYSANISSSYYGFYGFSYTDESNEKKYFAATQFEPLAARSAFPCFDEPAFKATFIIKIIRDEQYTALSNMPKKSSVVLDDGLVQDEFSESVKMSTYLVAFIVGEMKNLSQDVNGTLVSIYAVPEKIGQVHYALETTVKLLEFFQNYFEIQYPLKKLDLVAIPDFEAGAMENWGLLTFREETLLYDSNTSSMADRKLVTKIIAHELAHQWFGNLVTMKWWNDLWLNEGFATFMEYFSLEKIFKELSSYEDFLDARFKTMKKDSLNSSHPISSSVQSSEQIEEMFDSLSYFKGSSLLLMLKTYLSEDVFQHAVVLYLHNHSYASIQSDDLWDSFNEVTNQTLDVKRMMKTWTLQKGFPLVTVQKKGKELFIQQERFFLNMKPEIQPSDTSYLWHIPLSYVTEGRNYSKYQSVSLLDKKSGVINLTEEVLWVKVNINMNGYYIVHYADDDWEALIHQLKINPYVLSDKDRANLINNIFELAGLGKVPLKRAFDLINYLGNENHTAPITEALFQTDLIYNLLEKLGYMDLASRLVTRVFKLLQNQIQQQTWTDEGTPSMRELRSALLEFACTHNLGNCSTTAMKLFDDWMASNGTQSLPTDVMTTVFKVGAKTDKGWSFLLGKYISIGSEAEKNKILEALASSEDVRKLYWLMKSSLNGDNFRTQKLSFIIRTVGRHFPGHLLAWDFVKENWNKLVQKFPLGSYTIQNIVAGSTYLFSTKTHLSEVQAFFENQSEATFRLRCVQEALEVIQLNIQWMEKNLKSLTWWL

SEQ ID NO: 139 - protein, 3377 aa, Homo sapiens [sequence omitted]

SEQ ID NO: 140 - protein, 1614 aa, Homo sapiens
MGRHLALLLLLLLLFQHFGDSDGSQRLEQTPLQFTHLEYNVTVQENSAAKTYVGHPVKMGVYITHPAWEVRYKIVSGDSENLFKAEEYILGDFCFLRIRTKGGNTAILNREVKDHYTLIVKALEKNTNVEARTKVRVQVLDTNDLRPLFSPTSYSVSLPENTAIRTSIARVSATDADIGTNGEFYYSFKDRTDMFAIHPTSGVIVLTGRLDYLETKLYEMEILAADRGMKLYGSSGISSMAKLTVHIEQANECAPVITAVTLSPSELDRDPAYAIVTVDDCDQGANGDIASLSIVAGDLLQQFRTVRSFPGSKEYKVKAIGGIDWDSHPFGYNLTLQAKDKGTPPQFSSVKVIHVTSPQFKAGPVKFEKDVYRAEISEFAPPNTPVVMVKAIPAYSHLRYVFKRTPGKAKFSLNYNTGLISILEPVKRQQAAHFELEVTTSDRKASTKVLVKVLGANSNPPEFTQTAYKAAFDENVPIGTTVMSLSAVDPDEGENGYVTYSIANLNHVPFAIDHFTGAVSTSENLDYELMPRVYTLRIRASDWGLPYRREVEVLATITLNNLNDNTPLFEKINCEGTIPRDLGVGEQITTVSAIDADELQLVQYQIEAGNELDLFSLNPNSGVLSLKRSLMDGLGAKVSFHSLRITATDGENFATPLYINITVAASHKLVNLQCEETGVAKMLAEKLLQANKLHNQGEVEDIFFDSHSVNAHIPQFRSTLPTGIQVKENQPVGSSVIFMNSTDLDTGFNGKLVYAVSGGNEDSCFMIDMETGMLKILSPLDRETTDKYTLNITVYDLGIPQKAAWRLLHVVVVDANDNPPEFLQESYFVEVSEDKEVHSEIIQVEATDKDLGPNGHVTYSILTDTDTFSIDSVTGVVNIARPLDRELQHEHSLKIEARDQAREEPQLFSTVVVKVSLEDVNDNPPTFIPPNYRVKVREDLPEGTVIMWLEAHDPDLGQSGQVRYSLLDHGEGNFDVDKLSGAVRIVQQLDFEKKQVYNLTVRAKDKGKPVSLSSTCYVEVEVVDVNENLHPPVFSSFVEKGTVKEDAPVGSLVMTVSAHDEDAGRDGEIRYSIRDGSGVGVFKIGEETGVIETSDRLDRESTSHYWLTVFATDQGVVPLSSFIEIYIEVEDVNDNAPQTSEPVYYPEIMENSPKDVSVVQIEAFDPDSSSNDKLMYKITSGNPQGFFSIHPKTGLITTTSRKLDREQQDEHILEVTVTDNGSPPKSTIARVIVKILDENDNKPQFLQKFYKIRLPEREKPDRERNARREPLYHVIATDKDEGPNAEISYSIEDGNEHGKFFIEPKTGVVSSKRFSAAGEYDILSIKAVDNGRPQKSSTTRLHIEWISKPKPSLEPISFEESFFTFTVMESDPVAHMIGVISVEPPGIPLWFDITGGNYDSHFDVDKGTGTIIVAKPLDAEQKSNYNLTVEATDGTTTILTQVFIKVIDTNDHRPQFSTSKYEVVIPEDTAPETEILQISAVDQDEKNKLIYTLQSSRDPLSLKKFRLDPATGSLYTSEKLDHEAVHQHTLTVMVRDQDVPVKRNFARIVVNVSDTNDHAPWFTASSYKGRVYESAAVGSVVLQVTALDKDKGKNAEVLYSIESGTFGEILEILL

SEQ ID NO: 141 - protein, 4590 aa, Homo sapiens
MGRHLALLLLLLLLFQHFGDSDGSQRLEQTPLQFTHLEYNVTVQENSAAKTYVGHPVKMGVYITHPAWEVRYKIVSGDSENLFKAEEYILGDFCFLRIRTKGGNTAILNREVKDHYTLIVKALEKNTNVEARTKVRVQVLDTNDLRPLFSPTSYSVSLPENTAIRTSIARVSATDADIGTNGEFYYSFKDRTDMFAIHPTSGVIVLTGRLDYLETKLYEMEILAADRGMKLYGSSGISSMAKLTVHIEQANECAPVITAVTLSPSELDRDPAYAIVTVDDCDQGANGDIASLSIVAGDLLQQFRTVRSFPGSKEYKVKAIGDIDWDSHPFGYNLTLQAKDKGTPPQFSSVKVIHVTSPQFKAGPVKFEKDVYRAEISEFAPPNTPVVMVKAIPAYSHLRYVFKRTPGKAKFSLNYNTGLISILEPVKRQQAAHFELEVTTSDRKASTKVLVKVLGANSNPPEFTQTAYKAAFDENVPIGTTIMSLSAVDPDEGENGYVTYSIANLNHVPFAIDHFTGAVSTSENLDYELMPRVYTLRIRASDWGLPYRREVEVLATITLNNLNDNTPLFEKINCEGTIPRDLGVGEQITTVSAIDADELQLVQYQIEAGNELDLFSLNPNSGVLSLKRSLMDGLGAKVSFHSLRITATDGENFATPLYINITVAASHKLVNLQCEETGVAKMLAEKLLQANKLHNQGEVEDIFFDSHSVNAHIPQFRSTLPTGIQVKENQPVGSSVIFMNSTDLDTGFNGKLVYAVSGGNEDSCFMIDMETGMLKILSPLDRETTDKYTLNITVYDLGIPQKAAWRLLHVVVVDANDNPPEFLQESYFVEVSEDKEVHSEIIQVEATDKDLGPNGHVTYSILTDTDTFSIDSVTGVVNIARPLDRELQHEHSLKIEARDQAREEPQLFSTVVVKVSLEDVNDNPPTFIPPNYRVKVREDLPEGTVIMWLEAHDPDLGQSGQVRYSLLDHGEGNFDVDKLSGAVRIVQQLDFEKKQVYNLTVRAKDKGKPVSLSSTCYVEVEVVDVNENLHPPVFSSFVEKGTVKEDAPVGSLVMTVSAHDEDAGRDGEIRYSIRDGSGVGVFKIGEETGVIETSDRLDRESTSHYWLTVFATDQGVVPLSSFIEIYIEVEDVNDNAPQTSEPVYYPEIMENSPKDVSVVQIEAFDPDSSSNDKLMYKITSGNPQGFFSIHPKTGLITTTSRKLDREQQDEHILEVTVTDNGSPPKSTIARVIVKILDENDNKPQFLQKFYKIRLPEREKPDRERNARREPLYRVIATDKDEGPNAEISYSIEDGNEHGKFFIEPKTGVVSSKRFSAAGEYDILSIKAVDNGRPQKSSTTRLHIEWISKPKQSLEPISFEESFFTFTVMESDPVAHMIGVISVEPPGIPLWFDITGGNYDSHFDVDKGTGTIIVAKPLDAEQKSNYNLTVEATDGTTTILTQVFIKVIDTNDHRPQFSTSKYEVVIPEDTAPETEILQISAVDQDEKNKLIYTLQSSRDPLSLKKFRLDPATGSLYTSEKLDHEAVSPAHLTVMVRDQDVPVKRNFARIVVNVSDTNDHAPWFTASSYKGRVYESAAVGSVVLQVTALDKDKGKNAEVLYSIESGNIGNIGNSFMIDPVLGSIKTAKELDRSNQAEYDLMVKATDKGSPPMSEITSVRIFVTIADNASPKFTSKEYSVELSETVSIGSFVGMVTAHSQSSVVYEIKDGNTGDAFDINPHSGTIITQKALDFETLPIYTLIIQGTNMAGLSTNTTVLVHLQDENDNAPVFMQAEYTGLISESASINSVVLTDRNVPLVIRAADADKDSNALLVYHIVEPSVHTYFAIDSSTGAIHTVLSLDYEETSIFHFTVQVHDMGTPRLFAEYAANVTVHVIDINDCPPVFAKPLYEASLLLPTYKGVKVITVNATDADSSAFSQLIYSITEGNIGEKFSMDYKTGALTVQNTTQLRSRYELTVRASDGRFAGLTSVKINVKESKESHLKFTQDVYSAVVKENSTEAETLAVITAIGSPINEPLFYHILNPDRRFKISRTSGVLSTTGTPFDREQQEAFDVVVEVIEEHKPSAVAHVVVKVIVEDQNDNAPVFVNLPYYAVVKVDTEVGHVIRYVTAVDRDSGRNGEVHYYLKEHHEHFQIGPLGEISLKKQFELDTLNKEYLVTVVAKDGGNPAFSAEVIVPITVMNKAMPVFEKPFYSAEIAESIQVHSPVVHVQANSPEGLKVFYSITDGDPFSQFTINFNTGVINVIAPLDFEAHPAYKLSIRATDSLTGAHAEVFVDIIVDDINDNPPVFAQQSYAVTLSEASVIGTSVVQVRATDSDSEPNRGISYQMFGNHSKSHDHFHVDSSTGLISLLRTLDYEQSRQHTIFVRAVDGGMPTLSSDVIVTVDVTDLNGNPPLFEQQIYEARISEHAPHGHFVTCVKAYDADSSDIDKLQYSILSGNDHKHFVIDSATGIITLSNLHRHALKPFYSLNLSVSDGVFRSSTQVHVTVIGGNLHSPAFLQNEYEVELAENAPLHTLVMEVKTTDGDSGIYGHVTYHIVNDFAKDRFYINERGQIFTLEKLDRETPAEKVISVRLMAKDAGGKVAFCTVNVILTDDNDNAPQFRATKYEVNIGSSAAKGTSVVKSASDADEGSNADITYAIEADSESVKENLEINKLSGVITTKESLIGLENEFFTFFVRAVDNGSPSKESVVLVYVKILPPEMQLPKFSEPFYTFTVSEDVPVGTEIDLIRAEHSGTVLYSLVKGNTPESNRDESFVIDRQSGRLKLEKSLDHETTKWYQFSILARCTQDDHEMVASVDVSIQVKDANDNSPVFESSPYEAFIVENLPGGSRVIQIRASDADSGTNGQVMYSLDQSQSVEVIESFAINMETGWITTLKELDHEKRDNYQIKVVASDHGEKIQLSSTAIVDVTVTDVNDSPPRFTAEIYKGTVSEDDPQGGVIAILSTTDADSEEINRQVTYFITGGDPLGQFAVETIQNEWKVYVKKPLDREKRDNYLLTITATDGTFSSKAIVEVKVLDANDNSPVCEKTLYSDTIPEDVLPGKLIMQISATDADIRSNAEITYTLLGSGAEKFKLNPDTGELKTSTPLDREEQAVYHLLVRATDGGGRFCQASIVVTLEDVNDNAPEFSADPYAITVFENTEPGTLLTRVQATDADAGLNRKILYSLIDSADGQFSINELSGIIQLEKPLDRELQAVYTLSLKAVDQGLPRRLTATGTVIVSVLDINDNPPVFEYREYGATVSEDILVGTEVLQVYAASRDIEANAEITYSIISGNEHGKFSIDSKTGAVFIIENLDYESSHEYYLTVEATDGGTPSLSDVATVNVNVTDINDNTPVFSQDTYTTVISEDAVLEQSVITVMADDADGPSNSHIHYSIIDGNQGSSFTIDPVRGEVKVTKLLDRETISGYTLTVQASDNGSPPRVNTTTVNIDVSDVNDNAPVFSRGNYSVIIQENKPVGFSVLQLVVTDEDSSHNGPPFFFTIVTGNDEKAFEVNPQGVLLTSSAIKRKEKDHYLLQVKVADNGKPQLSSLTYIDIRVIEESIYPPAILPLEIFITSSGEEYSGGVIGKIHATDQDVYDTLTYSLDPQMDNLFSVSSTGGKLIAHKKLDIGQYLLNVSVTDGKFTTVADITVHIRQVTQEMLNHTIAIRFANLTPEEFVGDYWRNFQRALRNILGVRRNDIQIVSLQSSEPHPHLDVLLFVEKPGSAQISTKQLLHKINSSVTDIEEIIGVRILNVFQKLCAGLDCPWKFCDEKVSVDESVMSTHSTARLSFVTPRHHRAAVCLCKEGRCPPVHHGCEDDPCPEGSECVSDPWEEKHTCVCPSGRFGQCPGSSSMTLTGNSYVKYRLTENENKLEMKLTMRLRTYSTHAVVMYARGTDYSILEIHHGRLQYKFDCGSGPGIVSVQSIQVNDGQWHAVALEVNGNYARLVLDQVHTASGTAPGTLKTLNLDNYVFFGGHIRQQGTRHGRSPQVGNGFRGCMDSIYLNGQELPLNSKPRSYAHIEESVDVSPGCFLTATEDCASNPCQNGGVCNPSPAGGYYCKCSALYIGTHCEISVNPCSSNPCLYGGTCVVDNGGFVCQCRGLYTGQRCQLSPYCKDEPCKNGGTCFDSLDGAVCQCDSGFRGERCQSDIDECSGNPCLHGALCENTHGSYHCNCSHEYRGRHCEDAAPNQYVSTPWNIGLAEGIGIVVFVAGIFLLVVVFVLCRKMISRKKKHQAEPKDKHLGPATAFLQRPYFDSKLNKNIYSDIPPQVPVRPISYTPSIPSDSRNNLDRNSFEGSAIPEHPEFSTFNPESVHGHRKAVAVCSVAPNLPPPPPSNSPSDSDSIQKPSWDFDYDTKVVDLDPCLSKKPLEEKPSQPYSARESLSEVQSLSSFQSESCDDNGYHWDTSDWMPSVPLPDIQEFPNYEVIDEQTPLYSADPNAIDTDYYPGGYDIESDFPPPPEDFPAADELPPLPPEFSNQFESIHPPRDMPAAGSLGSSSRNRQRFNLNQYLPNFYPLDMSEPQTKGTGENSTCREPHAPYPPGYQRHFEAPAVESMPMSVYASTASCSDVSACCEVESEVMMSDYESGDDGHFEEVTIPPLDSQQHTEV

SEQ ID NO: 142 - protein, 3841 aa, Homo sapiens [sequence omitted]

SEQ ID NO: 143 - protein, 235 aa, Homo sapiens
MAVELGVLLVRPRPGTGLGRVMRTLLLVLWLATRGSALYFHIGETEKKCFIEEIPDETMVIGNYRTQLYDKQREEYQPATPGLGMFVEVKDPEDKVILARQYGSEGRFTFTSHTPGEHQICLHSNSTKFSLFAGGMLRVHLDIQVGEHANDYAEIAAKDKLSELQLRVRQLVEQVEQIQKEQNYQRWREERFRQTSESTNQRVLWWSILQTLILVAIGVWQMRHLKSFFEAKKLV

SEQ ID NO: 144 - protein, 214 aa, Homo sapiens [sequence omitted]

SEQ ID NO: 145 - protein, 235 aa, Homo sapiens; identical to SEQ ID NO: 143

SEQ ID NO: 146 - protein, 268 aa, Homo sapiens
MAVELGVLLVRPRPGTGLGRVMRTLLLVLWLATRGSALYFHIGETEKKCFIEEIPDETMVIGNYRTQLYDKQREEYQPATPGLGMFVEVKDPEDKVILARQYGSEGRFTFTSHTPGEHQICLHSNSTKFSLFAGGMLRVHLDIQVGEHANDYAEIAAKDKLSELQLRVRQLVEQVEQIQKEQNYQRWREERFRQTSESTNQRVLWWSILQTLILGRLVVITQGLVKPLLLAPQNHSVTDQGCEAAVGGGGRGMGRQASLLSSFANLGF

SEQ ID NO: 147 - protein, 798 aa, Homo sapiens
MNLQPIFWIGLISSVCCVFAQTDENRCLKANAKSCGECIQAGPNCGWCTNSTFLQEGMPTSARCDDLEALKKKGCPPDDIENPRGSKDIKKNKNVTNRSKGTAEKLKPEDITQIQPQQLVLRLRSGEPQTFTLKFKRAEDYPIDLYYLMDLSYSMKDDLENVKSLGTDLMNEMRRITSDFRIGFGSFVEKTVMPYISTTPAKLRNPCTSEQNCTSPFSYKNVLSLTNKGEVFNELVGKQRISGNLDSPEGGFDAIMQVAVCGSLIGWRNVTRLLVFSTDAGFHFAGDGKLGGIVLPNDGQCHLENNMYTMSHYYDYPSIAHLVQKLSENNIQTIFAVTEEFQPVYKELKNLIPKSAVGTLSANSSNVIQLIIDAYNSLSSEVILENGKLSEGVTISYKSYCKNGVNGTGENGRKCSNISIGDEVQFEISITSNKCPKKDSDSFKIRPLGFTEEVEVILQYICECECQSEGIPESPKCHEGNGTFECGACRCNEGRVGRHCECSTDEVNSEDMDAYCRKENSSEICSNNGECVCGQCVCRKRDNTNEIYSGKFCECDNFNCDRSNGLICGGNGVCKCRVCECNPNYTGSACDCSLDTSTCEASNGQICNGRGICECGVCKCTDPKFQGQTCEMCQTCLGVCAEHKECVQCRAFNKGEKKDTCTQECSYFNITKVESRDKLPQPVQPDPVSHCKEKDVDDCWFYFTYSVNGNNEVMVHVVENPECPTGPDIIPIVAGVVAGIVLIGLALLLIWKLLMIIHDRREFAKFEKEKMNAKWDTGENPIYKSAVTTVVNPKYEGK

SEQ ID NO: 148 - protein, 801 aa, Homo sapiens
MNLQPIFWIGLISSVCCVFAQTDENRCLKANAKSCGECIQAGPNCGWCTNSTFLQEGMPTSARCDDLEALKKKGCPPDDIENPRGSKDIKKNKNVTNRSKGTAEKLKPEDITQIQPQQLVLRLRSGEPQTFTLKFKRAEDYPIDLYYLMDLSYSMKDDLENVKSLGTDLMNEMRRITSDFRIGFGSFVEKTVMPYISTTPAKLRNPCTSEQNCTSPFSYKNVLSLTNKGEVFNELVGKQRISGNLDSPEGGFDAIMQVAVCGSLIGWRNVTRLLVFSTDAGFHFAGDGKLGGIVLPNDGQCHLENNMYTMSHYYDYPSIAHLVQKLSENNIQTIFAVTEEFQPVYKELKNLIPKSAVGTLSANSSNVIQLIIDAYNSLSSEVILENGKLSEGVTISYKSYCKNGVNGTGENGRKCSNISIGDEVQFEISITSNKCPKKDSDSFKIRPLGFTEEVEVILQYICECECQSEGIPESPKCHEGNGTFECGACRCNEGRVGRHCECSTDEVNSEDMDAYCRKENSSEICSNNGECVCGQCVCRKRDNTNEIYSGKFCECDNFNCDRSNGLICGGNGVCKCRVCECNPNYTGSACDCSLDTSTCEASNGQICNGRGICECGVCKCTDPKFQGQTCEMCQTCLGVCAEHKECVQCRAFNKGEKKDTCTQECSYFNITKVESRDKLPQPVQPDPVSHCKEKDVDDCWFYFTYSVNGNNEVMVHVVENPECPTGPDIIPIVAGVVAGIVLIGLALLLIWKLLMIIHDRREFAKFEKEKMNAKWDTQENPIYKSPINNFKNPNYGRKAGL

SEQ ID NO: 149 - protein, 825 aa, Homo sapiens
MNLQPIFWIGLISSVCCVFAQTDENRCLKANAKSCGECIQAGPNCGWCTNSTFLQEGMPTSARCDDLEALKKKGCPPDDIENPRGSKDIKKNKNVTNRSKGTAEKLKPEDITQIQPQQLVLRLRSGEPQTFTLKFKRAEDYPIDLYYLMDLSYSMKDDLENVKSLGTDLMNEMRRITSDFRIGFGSFVEKTVMPYISTTPAKLRNPCTSEQNCTSPFSYKNVLSLTNKGEVFNELVGKQRISGNLDSPEGGFDAIMQVAVCGSLIGWRNVTRLLVFSTDAGFHFAGDGKLGGIVLPNDGQCHLENNMYTMSHYYDYPSIAHLVQKLSENNIQTIFAVTEEFQPVYKELKNLIPKSAVGTLSANSSNVIQLIIDAYNSLSSEVILENGKLSEGVTISYKSYCKNGVNGTGENGRKCSNISIGDEVQFEISITSNKCPKKDSDSFKIRPLGFTEEVEVILQYICECECQSEGIPESPKCHEGNGTFECGACRCNEGRVGRHCECSTDEVNSEDMDAYCRKENSSEICSNNGECVCGQCVCRKRDNTNEIYSGKFCECDNFNCDRSNGLICGGNGVCKCRVCECNPNYTGSACDCSLDTSTCEASNGQICNGRGICECGVCKCTDPKFQGQTCEMCQTCLGVCAEHKECVQCRAFNKGEKKDTCTQECSYFNITKVESRDKLPQPVQPDPVSHCKEKDVDDCWFYFTYSVNGNNEVMVHVVENPECPTGPDIIPIVAGVVAGIVLIGLALLLIWKLLMIIHDRREFAKFEKEKMNAKWDTSLSVAQPGVQWCDISSLQPLTSRFQQFSCLSLPSTWDYRVKILFIRVP

SEQ ID NO: 150 - protein, 819 aa, Homo sapiens
MNLQPIFWIGLISSVCCVFAQTDENRCLKANAKSCGECIQAGPNCGWCTNSTFLQEGMPTSARCDDLEALKKKGCPPDDIENPRGSKDIKKNKNVTNRSKGTAEKLKPEDITQIQPQQLVLRLRSGEPQTFTLKFKRAEDYPIDLYYLMDLSYSMKDDLENVKSLGTDLMNEMRRITSDFRIGFGSFVEKTVMPYISTTPAKLRNPCTSEQNCTSPFSYKNVLSLTNKGEVFNELVGKQRISGNLDSPEGGFDAIMQVAVCGSLIGWRNVTRLLVFSTDAGFHFAGDGKLGGIVLPNDGQCHLENNMYTMSHYYDYPSIAHLVQKLSENNIQTIFAVTEEFQPVYKELKNLIPKSAVGTLSANSSNVIQLIIDAYNSLSSEVILENGKLSEGVTISYKSYCKNGVNGTGENGRKCSNISIGDEVQFEISITSNKCPKKDSDSFKIRPLGFTEEVEVILQYICECECQSEGIPESPKCHEGNGTFECGACRCNEGRVGRHCECSTDEVNSEDMDAYCRKENSSEICSNNGECVCGQCVCRKRDNTNEIYSGKFCECDNFNCDRSNGLICGGNGVCKCRVCECNPNYTGSACDCSLDTSTCEASNGQICNGRGICECGVCKCTDPKFQGQTCEMCQTCLGVCAEHKECVQCRAFNKGEKKDTCTQECSYFNITKVESRDKLPQPVQPDPVSHCKEKDVDDCWFYFTYSVNGNNEVMVHVVENPECPTGPDIIPIVAGVVAGIVLIGLALLLIWKLLMIIHDRREFAKFEKEKMNAKWDTPGVQWCDISSLQPLTSRFQQFSCLSLPSTWDYRVKILFIRVP

SEQ ID NO: 151 - protein, 819 aa, Homo sapiens; identical to SEQ ID NO: 150

SEQ ID NO: 152 - protein, 798 aa, Homo sapiens [sequence omitted]

SEQ ID NO: 153 - protein, 789 aa, Homo sapiens
MNLQPIFWIGLISSVCCVFAQTDENRCLKANAKSCGECIQAGPNCGWCTNSTFLQEGMPTSARCDDLEALKKKGCPPDDIENPRGSKDIKKNKNVTNRSKGTAEKLKPEDITQIQPQQLVLRLRSGEPQTFTLKFKRAEDYPIDLYYLMDLSYSMKDDLENVKSLGTDLMNEMRRITSDFRIGFGSFVEKTVMPYISTTPAKLRNPCTSEQNCTSPFSYKNVLSLTNKGEVFNELVGKQRISGNLDSPEGGFDAIMQVAVCGSLIGWRNVTRLLVFSTDAGFHFAGDGKLGGIVLPNDGQCHLENNMYTMSHYYDYPSIAHLVQKLSENNIQTIFAVTEEFQPVYKELKNLIPKSAVGTLSANSSNVIQLIIDAYNSLSSEVILENGKLSEGVTISYKSYCKNGVNGTGENGRKCSNISIGDEVQFEISITSNKCPKKDSDSFKIRPLGFTEEVEVILQYICECECQSEGIPESPKCHEGNGTFECGACRCNEGRVGRHCECSTDEVNSEDMDAYCRKENSSEICSNNGECVCGQCVCRKRDNTNEIYSGKFCECDNFNCDRSNGLICGGNGVCKCRVCECNPNYTGSACDCSLDTSTCEASNGQICNGRGICECGVCKCTDPKFQGQTCEMCQTCLGVCAEHKECVQCRAFNKGEKKDTCTQECSYFNITKVESRDKLPQPVQPDPVSHCKEKDVDDCWFYFTYSVNGNNEVMVHVVENPECPTGPDIIPIVAGVVAGIVLIGLALLLIWKLLMIIHDRREFAKFEKEKMNAKWDTVSYKTSKKQSGL

SEQ ID NO: 154 - protein, 798 aa, Homo sapiens; identical to SEQ ID NO: 147

SEQ ID NO: 155 - protein, 801 aa, Homo sapiens; identical to SEQ ID NO: 148

SEQ ID NO: 156 - protein, 825 aa, Homo sapiens; identical to SEQ ID NO: 149

SEQ ID NO: 157 - protein, 819 aa, Homo sapiens; identical to SEQ ID NO: 150

SEQ ID NO: 158 - protein, 798 aa, Homo sapiens; identical to SEQ ID NO: 147

SEQ ID NO: 159 - protein, 798 aa, Homo sapiens; identical to SEQ ID NO: 147

SEQ ID NO: 160 - protein, 789 aa, Homo sapiens; identical to SEQ ID NO: 153

SEQ ID NO: 161 - protein, 801 aa, Homo sapiens; identical to SEQ ID NO: 148

SEQ ID NO: 162 - protein, 798 aa, Homo sapiens; identical to SEQ ID NO: 147

SEQ ID NO: 163 - protein, 798 aa, Homo sapiens; identical to SEQ ID NO: 147

SEQ ID NO: 164 - protein, 825 aa, Homo sapiens; identical to SEQ ID NO: 149

SEQ ID NO: 165 - protein, 682 aa, Homo sapiens
MPTSARCDDLEALKKKGCPPDDIENPRGSKDIKKNKNVTNRSKGTAEKLKPEDITQIQPQQLVLRLRSGEPQTFTLKFKRAEDYPIDLYYLMDLSYSMKDDLENVKSLGTDLMNEMRRITSDFRIGFGSFVEKTVMPYISTTPAKLRNPCTSEQNCTSPFSYKNVLSLTNKGEVFNELVGKQRISGNLDSPEGGFDAIMQVAVCGSLIGWRNVTRLLVFSTDAGFHFAGDGKLGGIVLPNDGQCHLENNMYTMSHYYDYPSIAHLVQKLSENNIQTIFAVTEEFQPVYKELKNLIPKSAVGTLSANSSNVIQLIIDAYNSLSSEVILENGKLSEGVTISYKSYCKNGVNGTGENGRKCSNISIGDEVQFEISITSNKCPKKDSDSFKIRPLGFTEEVEVILQYICECECQSEGIPESPKCHEGNGTFECGACRCNEGRVGRHCECSTDEVNSEDMDAYCRKENSSEICSNNGECVCGQCVCRKRDNTNEIYSGKFCECDNFNCDRSNGLICGGNGVCKCRVCECNPNYTGSACDCSLDTSTCEASNGQICNGRGICECGVCKCTDPKFQGQTCEMCQTCLGVCAEHKECVQCRAFNKVESRDKLPQPVQPDPVSHCKEKDVDDCWFYFTYSVNGNNEVMVHVVENPVSHWSRHHSNCSWCGCWNCSYWPCITADMEAFNDNS

SEQ ID NO: 166 - protein, 412 aa, Homo sapiens
MQPSSLLPLALCLLAAPASALVRIPLHKFTSIRRTMSEVGGSVEDLIAKGPVSKYSQAVPAVTEGPIPEVLKNYMDAQYYGEIGIGTPPQCFTVVFDTGSSNLWVPSIHCKLLDIACWIHHKYNSDKSSTYVKNGTSFDIHYGSGSLSGYLSQDTVSVPCQSASSASALGGVKVERQVFGEATKQPGITFIAAKFDGILGMAYPRISVNNVLPVFDNLMQQKLVDQNIFSFYLSRDPDAQPGGELMLGGTDSKYYKGSLSYLNVTRKAYWQVHLDQVEVASGLTLCKEGCEAIVDTGTSLMVGPVDEVRELQKAIGAVPLIQGEYMIPCEKVSTLPAITLKLGGKGYKLSPEDYTLKVSQAGKTLCLSGFMGMDIPPPSGPLWILGDVFIGRYYTVFDRDNNRVGFAEAARL

SEQ ID NO: 167 - protein, 412 aa, Homo sapiens; identical to SEQ ID NO: 166

SEQ ID NO: 168 - protein, 412 aa, Homo sapiens; identical to SEQ ID NO: 166

SEQ ID NO: 169 - protein, 412 aa, Homo sapiens; identical to SEQ ID NO: 166

SEQ ID NO: 170 - protein, 585 aa, Homo sapiens
ATATPVPPRMGSRAGGPTTPLSPTRLSRLQEKEELRELNDRLAVYIDKVRSLETENSALQLQVTEREEVRGRELTGLKALYETELADARRALDDTARERAKLQIELGKCKAEHDQLLLNYAKKESDLNGAQIKLREYEAALNSKDAALATALGDKKSLEGDLEDLKDQIAQLEASLAAAKKQLADETLLKVDLENRCQSLTEDLEFRKSMYEEEINETRRKHETRLVEVDSGRQIEYEYKLAQALHEMREQHDAQVRLYKEELEQTYHAKLENARLSSEMNTSTVNSAREELMESRMRIESLSSQLSNLQKESRACLERIQELEDLLAKEKDNSRRMLTDKEREMAEIRDQMQQQLNDYEQLLDVKLALDMEISAYRKLLEGEEERLKLSPSPSSRVTVSRASSSRSVRTTRGKRKRVDVEESEASSSVSISHSASATGNVCIEEIDVDGKFIRLKNTSEQDQPMGGWEMIRKIGDTSVSYKYTSRYVLKAGQTVTIWAANAGVTASPPTDLIWKNQNSWGTGEDVKVILKNSQGEEVAQRSTVFKTTIPEEEEEEEEAAGVVVEEELFHQQGTPRASNRSCAIM

SEQ ID NO: 171 - protein, 586 aa, Homo sapiens
MATATPVPPRMGSRAGGPTTPLSPTRLSRLQEKEELRELNDRLAVYIDKVRSLETENSALQLQVTEREEVRGRELTGLKALYETELADARRALDDTARERAKLQIELGKCKAEHDQLLLNYAKKESDLNGAQIKLREYEAALNSKDAALATALGDKKSLEGDLEDLKDQIAQLEASLAAAKKQLADETLLKVDLENRCQSLTEDLEFRKSMYEEEINETRRKHETRLVEVDSGRQIEYEYKLAQALHEMREQHDAQVRLYKEELEQTYHAKLENARLSSEMNTSTVNSAREELMESRMRIESLSSQLSNLQKESRACLERIQELEDLLAKEKDNSRRMLTDKEREMAEIRDQMQQQLNDYEQLLDVKLALDMEISAYRKLLEGEEERLKLSPSPSSRVTVSRASSSRSVRTTRGKRKRVDVEESEASSSVSISHSASATGNVCIEEIDVDGKFIRLKNTSEQDQPMGGWEMIRKIGDTSVSYKYTSRYVLKAGQTVTIWAANAGVTASPPTDLIWKNQNSWGTGEDVKVILKNSQGEEVAQRSTVFKTTIPEEEEEEEEAAGVVVEEELFHQQGTPRASNRSCAIM

SEQ ID NO: 172 - protein, 329 aa, Homo sapiens
MATATPVPPRMGSRAGGPTTPLSPTRLSRLQEKEELRELNDRLAVYIDKVRSLETENSALQLQVTEREEVRGRELTGLKALYETELADARRALDDTARERAKLQIELGKCKAEHDQLLLNYAKKESDLNGAQIKLREYEAALNSKDAALATALGDKKSLEGDLEDLKDQIAQLEASLAAAKKQLADETLLKVDLENRCQSLTEDLEFRKSMYEEEINETRRKHETRLVEVDSGRQIEYEYKLAQALHEMREQHDAQVRLYKEELEQTYHAKLENARLSSEMNTSTVNSAREELMESRMRIESLSSQLSNLQKECLLLSHISFIMLPIRP

SEQ ID NO: 173 - protein, 651 aa, Homo sapiens
MGSWALLWPPLLFTGLLVRPPGTMAQAQYCSVNKDIFEVEENTNVTEPLVDIHVPEGQEVTLGALSTPFAFRIQGNQLFLNVTPDYEEKSLLEAQLLCQSGGTLVTQLRVFVSVLDVNDNAPEFPFKTKEIRVEEDTKVNSTVIPETQLQAEDRDKDDILFYTLQEMTAGASDYFSLVSVNRPALRLDRPLDFYERPNMTFWLLVRDTPGENVEPSHTATATLVLNVVPADLRPPWFLPCTFSDGYVCIQAQYHGAVPTGHILPSPLVLRPGPIYAEDGDRGINQPIIYSIFRGNVNGTFIIHPDSGNLTVARSVPSPMTFLLLVKGQQADLARYSVTQVTVEAVAAAGSPPRFPQSLYRGTVARGAGAGVVVKDAAAPSQPLRIQAQDPEFSDLNSAITYRITNHSHFRMEGEVVLTTTTLAQAGAFYAEVEAHNTVTSGTATTVIEIQVSEQEPPSTGGGPSEDKRFSVVDMAALGGVLGALLLLALLGLAVLVHKHYGPRLKCCSGKAPEPQPQGFDNQAFLPDHKANWAPVPSPTHDPKPAEAPMPAEPAPPGPASPGGAPEPPAAARAGGSPTAVRSILTKERRPEGGYKAVWFGEDIGTEADVVVLNAPTLDVDGASDSGSGDEGEGAGRGGGPYDAPGGDDSYI

SEQ ID NO: 174 - protein, 493 aa, Homo sapiens
MGSWALLWPPLLFTGLLVRPPGTMAQAQYCSVNKDIFEVEENTNVTEPLVDIHVPEGQEVTLGALSTPFAFRIQGNQLFLNVTPDYEEKSLLEAQLLCQSGGTLVTQLRVFVSVLDVNDNAPEFPFKTKEIRVEEDTKVNSTVIPETQLQAEDRDKDDILFYTLQEMTAGASDYFSLVSVNRPALRLDRPLDFYERPNMTFWLLVRDTPGENVEPSHTATATLVLNVVPADLRPPWFLPCTFSDGYVCIQAQYHGAVPTGHILPSPLVLRPGPIYAEDGDRGINQPIIYSIFRGNVNGTFIIHPDSGNLTVARSVPSPMTFLLLVKGQQADLARYSVTQVTVEAVAAAGSPPRFPQSLYRGTVARGAGAGVVVKDAAAPSQPLRIQAQDPEFSDLNSAITYRITNHSHFRMEGEVVLTTTTLAQAGAFYAEPEGGSPPPTCTGDLRHPAQLRPPAPDPTQRLPGEAEEPMQTPKATHLGAGGLKHLPGVLVPF

SEQ ID NO: 175 - protein, 679 aa, Homo sapiens [sequence omitted]

SEQ ID NO: 176 - protein, 845 aa, Homo sapiens [sequence omitted]

SEQ ID NO: 177 - protein, 485 aa, Homo sapiens
MGSWALLWPPLLFTGLLVRPPGTMAQAQYCSVNKDIFEVEENTNVTEPLVDIHVPEGQEVTLGALSTPFAFRIQGNQLFLNVTPDYEEKSLLEAQLLCQSGGTLVTQLRVFVSVLDVNDNAPEFPFKTKEIRVEEDTKVNSTVIPETQLQAEDRDKDDILFYTLQEMTAGASDYFSLVSVNRPALRLDRPLDFYERPNMTFWLLVRDTPGENVEPSHTATATLVLNVVPADLRPPWFLPCTFSDGYVCIQAQYHGAVPTGHILPSPLVLRPGPIYAEDGDRGINQPIIYSIFRGNVNGTFIIHPDSGNLTVARSVPSPMTFLLLVKGQQADLARYSVTQVTVEAVAAAGSPPRFPQSLYRGTVARGAGAGVVVKDAAAPSQPLRIQAQDPEFSDLNSAITYRITNHSHFRMEGEVVLTTTTLAQAGAFYAETCTGDLRHPAQLRPPAPDPTQRLPGEAEEPMQTPKATHLGAGGLKHLPGVLVPF

SEQ ID NO: 178 - protein, 570 aa, Homo sapiens [sequence omitted]

SEQ ID NO: 179 - protein, 845 aa, Homo sapiens
MGSWALLWPPLLFTGLLVRPPGTMAQAQYCSVNKDIFEVEENTNVTEPLVDIHVPEGQEVTLGALSTPFAFRIQGNQLFLNVTPDYEEKSLLEAQLLCQSGGTLVTQLRVFVSVLDVNDNAPEFPFKTKEIRVEEDTKVNSTVIPETQLQAEDRDKDDILFYTLQEMTAGASDYFSLVSVNRPALRLDRPLDFYERPNMTFWLLVRDTPGENVEPSHTATATLVLNVVPADLRPPWFLPCTFSDGYVCIQAQYHGAVPTGHILPSPLVLRPGPIYAEDGDRGINQPIIYSIFRGNVNGTFIIHPDSGNLTVARSVPSPMTFLLLVKGQQADLARYSVTQVTVEAVAAAGSPPRFPQSLYRGTVARGAGAGVVVKDAAAPSQPLRIQAQDPEFSDLNSAITYRITNHSHFRMEGEVVLTTTTLAQAGAFYAEVEAHNTVTSGTATTVIEIQVSEQEPPSTDVPPSPEAGGTTGPWTSTTSEVPRPPEPSQGPSTTSSGGGTGPHPPSGTTLRPPTSSTPGGSPGAENSTSHQPATPGGDTAQTPKPGTSQPMPPGVGTSTSHQPATPSGGTVQTPEPGTSQPMPPSMGTSTSHQPATPGGGTAQTPEAGTSQPMPPGMGTSTSHQPTTPGGGTAQTPEPGTSQPMPLSKSTPSSGGGPSEDKRFSVVDMAALGGVLGALLLLALLGLAVLVHKHYGPRLKCCSGKAPEPQPQGFDNQAFLPDHKANWAPVPSPTHDPKPAEAPMPAEPAPPGPASPGGAPEPPAAARAGGSPTAVRSILTKERRPEGGYKAVWFGEDIGTEADVVVLNAPTLDVDGASDSGSGDEGEGAGRGGGPYDAPGGDDSYI

SEQ ID NO: 180 - protein, 651 aa, Homo sapiens; identical to SEQ ID NO: 173

SEQ ID NO: 181 - protein, 531 aa, Homo sapiens
MSKPHSEAGTAFIQTQQLHAAMADTFLEHMCRLDIDSPPITARNTGIICTIGPASRSVETLKEMIKSGMNVARLNFSHGTHEYHAETIKNVRTATESFASDPILYRPVAVALDTKGPEIRTGLIKGSGTAEVELKKGATLKITLDNAYMEKCDENILWLDYKNICKVVEVGSKIYVDDGLISLQVKQKGADFLVTEVENGGSLGSKKGVNLPGAAVDLPAVSEKDIQDLKFGVEQDVDMVFASFIRKASDVHEVRKVLGEKGKNIKIISKIENHEGVRRFDEILEASDGIMVARGDLGIEIPAEKVFLAQKMMIGRCNRAGKPVICATQMLESMIKKPRPTRAEGSDVANAVLDGADCIMLSGETAKGDYPLEAVRMQHLIAREAEAAMFHRKLFEELVRASSHSTDLMEAMAMGSVEASYKCLAAALIVLTESGRSAHQVARYRPRAPIIAVTRNPQTARQAHLYRGIFPVLCKDPVQEAWAEDVDLRVNFAMNVGKARGFFKKGDVVIVLTGWRPGSGFTNTMRVVPVP

SEQ ID NO: 182 - protein, 537 aa, Homo sapiens
QHWRTSAAMLKPHSEAGTAFIQTQQLHAATADTFLEHMCHLDIHTPPIPAWNTGIICTISPASQSVEMLKEMIKSGTNVACLNFSHGTHEYHVETIKNMCTATESFAADPILYRPVALALDTKGPEIRTGLIKGSSTMEVGLKMGATLKIMLDNTYMKKCDENILWLDYKNICKVMEVGSKIYVDDGLISLQVKQKGADFLVTEVETGGSSGSKKGVNLPGAAVDLPAVSEDIQDLNFGVEQDVDMVFASFIRKASDVHEVREALGEKGKNIKTINTIENHVGVQRFDEILEASDGIMVARGNPGIEIPAEKVFLAQRMMIGRCSAGKPICDSDVASAVLNGADCIMLSGETAKADYLEAGRMQHLIAHEAEATIYHLQLFEELPPTGAHYRPHESHRRGCQRGLLQVLQWGHNRPHQVWQVCSPGGIPPTCPHHCCDTESPDSSGPPVPWHLPCAVQGPSPGGQGGCGPLGELGPECWQGPRLLEGRHVVIVLTGWRPGSGFTNTMRVVPVRWTPKPLLQRLSHLLSPNHPLGQQR

SEQ ID NO: 183 - protein, 552 aa, Homo sapiens
MTQPFNYSAFERIIFAGTSAAMSKPHSEAGTAFIQTQQLHAAMADTFLEHMCRLDIDSPPITARNTGIICTIGPASRSVETLKEMIKSGMNVARLNFSHGTHEYHAETIKNVRTATESFASDPILYRPVAVALDTKGPEIRTGLIKGSGTAEVELKKGATLKITLDNAYMEKCDENILWLDYKNICKVVEVGSKIYVDDGLISLQVKQKGADFLVTEVENGGSLGSKKGVNLPGAAVDLPAVSEKDIQDLKFGVEQDVDMVFASFIRKASDVHEVRKVLGEKGKNIKIISKIENHEGVRRFDEILEASDGIMVARGDLGIEIPAEKVFLAQKMMIGRCNRAGKPVICATQMLESMIKKPRPTRAEGSDVANAVLDGADCIMLSGETAKGDYPLEAVRMQHLIAREAEAAIYHLQLFEELRRLAPITSDPTEATAVGAVEASFKCCSGAIIVLTKSGRSAHQVARYRPRAPIIAVTRNPQTARQAHLYRGIFPVLCKDPVQEAWAEDVDLRVNFAMNVGKARGFFKKGDVVIVLTGWRPGSGFTNTMRVVPVP

SEQ ID NO: 184 - protein, 530 aa, Homo sapiens
SKPHSEAGTAFIQTQQLHAAMADTFLEHMCRLDIDSPPITARNTGIICTIGPASRSVETLKEMIKSGMNVARLNFSHGTHEYHAETIKNVRTATESFASDPILYRPVAVALDTKGPEIRTGLIKGSGTAEVELKKGATLKITLDNAYMEKCDENILWLDYKNICKVVEVGSKIYVDDGLISLQVKQKGADFLVTEVENGGSLGSKKGVNLPGAAVDLPAVSEKDIQDLKFGVEQDVDMVFASFIRKASDVHEVRKVLGEKGKNIKIISKIENHEGVRRFDEILEASDGIMVARGDLGIEIPAEKVFLAQKMMIGRCNRAGKPVICATQMLESMIKKPRPTRAEGSDVANAVLDGADCIMLSGETAKGDYPLEAVRMQHLIAREAEAAIYHLQLFEELRRLAPITSDPTEATAVGAVEASFKCCSGAIIVLTKSGRSAHQVARYRPRAPIIAVTRNPQTARQAHLYRGIFPVLCKDPVQEAWAEDVDLRVNFAMNVGKARGFFKKGDVVIVLTGWRPGSGFTNTMRVVPVP

SEQ ID NO: 185 - protein, 531 aa, Homo sapiens; identical to SEQ ID NO: 181

SEQ ID NO: 186 - protein, 531 aa, Homo sapiens; identical to SEQ ID NO: 181

SEQ ID NO: 187 - protein, 531 aa, Homo sapiens
MSKPHSEAGTAFIQTQQLHAAMADTFLEHMCRLDIDSPPITARNTGIICTIGPASRSVETLKEMIKSGMNVARLNFSHGTHEYHAETIKNVRTATESFASDPILYRPVAVALDTKGPEIRTGLIKGSGTAEVELKKGATLKITLDNAYMEKCDENILWLDYKNICKVVEVGSKIYVDDGLISLQVKQKGADFLVTEVENGGSLGSKKGVNLPGAAVDLPAVSEKDIQDLKFGVEQDVDMVFASFIRKASDVHEVRKVLGEKGKNIKIISKIENHEGVRRFDEILEASDGIMVARGDLGIEIPAEKVFLAQKMMIGRCNRAGKPVICATQMLESMIKKPRPTRAEGSDVANAVLDGADCIMLSGETAKGDYPLEAVRMQHLIAREAEAAIYHLQLFEELRRLAPITSDPTEATAVGAVEASFKCCSGAIIVLTKSGRSAHQVARYRPRAPIIAVTRNPQTARQAHLYRGIFPVLCKDPVQEAWAEDVDLRVNFAMNVGKARGFFKKGDVVIVLTGWRPGSGFTNTMRVVPVP

SEQ ID NO: 188 - protein, 566 aa, Homo sapiens
MQWSSERGERLLTPGACSSEVPSAVPSRSGGTSAAMSKPHSEAGTAFIQTQQLHAAMADTFLEHMCRLDIDSPPITARNTGIICTIGPASRSVETLKEMIKSGMNVARLNFSHGTHEYHAETIKNVRTATESFASDPILYRPVAVALDTKGPEIRTGLIKGSGTAEVELKKGATLKITLDNAYMEKCDENILWLDYKNICKVVEVGSKIYVDDGLISLQVKQKGADFLVTEVENGGSLGSKKGVNLPGAAVDLPAVSEKDIQDLKFGVEQDVDMVFASFIRKASDVHEVRKVLGEKGKNIKIISKIENHEGVRRFDEILEASDGIMVARGDLGIEIPAEKVFLAQKMMIGRCNRAGKPVICATQMLESMIKKPRPTRAEGSDVANAVLDGADCIMLSGETAKGDYPLEAVRMQHLIAREAEAAMFHRKLFEELVRASSHSTDLMEAMAMGSVEASYKCLAAALIVLTESGRSAHQVARYRPRAPIIAVTRNPQTARQAHLYRGIFPVLCKDPVQEAWAEDVDLRVNFAMNVGKARGFFKKGDVVIVLTGWRPGSGFTNTMRVVPVP

SEQ ID NO: 189 - protein, 256 aa, Homo sapiens
MHTDTNKMVEFLEAVLCPPRYPKLAALNPESNTAGLDIFAKFSAYIKNSNPALNDNLQKGLLEALKVLDNYLTSPLPKEVDETSAEDEGISQRKFLNGNELTLADCNLLPKLHIVQVVCKKYRGFNIPEAFPGTPASTTPPKFNPNEIKVVYLRCTGGEVGATSALAPKIGPRGLSPKKVGDDIAKATGDWKGLSITVKLTIQNRQAQIEVVPSASALIIKALKEPPRVRKKQKNIKHSGSITFDEIVNIASQMQY

SEQ ID NO: 190 - protein, 406 aa, Homo sapiens [sequence omitted]

SEQ ID NO: 191 - protein, 505 aa, Homo sapiens
MSYPGYPPPPGGYPPAAPGGGPWGGAAYPPPPSMPPIGLDNVATYAGQFNQDYLSGMAANMSGTFGGANMPNLYPGAPGAGYPPVPPGGFGQPPSAQQPVPPYGMYPPPGGNPPSRMPSYPPYPGAPVPGQPMPPPGQQPPGAYPGQPPVTYPGQPPVPLPGQQQPVPSYPGYPGSGTVTPAVPPTQFGSRGTITDAPGFDPLRDAEVLRKAMKGFGTDEQAIIDCLGSRSNKQRQQILLSFKTAYGKDLIKDLKSELSGNFEKTILALMKTPVLFDIYEIKEAIKGVGTDEACLIEILASRSNEHIRELNRAYKAEFKKTLEEAIRSDTSGHFQRLLISLSQGNRDESTNVDMSLAQRDAQELYAAGENRLGTDESKFNAVLCSRSRAHLVAVFNEYQRMTGRDIEKSICREMSGDLEEGMLAVVKCLKNTPAFFAERLNKAMRGAGTKDRTLIRIMVSRSETDLLDIRSEYKRMYGKSLYHDISGDTSGDYRKILLKICGGND

SEQ ID NO: 192 - protein, 505 aa, Homo sapiens; identical to SEQ ID NO: 191

SEQ ID NO: 193 - protein, 505 aa, Homo sapiens; identical to SEQ ID NO: 191

SEQ ID NO: 194 - protein, 505 aa, Homo sapiens; identical to SEQ ID NO: 191

SEQ ID NO: 195 - protein, 471 aa, Homo sapiens [sequence omitted]

SEQ ID NO: 196 - protein, 324 aa, Homo sapiens [sequence omitted]

SEQ ID NO: 197 - protein, 236 aa, Homo sapiens
MKTPVLFDIYEIKEAIKGVGTDEACLIEILASRSNEHIRELNRAYKAEFKKTLEEAIRSDTSGHFQRLLISLSQGNRDESTNVDMSLAQRDAQELYAAGENRLGTDESKFNAVLCSRSRAHLVAVFNEYQRMTGRDIEKSICREMSGDLEEGMLAVVKCLKNTPAFFAERLNKAMRGAGTKDRTLIRIMVSRSETDLLDIRSEYKRMYGKSLYHDISGDTSGDYRKILLKICGGND

SEQ ID NO: 198 - protein, 505 aa, Homo sapiens; identical to SEQ ID NO: 191

SEQ ID NO: 199 - protein, 324 aa, Homo sapiens
MFCGDYVQGTIFPAPNFNPIMDAQMLGGALQGFDCDKDMLINILTQRCNAQRMMIAEAYQSMYGRDLIGDMREQLSDHFKDVMAGLMYPPPLYDAHELWHAMKGVGTDENCLIEILASRTNGEIFQMREAYCLQYSNNLQEDIYSETSGHFRDTLMNLVQGTREEGYTDPAMAAQDAMVLWEACQQKTGEHKTMLQMILCNKSYQQLRLVFQEFQNISGQDMVDAINECYDGYFQELLVAIVLCVRDKPAYFAYRLYSAIHDFGFHNKTVIRILIARSEIDLLTIRKRYKERYGKSLFHDIRNFASGHYKKALLAICAGDAEDY

SEQ ID NO: 200 - protein, 505 aa, Homo sapiens; identical to SEQ ID NO: 191

SEQ ID NO: 201 - protein, 505 aa, Homo sapiens; identical to SEQ ID NO: 191

SEQ ID NO: 202 - protein, 767 aa, Homo sapiens
MATYLEFIQQNEERDGVRFSWNVWPSSRLEATRMVVPLACLLTPLKERPDLPPVQYEPVLCSRPTCKAVLNPLCQVDYRAKLWACNFCFQRNQFPPAYGGISEVNQPAELMPQFSTIEYVIQRGAQSPLIFLYVVDTCLEEDDLQALKESLQMSLSLLPPDALVGLITFGRMVQVHELSCEGISKSYVFRGTKDLTAKQIQDMLGLTKPAMPMQQARPAQPQEHPFASSRFLQPVHKIDMNLTDLLGELQRDPWPVTQGKRPLRSTGVALSIAVGLLEGTFPNTGARIMLFTGGPPTQGPGMVVGDELKIPIRSWHDIEKDNARFMKKATKHYEMLANRTAANGHCIDIYACALDQTGLLEMKCCANLTGGYMVMGDSFNTSLFKQTFQRIFTKDFNGDFRMAFGATLDVKTSRELKIAGAIGPCVSLNVKGPCVSENELGVGGTSQWKICGLDPTSTLGIYFEVVNQHNTPIPQGGRGAIQFVTHYQHSSTQRRIRVTTIARNWADVQSQLRHIEAAFDQEAAAVLMARLGVFRAESEEGPDVLRWLDRQLIRLCQKFGQYNKEDPTSFRLSDSFSLYPQFMFHLRRSPFLQVFNNSPDESSYYRHHFARQDLTQSLIMIQPILYSYSFHGPPEPVLLDSSSILADRILLMDTFFQIVIYLGETIAQWRKAGYQDMPEYENFKHLLQAPLDDAQEILQARFPMPRYINTEHGGSQARFLLSKVNPSQTHNNLYAWGQETGAPILTDDVSLQVFMDHLKKLAVSSAC

SEQ ID NO: 203 - protein, 277 aa, Homo sapiens
MFPFYSCWRTGLLLLLLAVAVRESWQTEEKTCDLVGEKGKESEKELALVKRLKPLFNKSFESTVGQGSDTYIYIFRVCREAGNHTSGAGLVQINKSNGKETVVGRLNETHIFNGSNWIMLIYKGGDEYDNHCGKEQRRAVVMISCNRHTLADNFNPVSEERGKVQDCFYLFEMDSSLACSPEISHLSVGSILLVTFASLVAVYVVGGFLYQRLVVGAKGMEQFPHLAFWQDLGNLVADGCDFVCRSKPRNVPAAYRGVGDDQLGEESEERDDHLLPM

SEQ ID NO: 204 - protein, 277 aa, Homo sapiens; identical to SEQ ID NO: 203

SEQ ID NO: 205 - protein, 277 aa, Homo sapiens; identical to SEQ ID NO: 203

SEQ ID NO: 206 - protein, 277 aa, Homo sapiens; identical to SEQ ID NO: 203

SEQ ID NO: 207 - protein, 277 aa, Homo sapiens; identical to SEQ ID NO: 203

SEQ ID NO: 208 - protein, 492 aa, Homo sapiens
MEPSSKKLTGRLMLAVGGAVLGSLQFGYNTGVINAPQKVIEEFYNQTWVHRYGESILPTTLTTLWSLSVAIFSVGGMIGSFSVGLFVNRFGRRNSMLMMNLLAFVSAVLMGFSKLGKSFEMLILGRFIIGVYCGLTTGFVPMYVGEVSPTAFRGALGTLHQLGIVVGILIAQVFGLDSIMGNKDLWPLLLSIIFIPALLQCIVLPFCPESPRFLLINRNEENRAKSVLKKLRGTADVTHDLQEMKEESRQMMREKKVTILELFRSPAYRQPILIAVVLQLSQQLSGINAVFYYSTSIFEKAGVQQPVYATIGSGIVNTAFTVVSLFVVERAGRRTLHLIGLAGMAGCAILMTIALALLEQLPWMSYLSIVAIFGFVAFFEVGPGPIPWFIVAELFSQGPRPAAIAVAGFSNWTSNFIVGMCFQYVEQLCGPYVFIIFTVLLVLFFIFTYFKVPETKGRTFDEIASGFRQGGASQSDKTPEELFHPLGADSQV

SEQ ID NO: 209 - protein, 492 aa, Homo sapiens
MEPSSKKLTGRLMLAVGGAVLGSLQFGYNTGVINAPQKVIEEFYNQTWVHRYGESILPTTLTTLWSLSVAIFSVGGMIGSFSVGLFVNRFGRRNSMLMMNLLAFVSAVLMGFSKLGKSFEMLILGRFIIGVYCGLTTGFVPMYVGEVSPTALRGALGTLHQLGIVVGILIAQVFGLDSIMGNKDLWPLLLSIIFIPALLQCIVLPFCPESPRFLLINRNEENRAKSVLKKLRGTADVTHDLQEMKEESRQMMREKKVTILELFRSPAYRQPILIAVVLQLSQQLSGINAVFYYSTSIFEKAGVQQPVYATIGSGIVNTAFTVVSLFVVERAGRRTLHLIGLAGMAGCAILMTIALALLEQLPWMSYLSIVAIFGFVAFFEVGPGPIPWFIVAELFSQGPRPAAIAVAGFSNWTSNFIVGMCFQYVEQLCGPYVFIIFTVLLVLFFIFTYFKVPETKGRTFDEIASGFRQGGASQSDKTPEELFHPLGADSQV

SEQ ID NO: 210 - protein, 492 aa, Homo sapiens; identical to SEQ ID NO: 209

SEQ ID NO: 211 - protein, 783 aa, Homo sapiens
MPGKLRSDAGLESDTAMKKGETLRKQTEEKEKKEKPKSDKTEEIAEEEETVFPKAKQVKKKAEPSEVDMNSPKSKKAKKKEEPSQNDISPKTKSLRKKKEPIEKKVVSSKTKKVTKNEEPSEEEIDAPKPKKMKKEKEMNGETREKSPKLKNGFPHPEPDCNPSEAASEESNSEIEQEIPVEQKEGAFSNFPISEETIKLLKGRGVTFLFPIQAKTFHHVYSGKDLIAQARTGTGKTFSFAIPLIEKLHGELQDRKRGRAPQVLVLAPTRELANQVSKDFSDITKKLSVACFYGGTPYGGQFERMRNGIDILVGTPGRIKDHIQNGKLDLTKLKHVVLDEVDQMLDMGFADQVEEILSVAYKKDSEDNPQTLLFSATCPHWVFNVAKKYMKSTYEQVDLIGKKTQKTAITVEHLAIKCHWTQRAAVIGDVIRVYSGHQGRTIIFCETKKEAQELSQNSAIKQDAQSLHGDIPQKQREITLKGFRNGSFGVLVATNVAARGLDIPEVDLVIQSSPPKDVESYIHRSGRTGRAGRTGVCICFYQHKEEYQLVQVEQKAGIKFKRIGVPSATEIIKASSKDAIRLLDSVPPTAISHFKQSAEKLIEEKGAVEALAAALAHISGATSVDQRSLINSNVGFVTMILQCSIEMPNISYAWKELKEQLGEEIDSKVKGMVFLKGKLGVCFDVPTASVTEIQEKWHDSRRWQLSVATEQPELEGPREGYGGFRGQREGSRGFRGQRDGNRRFRGQREGSRGPRGQRSGGGNKSNRSQNKGQKRSFSKAFGQ

SEQ ID NO: 212 - protein, 783 aa, Homo sapiens
MPGKLRSDAGLESDTAMKKGETLRKQIEEKEKKEKPKSDKTEEIAEEEETVFPKAKQVKKKAEPSEVDMNSPKSKKAKKKEEPSQNDISPKTKSLRKKKEPIEKKVVSSKTKKVTKNEEPSEEEIDAPKPKKMKKEKEMNGETREKSPKLKNGFPHPEPDCNPSEAASEESNSEIEQEIPVEQKEGAFSNFPISEETIKLLKGRGVTFLFPIQAKTFHHVYSGKDLIAQARTGTGKTFSFAIPLIEKLHGELQDRKRGRAPQVLVLAPTRELANQVSKDFSDITKKLSVACFYGGTPYGGQFERMRNGIDILVGTPGRIKDHIQNGKLDLTKLKHVVLDEVDQMLDMGFADQVEEILSVAYKKDSEDNPQTLLFSATCPHWVFNVAKKYMKSTYEQVDLIGKKTQKTAITVEHLAIKCHWTQRAAVIGDVIRVYSGHQGRTIIFCETKKEAQELSQNSAIKQDAQSLHGDIPQKQREITLKGFRNGSFGVLVATNVAARGLDIPEVDLVIQSSPPKDVESYIHRSGRTGRAGRTGVCICFYQHKEEYQLVQVEQKAGIKFKRIGVPSATEIIKASSKDAIRLLDSVPPTAISHFKQSAEKLIEEKGAVEALAAALAHISGATSVDQRSLINSNVGFVTMILQCSIEMPNISYAWKELKEQLGEEIDSKVKGMVFLKGKLGVCFDVPTASVTEIQEKWHDSRRWQLSVATEQPELEGPREGYGGFRGQREGSRGFRGQRDGNRRFRGQREGSRGPRGQRSGGGNKSNRSQNKGQKRSFSKAFGQ

SEQ ID NO: 213 - protein, 715 aa, Homo sapiens
MNSPKSKKAKKKEEPSQNDISPKTKSLRKKKEPIEKKVVSSKTKKVTKNEEPSEEEIDAPKPKKMKKEKEMNGETREKSPKLKNGFPHPEPDCNPSEAASEESNSEIEQEIPVEQKEGAFSNFPISEETIKLLKGRGVTFLFPIQAKTFHHVYSGKDLIAQARTGTGKTFSFAIPLIEKLHGELQDRKRGRAPQVLVLAPTRELANQVSKDFSDITKKLSVACFYGGTPYGGQFERMRNGIDILVGTPGRIKDHIQNGKLDLTKLKHVVLDEVDQMLDMGFADQVEEILSVAYKKDSEDNPQTLLFSATCPHWVFNVAKKYMKSTYEQVDLIGKKTQKTAITVEHLAIKCHWTQRAAVIGDVIRVYSGHQGRTIIFCETKKEAQELSQNSAIKQDAQSLHGDIPQKQREITLKGFRNGSFGVLVATNVAARGLDIPEVDLVIQSSPPKDVESYIHRSGRTGRAGRTGVCICFYQHKEEYQLVQVEQKAGIKFKRIGVPSATEIIKASSKDAIRLLDSVPPTAISHFKQSAEKLIEEKGAVEALAAALAHISGATSVDQRSLINSNVGFVTMILQCSIEMPNISYAWKELKEQLGEEIDSKVKGMVFLKGKLGVCFDVPTASVTEIQEKWHDSRRWQLSVATEQPELEGPREGYGGFRGQREGSRGFRGQRDGNRRFRGQREGSRGPRGQRSGGGNKSNRSQNKGQKRSFSKAFGQ

SEQ ID NO: 214 - protein, 370 aa, Homo sapiens
MEPPGRRECPFPSWRFPGLLLAAMVLLLYSFSDACEEPPTFEAMELIGKPKPYYEIGERVDYKCKKGYFYIPPLATHTICDRNHTWLPVSDDACYRETCPYIRDPLNGQAVPANGTYEFGYQMHFICNEGYYLIGEEILYCELKGSVAIWSGKPPICEKVLCTPPPKIKNGKHTFSEVEVFEYLDAVTYSCDPAPGPDPFSLIGESTIYCGDNSVWSRAAPECKVVKCRFPVVENGKQISGFGKKFYYKATVMFECDKGFYLDGSDTIVCDSNSTWDPPVPKCLKVSTSSTTKSPASSASGYPKPEEGILDSLDVWVIAVIVIAIVVGVAVICVVPYRYLQRRKKKGKADGGAEYATYQTKSTTPAEQRG

SEQ ID NO: 215 - protein, 378 aa, Homo sapiens
MEPPGRRECPFPSWRFPGLLLAAMVLLLYSFSDACEEPPTFEAMELIGKPKPYYEIGERVDYKCKKGYFYIPPLATHTICDRNHTWLPVSDDACYRETCPYIRDPLNGQAVPANGTYEFGYQMHFICNEGYYLIGEEILYCELKGSVAIWSGKPPICEKVLCTPPPKIKNGKHTFSEVEVFEYLDAVTYSCDPAPGPDPFSLIGESTIYCGDNSVWSRAAPECKVVKCRFPVVENGKQISGFGKKFYYKATVMFECDKGFYLDGSDTIVCDSNSTWDPPVPKCLKVLPPSSTKPPALSHSVSTSSTTKSPASSASGYPKPEEGILDSLDVWVIAVIVIAIVVGVAVICVVPYRYLQRRKKKGTYLTDETHREVKFTSL

SEQ ID NO: 216 - protein, 363 aa, Homo sapiens
MEPPGRRECPFPSWRFPGLLLAAMVLLLYSFSDACEEPPTFEAMELIGKPKPYYEIGERVDYKCKKGYFYIPPLATHTICDRNHTWLPVSDDACYRETCPYIRDPLNGQAVPANGTYEFGYQMHFICNEGYYLIGEEILYCELKGSVAIWSGKPPICEKVLCTPPPKIKNGKHTFSEVEVFEYLDAVTYSCDPAPGPDPFSLIGESTIYCGDNSVWSRAAPECKVVKCRFPVVENGKQISGFGKKFYYKATVMFECDKGFYLDGSDTIVCDSNSTWDPPVPKCLKVSTSSTTKSPASSASGYPKPEEGILDSLDVWVIAVIVIAIVVGVAVICVVPYRYLQRRKKKGTYLTDETHREVKFTSL

SEQ ID NO: 217 - protein, 349 aa, Homo sapiens
MEPPGRRECPFPSWRFPGLLLAAMVLLLYSFSDACEEPPTFEAMELIGKPKPYYEIGERVDYKCKKGYFYIPPLATHTICDRNHTWLPVSDDACYRETCPYIRDPLNGQAVPANGTYEFGYQMHFICNEGYYLIGEEILYCELKGSVAIWSGKPPICEKVLCTPPPKIKNGKHTFSEVEVFEYLDAVTYSCDPAPGPDPFSLIGESTIYCGDNSVWSRAAPECKVVKCRFPVVENGKQISGFGKKFYYKATVMFECDKGFYLDGSDTIVCDSNSTWDPPVPKCLKGPRPTYKPPVSNYPGYPKPEEGILDSLDVWVIAVIVIAIGKQMVELNMPLTRLNQPLQQSREAE

SEQ ID NO: 218 - protein, 399 aa, Homo sapiens
MEPPGRRECPFPSWRFPGLLLAAMVLLLYSFSDACEEPPTFEAMELIGKPKPYYEIGERVDYKCKKGYFYIPPLATHTICDRNHTWLPVSDDACYRETCPYIRDPLNGQAVPANGTYEFGYQMHFICNEGYYLIGEEILYCELKGSVAIWSGKPPICEKVLCTPPPKIKNGKHTFSEVEVFEYLDAVTYSCDPAPGPDPFSLIGESTIYCGDNSVWSRAAPECKVVKCRFPVVENGKQISGFGKKFYYKATVMFECDKGFYLDGSDTIVCDSNSTWDPPVPKCLKVLPPSSTKPPALSHSVSTSSTTKSPASSASGPRPTYKPPVSNYPGYPKPEEGILDSLDVWVIAVIVIAIVVGVAVICVVPYRYLQRRKKKGKADGGAEYATYQTKSTTPAEQRG

SEQ ID NO: 219 - protein, 355 aa, Homo sapiens
MEPPGRRECPFPSWRFPGLLLAAMVLLLYSFSDACEEPPTFEAMELIGKPKPYYEIGERVDYKCKKGYFYIPPLATHTICDRNHTWLPVSDDACYRETCPYIRDPLNGQAVPANGTYEFGYQMHFICNEGYYLIGEEILYCELKGSVAIWSGKPPICEKVLCTPPPKIKNGKHTFSEVEVFEYLDAVTYSCDPAPGPDPFSLIGESTIYCGDNSVWSRAAPECKVVKCRFPVVENGKQISGFGKKFYYKATVMFECDKGFYLDGSDTIVCDSNSTWDPPVPKCLKGYPKPEEGILDSLDVWVIAVIVIAIVVGVAVICVVPYRYLQRRKKKGKADGGAEYATYQTKSTTPAEQRG

SEQ ID NO: 220 - protein, 348 aa, Homo sapiens
MEPPGRRECPFPSWRFPGLLLAAMVLLLYSFSDACEEPPTFEAMELIGKPKPYYEIGERVDYKCKKGYFYIPPLATHTICDRNHTWLPVSDDACYRETCPYIRDPLNGQAVPANGTYEFGYQMHFICNEGYYLIGEEILYCELKGSVAIWSGKPPICEKVLCTPPPKIKNGKHTFSEVEVFEYLDAVTYSCDPAPGPDPFSLIGESTIYCGDNSVWSRAAPECKVVKCRFPVVENGKQISGFGKKFYYKATVMFECDKGFYLDGSDTIVCDSNSTWDPPVPKCLKGYPKPEEGILDSLDVWVIAVIVIAIVVGVAVICVVPYRYLQRRKKKGTYLTDETHREVKFTSL

SEQ ID NO: 221 - protein, 392 aa, Homo sapiens [sequence omitted]

SEQ ID NO: 222 - protein, 399 aa, Homo sapiens; identical to SEQ ID NO: 218

SEQ ID NO: 223 - protein, 348 aa, Homo sapiens; identical to SEQ ID NO: 220

SEQ ID NO: 224 - protein, 385 aa, Homo sapiens
MEPPGRRECPFPSWRFPGLLLAAMVLLLYSFSDACEEPPTFEAMELIGKPKPYYEIGERVDYKCKKGYFYIPPLATHTICDRNHTWLPVSDDACYRETCPYIRDPLNGQAVPANGTYEFGYQMHFICNEGYYLIGEEILYCELKGSVAIWSGKPPICEKVLCTPPPKIKNGKHTFSEVEVFEYLDAVTYSCDPAPGPDPFSLIGESTIYCGDNSVWSRAAPECKVVKCRFPVVENGKQISGFGKKFYYKATVMFECDKGFYLDGSDTIVCDSNSTWDPPVPKCLKVLPPSSTKPPALSHSVSTSSTTKSPASSASGYPKPEEGILDSLDVWVIAVIVIAIVVGVAVICVVPYRYLQRRKKKGKADGGAEYATYQTKSTTPAEQRG

SEQ ID NO: 225 - protein, 392 aa, Homo sapiens [sequence omitted]

SEQ ID NO: 226 - protein, 363 aa, Homo sapiens; identical to SEQ ID NO: 216

SEQ ID NO: 227 - protein, 369 aa, Homo sapiens
MEPPGRRECPFPSWRFPGLLLAAMVLLLYSFSDACEEPPTFEAMELIGKPKPYYEIGERVDYKCKKGYFYIPPLATHTICDRNHTWLPVSDDACYRETCPYIRDPLNGQAVPANGTYEFGYQMHFICNEGYYLIGEEILYCELKGSVAIWSGKPPICEKVLCTPPPKIKNGKHTFSEVEVFEYLDAVTYSCDPAPGPDPFSLIGESTIYCGDNSVWSRAAPECKVVKCRFPVVENGKQISGFGKKFYYKATVMFECDKGFYLDGSDTIVCDSNSTWDPPVPKCLKGPRPTYKPPVSNYPGYPKPEEGILDSLDVWVIAVIVIAIVVGVAVICVVPYRYLQRRKKKGKADGGAEYATYQTKSTTPAEQRG

SEQ ID NO: 228 - protein, 378 aa, Homo sapiens; identical to SEQ ID NO: 215

SEQ ID NO: 229 - protein, 377 aa, Homo sapiens
MEPPGRRECPFPSWRFPGLLLAAMVLLLYSFSDACEEPPTFEAMELIGKPKPYYEIGERVDYKCKKGYFYIPPLATHTICDRNHTWLPVSDDACYRETCPYIRDPLNGQAVPANGTYEFGYQMHFICNEGYYLIGEEILYCELKGSVAIWSGKPPICEKVLCTPPPKIKNGKHTFSEVEVFEYLDAVTYSCDPAPGPDPFSLIGESTIYCGDNSVWSRAAPECKVVKCRFPVVENGKQISGFGKKFYYKATVMFECDKGFYLDGSDTIVCDSNSTWDPPVPKCLKVSTSSTTKSPASSASGPRPTYKPPVSNYPGYPKPEEGILDSLDVWVIAVIVIAIVVGVAVICVVPYRYLQRRKKKGTYLTDETHREVKFTSL

SEQ ID NO: 230 - protein, 362 aa, Homo sapiens
MEPPGRRECPFPSWRFPGLLLAAMVLLLYSFSDACEEPPTFEAMELIGKPKPYYEIGERVDYKCKKGYFYIPPLATHTICDRNHTWLPVSDDACYRETCPYIRDPLNGQAVPANGTYEFGYQMHFICNEGYYLIGEEILYCELKGSVAIWSGKPPICEKVLCTPPPKIKNGKHTFSEVEVFEYLDAVTYSCDPAPGPDPFSLIGESTIYCGDNSVWSRAAPECKVVKCRFPVVENGKQISGFGKKFYYKATVMFECDKGFYLDGSDTIVCDSNSTWDPPVPKCLKGPRPTYKPPVSNYPGYPKPEEGILDSLDVWVIAVIVIAIVVGVAVICVVPYRYLQRRKKKGTYLTDETHREVKFTSL

SEQ ID NO: 231 - protein, 373 aa, Homo sapiens
MEPPGRRECPFPSWRFPGLLLAAMVLLLYSFSDACEEPPTFEAMELIGKPKPYYEIGERVDYKCKKGYFYIPPLATHTICDRNHTWLPVSDDACYRETCPYIRDPLNGQAVPANGTYEFGYQMHFICNEGYYLIGEEILYCELKGSVAIWSGKPPICEKVLCTPPPKIKNGKHTFSEVEVFEYLDAVTYSCDPAPGPDPFSLIGESTIYCGDNSVWSRAAPECKVVKCRFPVVENGKQISGFGKKFYYKATVMFECDKGFYLDGSDTIVCDSNSTWDPPVPKCLKVSTSSTTKSPASSASGPRPTYKPPVSNYPGYPKPEEGILDSLDVWVIAVIVIAIDIFKGGRRKGKQMVELNMPLTRLNQPLQQSREAE

SEQ ID NO: 232 - protein, 384 aa, Homo sapiens
MEPPGRRECPFPSWRFPGLLLAAMVLLLYSFSDACEEPPTFEAMELIGKPKPYYEIGERVDYKCKKGYFYIPPLATHTICDRNHTWLPVSDDACYRETCPYIRDPLNGQAVPANGTYEFGYQMHFICNEGYYLIGEEILYCELKGSVAIWSGKPPICEKVLCTPPPKIKNGKHTFSEVEVFEYLDAVTYSCDPAPGPDPFSLIGESTIYCGDNSVWSRAAPECKVVKCRFPVVENGKQISGFGKKFYYKATVMFECDKGFYLDGSDTIVCDSNSTWDPPVPKCLKVSTSSTTKSPASSASGPRPTYKPPVSNYPGYPKPEEGILDSLDVWVIAVIVIAIVVGVAVICVVPYRYLQRRKKKGKADGGAEYATYQTKSTTPAEQRG

SEQ ID NO: 233 - protein, 355 aa, Homo sapiens; identical to SEQ ID NO: 219

SEQ ID NO: 234 - protein, 385 aa, Homo sapiens; identical to SEQ ID NO: 224

SEQ ID NO: 235 - protein, 377 aa, Homo sapiens; identical to SEQ ID NO: 229

SEQ ID NO: 236 - protein, 370 aa, Homo sapiens; identical to SEQ ID NO: 214

SEQ ID NO: 237 - protein, 373 aa, Homo sapiens; identical to SEQ ID NO: 231

SEQ ID NO: 238 - protein, 789 aa, Homo sapiens [sequence omitted]

SEQ ID NO: 239 - protein, 733 aa, Homo sapiens [sequence omitted]

SEQ ID NO: 240 - protein, 733 aa, Homo sapiens [sequence omitted]

SEQ ID NO: 241 - protein, 733 aa, Homo sapiens [sequence omitted]

SEQ ID NO: 242 - protein, 387 aa, Homo sapiens [sequence omitted]

SEQ ID NO: 243 - protein, 72 aa, Homo sapiens [sequence omitted]

SEQ ID NO: 244 - protein, 418 aa, Homo sapiens
MSVKMGKKYKNIVLLKGLEVINDYHFRMVKSLLSNDLKLNLKMREEYDKIQIADLMEEKFRGDAGLGKLIKIFEDIPTLEDLAETLKKEKLKVKGPALSRKRKKEVDATSPAPSTSSTVKTEGAEATPGAQKRKKSTKEKAGPKGSKVSEEQTQPPSPAGAGMSTAMGRSPSPKTSLSAPPNSSSTENPKTVAKCQVTPRRNVLQKRPVIVKVLSTTKPFEYETPEMEKKIMFHATVATQTQFFHVKVLNTSLKEKFTPKKIIAIANYVCRNGFLEVYPFTLVADVNADRNMEIPKGLIRSASVTPKINQLCSQTKGSFVNGVFEVHKKNVRGEFTYYEIQDNTGKMEVVVHGRLTTINCEEGDKLKLTCFELAPKSGNTGELRSVIHSHIKVIKTRKNKKDILNPDSSMETSPDFFF

SEQ ID NO: 245 - protein, 255 aa, Homo sapiens
MKALLALPLLLLLSTPPCAPQVSGIRGDALERFCLQQPLDCDDIYAQGYQSDGVYLIYPSGPSVPVPVFCDMTTEGGKWTVFQKRFNGSVSFFRGWNDYKLGFGRADGEYWLGLQNMHLLTLKQKYELRVDLEDFENNTAYAKYADFSISPNAVSAEEDGYTLFVAGFEDGGAGDSLSYHSGQKFSTFDRDQDLFVQNCAALSSGAFWFRSCHFANLNGFYLGGSHLSYANGINWAQWKGFYYSLKRTEMKIRRA

SEQ ID NO: 246 - protein, 255 aa, Homo sapiens; identical to SEQ ID NO: 245

SEQ ID NO: 247 - protein, 279 aa, Homo sapiens
MGELSPLQRPLATEGTMKAQGVLLKLALLALPLLLLLSTPPCAPQVSGIRGDALERFCLQQPLDCDDIYAQGYQSDGVYLIYPSGPSVPVPVFCDMTTEGGKWTVFQKRFNGSVSFFRGWNDYKLGFGRADGEYWLGLQNMHLLTLKQKYELRVDLEDFENNTAYAKYADFSISPNAVSAEEDGYTLFVAGFEDGGAGDSLSYHSGQKFSTFDRDQDLFVQNCAALSSGAFWFRSCHFANLNGFYLGGSHLSYANGINWAQWKGFYYSLKRTEMKIRRA

SEQ ID NO: 248 - protein, 279 aa, Homo sapiens; identical to SEQ ID NO: 247

SEQ ID NO: 249 - protein, 206 aa, Homo sapiens
PSVFLFPPKPKDTLMISRTPEVTCVVVDVSQEDPQVQFNWYVDGVQVHNAKTKPREQQFNSTYRVVSVLTVLHQNWLDGKEYKCKVSNKGLPSSIEKTISKAKGQPREPQVYTLPPSQEEMTKNQVSLTCLVKGFYPSDIAVEWESNGQPENNYKTTPPVLDSDGSFFLYSRLTVDKSRWQEGNVFSCSVMHEALHNHYTQKSLSL

SEQ ID NO: 250 - protein, 271 aa, Homo sapiens [sequence omitted]

SEQ ID NO: 251 - protein, 221 aa, Homo sapiens
MGDTKEQRILNHVLQHAEPGNAQSVLEAIDTYCEQKEWAMNVGDKKGKIVDAVIQEHQPSVLLELGAYCGYSAVRMARLLSPGARLITIEINPDCAAITQRMVDFAGVKDKVTLVVGASQDIIPQLKKKYDVDTLDMVFLDHWKDRYLPDTLLLEECGLLRKGTVLLADNVICPGAPDFLAHVRGSSCFECTHYQSFLEYREVVDGLEKAIYKGPGSEAGP

SEQ ID NO: 252 - protein, 271 aa, Homo sapiens
MPEAPPLLLAAVLLGLVLLVVLLLLLRHWGWGLCLIGWNEFILQPIHNLLMGDTKEQRILNHVLQHAEPGNAQSVLEAIDTYCEQKEWAMNVGDKKGKIVDAVIQEHQPSVLLELGAYCGYSAVRMARLLSPGARLITIEINPDCAAITQRMVDFAGVKDKVTLVVGASQDIIPQLKKKYDVDTLDMVFLDHWKDRYLPDTLLLEECGLLRKGTVLLADNVICPGAPDFLAHVRGSSCFECTHYQSFLEYREVVDGLEKAIYKGPGSEAGP

SEQ ID NO: 253 - protein, 309 aa, Homo sapiens [sequence omitted]

SEQ ID NO: 254 - protein, 215 aa, Homo sapiens
MYGKSSTRAVLLLLGIQLTALWPIAAVEIYTSRVLEAVNGTDARLKCTFSSFAPVGDALTVTWNFRPLDGGPEQFVFYYHIDPFQPMSGRFKDRVSWDGNPERYDASILLWKLQFDDNGTYTCQVKNPPDVDGVIGEIRLSVVHTVRFSEIHFLALAIGSACALMIIIVIVVVLFQHYRKKRWAERAHKVVEIKSKEEERLNQEKKVSVYLEDTD

SEQ ID NO: 255 - protein, 215 aa, Homo sapiens; identical to SEQ ID NO: 254

SEQ ID NO: 256 - protein, 215 aa, Homo sapiens; identical to SEQ ID NO: 254

SEQ ID NO: 257 - protein, 646 aa, Homo sapiens
MSKGPAVGIDLGTTYSCVGVFQHGKVEIIANDQGNRTTPSYVAFTDTERLIGDAAKNQVAMNPTNTVFDAKRLIGRRFDDAVVQSDMKHWPFMVVNDAGRPKVQVEYKGETKSFYPEEVSSMVLTKMKEIAEAYLGKTVTNAVVTVPAYFNDSQRQATKDAGTIAGLNVLRIINEPTAAAIAYGLDKKVGAERNVLIFDLGGGTFDVSILTIEDGIFEVKSTAGDTHLGGEDFDNRMVNHFIAEFKRKHKKDISENKRAVRRLRTACERAKRTLSSSTQASIEIDSLYEGIDFYTSITRARFEELNADLFRGTLDPVEKALRDAKLDKSQIHDIVLVGGSTRIPKIQKLLQDFFNGKELNKSINPDEAVAYGAAVQAAILSGDKSENVQDLLLLDVTPLSLGIETAGGVMTVLIKRNTTIPTKQTQTFTTYSDNQPGVLIQVYEGERAMTKDNNLLGKFELTGIPPAPRGVPQIEVTFDIDANGILNVSAVDKSTGKENKITITNDKGRLSKEDIERMVQEAEKYKAEDEKQRDKVSSKNSLESYAFNMKATVEDEKLQGKINDEDKQKILDKCNEIINWLDKNQTAEKEEFEHQQKELEKVCNPIITKLYQSAGGMPGGMPGGFPGGGAPPSGGASSGPTIEEVD

SEQ ID NO: 258 - protein, 979 aa, Homo sapiens [sequence omitted]

SEQ ID NO: 259 - protein, 432 aa, Homo sapiens
MSDKLPYKVADIGLAAWGRKALDIAENEMPGLMRMRERYSASKPLKGARIAGCLHMTVETAVLIETLVTLGAEVQWSSCNIFSTQDHAAAAIAKAGIPVYAWKGETDEEYLWCIEQTLYFKDGPLNMILDDGGDLTNLIHTKYPQLLPGIRGISEETTTGVHNLYKMMANGILKVPAINVNDSVTKSKFDNLYGCRESLIDGIKRATDVMIAGKVAVVAGYGDVGKGCAQALRGFGARVIITEIDPINALQAAMEGYEVTTMDEACQEGNIFVTTTGCIDIILGRHFEQMKDDAIVCNIGHFDVEIDVKWLNENAVEKVNIKPQVDRYRLKNGRRIILLAEGRLVNLGCAMGHPSFVMSNSFTNQVMAQIELWTHPDKYPVGVHFLPKKLDEAVAEAHLGKLNVKLTKLTEKQAQYLGMSCDGPFKPDHYRY

SEQ ID NO: 260 - protein, 285 aa, Homo sapiens
MSDKLPYKVADIGLAAWGRKALDIAENEMPGLMRMRERYSASKPLKGARIAGCLHMTVETAVLIETLVTLGAEVQWSSCNIFSTQDHAAAAIAKAGIPVYAWKGETDEEYLWCIEQTLYFKDGPLNMILDDGGDLTNLIHTKYPQLLPGIRGISEETTTGVHNLYKMMANGILKVPAINVNDSVTKSKFDNLYGCRESLIDGIKRATDVMIAGKVAVVAGYGDVGKGCAQALRGFGARVIITEIDPINALQAAMEGYEVTTMDEACQEGNIFVTTTGCIDIILGR

SEQ ID NO: 261 - protein, 431 aa, Homo sapiens
SDKLPYKVADIGLAAWGRKALDIAENEMPGLMRMRERYSASKPLKGARIAGCLHMTVETAVLIETLVTLGAEVQWSSCNIFSTQDHAAAAIAKAGIPVYAWKGETDEEYLWCIEQTLYFKDGPLNMILDDGGDLTNLIHTKYPQLLPGIRGISEETTTGVHNLYKMMANGILKVPAINVNDSVTKSKFDNLYGCRESLIDGIKRATDVMIAGKVAVVAGYGDVGKGCAQALRGFGARVIITEIDPINALQAAMEGYEVTTMDEACQEGNIFVTTTGCIDIILGRHFEQMKDDAIVCNIGHFDVEIDVKWLNENAVEKVNIKPQVDRYRLKNGRRIILLAEGRLVNLGCAMGHPSFVMSNSFTNQVMAQIELWTHPDKYPVGVHFLPKKLDEAVAEAHLGKLNVKLTKLTEKQAQYLGMSCDGPFKPDHYRY

SEQ ID NO: 262 - protein, 432 aa, Homo sapiens; identical to SEQ ID NO: 259

SEQ ID NO: 263 - protein, 265 aa, Homo sapiens
MLSEGDILFSSLLSSPSLFWPPGLILLFYLVFYGFLAALFSFTMWVMLQTLNDEVPKYRDQIPSPGLMVFPKPVTALEYTFSRSDPTSYAGYIEDLKKFLKPYTLEEQKNLTVCPDGALFEQKGPVYVACQFPISLLQACSGMNDPDFGYSQGNPCILVKMNRIIGLKPEGVPRIDCVSKNEDIPNVAVYPHNGMIDLKYFPYYGKKLHVGYLQPLVAVQVSFAPNNTGKEVTVECKIDGSANLKSQDDRDKFLGRVMFKITARA

SEQ ID NO: 264 - protein, 231 aa, Homo sapiens
MLSEGDILFSSLLSSPSLFWPPGLILLFYLVFYGFLAALFSFTMWVMLQTLNDEVPKYRDQIPSPGLMVFPKPVTALEYTFSRSDPTSYAGYIEDLKKFLKPYTLEEQKNLTVCPDGALFEQKGPVYVACQFPISLLQACSGMNDPDFGYSQGNPCILVKMNRIIGLKPEGVPRIDCVSKNEDIPNVAVYPHNGMIDLKYFPYYGKKLHVGYLQPLVAVQVSFAPNNTGKE

SEQ ID NO: 265 - protein, 265 aa, Homo sapiens; identical to SEQ ID NO: 263

SEQ ID NO: 266 - protein, 198 aa, Homo sapiens
MVFPKPVTALEYTFSRSDPTSYAGYIEDLKKFLKPYTLEEQKNLTVCPDGALFEQKGPVYVACQFPISLLQACSGMNDPDFGYSQGNPCILVKMNRIIGLKPEGVPRIDCVSKNEDIPNVAVYPHNGMIDLKYFPYYGKKLHVGYLQPLVAVQVSFAPNNTGKEVTVECKIDGSANLKSQDDRDKFLGRVMFKITARA

SEQ ID NO: 267 - protein, 279 aa, Homo sapiens
MTKNEKKSLNQSLAEWKLFIYNPTTGEFLGRTAKSWGLILLFYLVFYGFLAALFSFTMWVMLQTLNDEVPKYRDQIPSPGLMVFPKPVTALEYTFSRSDPTSYAGYIEDLKKFLKPYTLEEQKNLTVCPDGALFEQKGPVYVACQFPISLLQACSGMNDPDFGYSQGNPCILVKMNRIIGLKPEGVPRIDCVSKNEDIPNVAVYPHNGMIDLKYFPYYGKKLHVGYLQPLVAVQVSFAPNNTGKEVTVECKIDGSANLKSQDDRDKFLGRVMFKITARA

SEQ ID NO: 268 - protein, 265 aa, Homo sapiens; identical to SEQ ID NO: 263

SEQ ID NO: 269 - protein, 222 aa, Homo sapiens
MWVMLQTLNDEVPKYRDQIPSPGLMVFPKPVTALEYTFSRSDPTSYAGYIEDLKKFLKPYTLEEQKNLTVCPDGALFEQKGPVYVACQFPISLLQACSGMNDPDFGYSQGNPCILVKMNRIIGLKPEGVPRIDCVSKNEDIPNVAVYPHNGMIDLKYFPYYGKKLHVGYLQPLVAVQVSFAPNNTGKEVTVECKIDGSANLKSQDDRDKFLGRVMFKITARA

SEQ ID NO: 270 - protein, 2421 aa, Homo sapiens [sequence omitted]

SEQ ID NO: 271 - protein, 2176 aa, Homo sapiens
MLRGPGPGLLLLAVQCLGTAVPSTGASKSKRQAQQMVQPQSPVAVSQSKPGCYDNGKHYQINQQWERTYLGNALVCTCYGGSRGFNCESKPEAEETCFDKYTGNTYRVGDTYERPKDSMIWDCTCIGAGRGRISCTIANRCHEGGQSYKIGDTWRRPHETGGYMLECVCLGNGKGEWTCKPIAEKCFDHAAGTSYVVGETWEKPYQGWMMVDCTCLGEGSGRITCTSRNRCNDQDTRTSYRIGDTWSKKDNRGNLLQCICTGNGRGEWKCERHTSVQTTSSGSGPFTDVRAAVYQPQPHPQPPPYGHCVTDSGVVYSVGMQWLKTQGNKQMLCTCLGNGVSCQETAVTQTYGGNSNGEPCVLPFTYNGRTFYSCTTEGRQDGHLWCSTTSNYEQDQKYSFCTDHTVLVQTRGGNSNGALCHFPFLYNNHNYTDCTSEGRRDNMKWCGTTQNYDADQKFGFCPMAAHEEICTTNEGVMYRIGDQWDKQHDMGHMMRCTCVGNGRGEWTCIAYSQLRDQCIVDDITYNVNDTFHKRHEEGHMLNCTCFGQGRGRWKCDPVDQCQDSETGTFYQIGDSWEKYVHGVRYQCYCYGRGIGEWHCQPLQTYPSSSGPVEVFITETPSQPNSHPIQWNAPQPSHISKYILRWRPKNSVGRWKEATIPGHLNSYTIKGLKPGVVYEGQLISIQQYGHQEVTRFDFTTTSTSTPVTSNTVTGETTPFSPLVATSESVTEITASSFVVSWVSASDTVSGFRVEYELSEEGDEPQYLDLPSTATSVNIPDLLPGRKYIVNVYQISEDGEQSLILSTSQTTAPDAPPDPTVDQVDDTSIVVRWSRPQAPITGYRIVYSPSVEGSSTELNLPETANSVTLSDLQPGVQYNITIYAVEENQESTPVVIQQETTGTPRSDTVPSPRDLQFVEVTDVKVTIMWTPPESAVTGYRVDVIPVNLPGEHGQRLPISRNTFAEVTGLSPGVTYYFKVFAVSHGRESKPLTAQQTTKLDAPTNLQFVNETDSTVLVRWTPPRAQITGYRLTVGLTRRGQPRQYNVGPSVSKYPLRNLQPASEYTVSLVAIKGNQESPKATGVFTTLQPGSSIPPYNTEVTETTIVITWTPAPRIGFKLGVRPSQGGEAPREVTSDSGSIVVSGLTPGVEYVYTIQVLRDGQERDAPIVNKVVTPLSPPTNLHLEANPDTGVLTVSWERSTTPDITGYRITTTPTNGQQGNSLEEVVHADQSSCTFDNLSPGLEYNVSVYTVKDDKESVPISDTIIPAVPPPTDLRFTNIGPDTMRVTWAPPPSIDLTNFLVRYSPVKNEEDVAELSISPSDNAVVLTNLLPGTEYVVSVSSVYEQHESTPLRGRQKTGLDSPTGIDFSDITANSFTVHWIAPRATITGYRIRHHPEHFSGRPREDRVPHSRNSITLTNLTPGTEYVVSIVALNGREESPLLIGQQSTVSDVPRDLEVVAATPTSLLISWDAPAVTVRYYRITYGETGGNSPVQEFTVPGSKSTATISGLKPGVDYTITVYAVTGRGDSPASSKPISINYRTEIDKPSQMQVTDVQDNSISVKWLPSSSPVTGYRVTTTPKNGPGPTKTKTAGPDQTEMTIEGLQPTVEYVVSVYAQNPSGESQPLVQTAVTTIPAPTDLKFTQVTPTSLSAQWTPPNVQLTGYRVRVTPKEKTGPMKEINLAPDSSSVVVSGLMVATKYEVSVYALKDTLTSRPAQGVVTTLENVSPPRRARVTDATETTITISWRTKTETITGFQVDAVPANGQTPIQRTIKPDVRSYTITGLQPGTDYKIYLYTLNDNARSSPVVIDASTAIDAPSNLRFLATTPNSLLVSWQPPRARITGYIIKYEKPGSPPREVVPRPRPGVTEATITGLEPGTEYTIYVIALKNNQKSEPLIGRKKTGQEALSQTTISWAPFQDTSEYIISCHPVGTDEEPLQFRVPGTSTSATLTGLTRGATYNIIVEALKDQQRHKVREEVVTVGNSVNEGLNQPTDDSCFDPYTVSHYAVGDEWERMSESGFKLLCQCLGFGSGHFRCDSSRWCHDNGVNYKIGEKWDRQGENGQMMSCTCLGNGKGEFKCDPHEATCYDDGKTYHVGEQWQKEYLGAICSCTCFGGQRGWRCDNCRRPGGEPSPEGTTGQSYNQYSQRYHQRTNTNVNCPIECFMPLDVQADREDSRE

SEQ ID NO: 272 - protein, 2421 aa, Homo sapiens
MLRGPGPGLLLLAVQCLGTAVPSTGASKSKRQAQQMVQPQSPVAVSQSKPGCYDNGKHYQINQQWERTYLGNALVCTCYGGSRGFNCESKPEAEETCFDKYTGNTYRVGDTYERPKDSMIWDCTCIGAGRGRISCTIANRCHEGGQSYKIGDTWRRPHETGGYMLECVCLGNGKGEWTCKPIAEKCFDHAAGTSYVVGETWEKPYQGWMMVDCTCLGEGSGRITCTSRNRCNDQDTRTSYRIGDTWSKKDNRGNLLQCICTGNGRGEWKCERHTSVQTTSSGSGPFTDVRAAVYQPQPHPQPPPYGHCVTDSGVVYSVGMQWLKTQGNKQMLCTCLGNGVSCQETAVTQTYGGNSNGEPCVLPFTYNGRTFYSCTTEGRQDGHLWCSTTSNYEQDQKYSFCTDHTVLVQTRGGNSNGALCHFPFLYNNHNYTDCTSEGRRDNMKWCGTTQNYDADQKFGFCPMAAHEEICTTNEGVMYRIGDQWDKQHDMGHMMRCTCVGNGRGEWTCIAYSQLRDQCIVDDITYNVNDTFHKRHEEGHMLNCTCFGQGRGRWKCDPVDQCQDSETGTFYQIGDSWEKYVHGVRYQCYCYGRGIGEWHCQPLQTYPSSSGPVEVFITETPSQPNSHPIQWNAPQPSHISKYILRWRPKNSVGRWKEATIPGHLNSYTIKGLKPGVVYEGQLISIQQYGHQEVTRFDFTTTSTSTPVTSNTVTGETTPFSPLVATSESVTEITASSFVVSWVSASDTVSGFRVEYELSEEGDEPQYLDLPSTATSVNIPDLLPGRKYIVNVYQISEDGEQSLILSTSQTTAPDAPPDPTVDQVDDTSIVVRWSRPQAPITGYRIVYSPSVEGSSTELNLPETANSVTLSDLQPGVQYNITIYAVEENQESTPVVIQQETTGTPRSDTVPSPRDLQFVEVTDVKVTIMWTPPESAVTGYRVDVIPVNLPGEHGQRLPISRNTFAEVTGLSPGVTYYFKVFAVSHGRESKPLTAQQTTKLDAPTNLQFVNETDSTVLVRWTPPRAQITGYRLTVGLTRRGQPRQYNVGPSVSKYPLRNLQPASEYTVSLVAIKGNQESPKATGVFTTLQPGSSIPPYNTEVTETTIVITWTPAPRIGFKLGVRPSQGGEAPREVTSDSGSIVVSGLTPGVEYVYTIQVLRDGQERDAPIVNKVVTPLSPPTNLHLEANPDTGVLTVSWERSTTPDITGYRITTTPTNGQQGNSLEEVVHADQSSCTFDNLSPGLEYNVSVYTVKDDKESVPISDTIIPEVPQLTDLSFVDITDSSIGLRWTPLNSSTIIGYRITVVAAGEGIPIFEDFVDSSVGYYTVTGLEPGIDYDISVITLINGGESAPTTLTQQTAVPPPTDLRFTNIGPDTMRVTWAPPPSIDLTNFLVRYSPVKNEEDVAELSISPSDNAVVLTNLLPGTEYVVSVSSVYEQHESTPLRGRQKTGLDSPTGIDFSDITANSFTVHWIAPRATITGYRIRHHPEHFSGRPREDRVPHSRNSITLTNLTPGTEYVVSIVALNGREESPLLIGQQSTVSDVPRDLEVVAATPTSLLISWDAPAVTVRYYRITYGETGGNSPVQEFTVPGSKSTATISGLKPGVDYTITVYAVTGRGDSPASSKPISINYRTEIDKPSQMQVTDVQDNSISVKWLPSSSPVTGYRVTTTPKNGPGPTKTKTAGPDQTEMTIEGLQPTVEYVVSVYAQNPSGESQPLVQTAVTNIDRPKGLAFTDVDVDSIKIAWESPQGQVSRYRVTYSSPEDGIHELFPAPDGEEDTAELQGLRPGSEYTVSVVALHDDMESQPLIGTQSTAIPAPTDLKFTQVTPTSLSAQWTPPNVQLTGYRVRVTPKEKTGPMKEINLAPDSSSVVVSGLMVATKYEVSVYALKDTLTSRPAQGVVTTLENVSPPRRARVTDATETTITISWRTKTETITGFQVDAVPANGQTPIQRTIKPDVRSYTITGLQPGTDYKIYLYTLNDNARSSPVVIDASTAIDAPSNLRFLATTPNSLLVSWQPPRARITGYIIKYEKPGSPPREVVPRPRPGVTEATITGLEPGTEYTIYVIALKNNQKSEPLIGRKKTVQKTPFVTHPGYDTGNGIQLPGTSGQQPSVGQQMIFEEHGFRRTTPPTTATPIRHRPRPYPPNVGQEALSQTTISWAPFQDTSEYIISCHPVGTDEEPLQFRVPGTSTSATLTGLTRGATYNIIVEALKDQQRHKVREEVVTVGNSVNEGLNQPTDDSCFDPYTVSHYAVGDEWERMSESGFKLLCQCLGFGSGHFRCDSSRWCHDNGVNYKIGEKWDRQGENGQMMSCTCLGNGKGEFKCDPHEATCYDDGKTYHVGEQWQKEYLGAICSCTCFGGQRGWRCDNCRRPGGEPSPEGTTGQSYNQYSQRYHQRTNTNVNCPIECFMPLDVQADREDSRE

SEQ ID NO: 273 - protein, 2477 aa, Homo sapiens [sequence omitted]

SEQ ID NO: 274 - protein, 727 aa, Homo sapiens
MLRGPGPGLLLLAVLCLGTAVPSTGASKSKRQAQQMVQPQSPVAVSQSKPGCYDNGKHYQINQQWERTYLGNALVCTCYGGSRGFNCESKPEAEETCFDKYTGNTYRVGDTYERPKDSMIWDCTCIGAGRGRISCTIANRCHEGGQSYKIGDTWRRPHETGGYMLECVCLGNGKGEWTCKPIAEKCFDHAAGTSYVVGETWEKPYQGWMMVDCTCLGEGSGRITCTSRNRCNDQDTRTSYRIGDTWSKKDNRGNLLQCICTGNGRGEWKCERHTSVQTTSSGSGPFTDVRAAVYQPQPHPQPPPYGHCVTDSGVVYSVGMQWLKTQGNKQMLCTCLGNGVSCQETAVTQTYGGNSNGEPCVLPFTYNGRTFYSCTTEGRQDGHLWCSTTSNYEQDQKYSFCTDHTVLVQTRGGNSNGALCHFPFLYNNHNYTDCTSEGRRDNMKWCGTTQNYDADQKFGFCPMAAHEEICTTNEGVMYRIGDQWDKQHDMGHMMRCTCVGNGRGEWTCIAYSQLRDQCIVDDITYNVNDTFHKRHEEGHMLNCTCFGQGRGRWKCDPVDQCQDSETGTFYQIGDSWEKYVHGVRYQCYCYGRGIGEWHCQPLQTYPSSSGPVEVFITETPSQPNSHPIQWNAPQPSHISKYILRWRPKNSVGRWKEATIPGHLNSYTIKGLKPGVVYEGQLISIQQYGHQEVTRFDFTTTSTSTPVTSMYTTTLMPPTPEVPRARLS

SEQ ID NO: 275 - protein, 2386 aa, Homo sapiens [sequence omitted]

SEQ ID NO: 276 - protein, 657 aa, Homo sapiens [sequence omitted]

SEQ ID NO: 277 - protein, 2330 aa, Homo sapiens
MLRGPGPGLLLLAVQCLGTAVPSTGASKSKRQAQQMVQPQSPVAVSQSKPGCYDNGKHYQINQQWERTYLGNALVCTCYGGSRGFNCESKPEAEETCFDKYTGNTYRVGDTYERPKDSMIWDCTCIGAGRGRISCTIANRCHEGGQSYKIGDTWRRPHETGGYMLECVCLGNGKGEWTCKPIAEKCFDHAAGTSYVVGETWEKPYQGWMMVDCTCLGEGSGRITCTSRNRCNDQDTRTSYRIGDTWSKKDNRGNLLQCICTGNGRGEWKCERHTSVQTTSSGSGPFTDVRAAVYQPQPHPQPPPYGHCVTDSGVVYSVGMQWLKTQGNKQMLCTCLGNGVSCQETAVTQTYGGNSNGEPCVLPFTYNGRTFYSCTTEGRQDGHLWCSTTSNYEQDQKYSFCTDHTVLVQTRGGNSNGALCHFPFLYNNHNYTDCTSEGRRDNMKWCGTTQNYDADQKFGFCPMAAHEEICTTNEGVMYRIGDQWDKQHDMGHMMRCTCVGNGRGEWTCIAYSQLRDQCIVDDITYNVNDTFHKRHEEGHMLNCTCFGQGRGRWKCDPVDQCQDSETGTFYQIGDSWEKYVHGVRYQCYCYGRGIGEWHCQPLQTYPSSSGPVEVFITETPSQPNSHPIQWNAPQPSHISKYILRWRPKNSVGRWKEATIPGHLNSYTIKGLKPGVVYEGQLISIQQYGHQEVTRFDFTTTSTSTPVTSNTVTGETTPFSPLVATSESVTEITASSFVVSWVSASDTVSGFRVEYELSEEGDEPQYLDLPSTATSVNIPDLLPGRKYIVNVYQISEDGEQSLILSTSQTTAPDAPPDPTVDQVDDTSIVVRWSRPQAPITGYRIVYSPSVEGSSTELNLPETANSVTLSDLQPGVQYNITIYAVEENQESTPVVIQQETTGTPRSDTVPSPRDLQFVEVTDVKVTIMWTPPESAVTGYRVDVIPVNLPGEHGQRLPISRNTFAEVTGLSPGVTYYFKVFAVSHGRESKPLTAQQTTKLDAPTNLQFVNETDSTVLVRWTPPRAQITGYRLTVGLTRRGQPRQYNVGPSVSKYPLRNLQPASEYTVSLVAIKGNQESPKATGVFTTLQPGSSIPPYNTEVTETTIVITWTPAPRIGFKLGVRPSQGGEAPREVTSDSGSIVVSGLTPGVEYVYTIQVLRDGQERDAPIVNKVVTPLSPPTNLHLEANPDTGVLTVSWERSTTPDITGYRITTTPTNGQQGNSLEEVVHADQSSCTFDNLSPGLEYNVSVYTVKDDKESVPISDTIIPAVPPPTDLRFTNIGPDTMRVTWAPPPSIDLTNFLVRYSPVKNEEDVAELSISPSDNAVVLTNLLPGTEYVVSVSSVYEQHESTPLRGRQKTGLDSPTGIDFSDITANSFTVHWIAPRATITGYRIRHHPEHFSGRPREDRVPHSRNSITLTNLTPGTEYVVSIVALNGREESPLLIGQQSTVSDVPRDLEVVAATPTSLLISWDAPAVTVRYYRITYGETGGNSPVQEFTVPGSKSTATISGLKPGVDYTITVYAVTGRGDSPASSKPISINYRTEIDKPSQMQVTDVQDNSISVKWLPSSSPVTGYRVTTTPKNGPGPTKTKTAGPDQTEMTIEGLQPTVEYVVSVYAQNPSGESQPLVQTAVTNIDRPKGLAFTDVDVDSIKIAWESPQGQVSRYRVTYSSPEDGIHELFPAPDGEEDTAELQGLRPGSEYTVSVVALHDDMESQPLIGTQSTAIPAPTDLKFTQVTPTSLSAQWTPPNVQLTGYRVRVTPKEKTGPMKEINLAPDSSSVVVSGLMVATKYEVSVYALKDTLTSRPAQGVVTTLENVSPPRRARVTDATETTITISWRTKTETITGFQVDAVPANGQTPIQRTIKPDVRSYTITGLQPGTDYKIYLYTLNDNARSSPVVIDASTAIDAPSNLRFLATTPNSLLVSWQPPRARITGYIIKYEKPGSPPREVVPRPRPGVTEATITGLEPGTEYTIYVIALKNNQKSEPLIGRKKTVQKTPFVTHPGYDTGNGIQLPGTSGQQPSVGQQMIFEEHGFRRTTPPTTATPIRHRPRPYPPNVGQEALSQTTISWAPFQDTSEYIISCHPVGTDEEPLQFRVPGTSTSATLTGLTRGATYNIIVEALKDQQRHKVREEVVTVGNSVNEGLNQPTDDSCFDPYTVSHYAVGDEWERMSESGFKLLCQCLGFGSGHFRCDSSRWCHDNGVNYKIGEKWDRQGENGQMMSCTCLGNGKGEFKCDPHEATCYDDGKTYHVGEQWQKEYLGAICSCTCFGGQRGWRCDNCRRPGGEPSPEGTTGQSYNQYSQRYHQRTNTNVNCPIECFMPLDVQADREDSRE

SEQ ID NO: 278 - protein, 642 aa, Homo sapiens [sequence omitted]

SEQ ID NO: 279 - protein, 984 aa, Homo sapiens [sequence omitted]

SEQ ID NO: 280 - protein, 2477 aa, Homo sapiens
MLRGPGPGLLLLAVQCLGTAVPSTGASKSKRQAQQMVQPQSPVAVSQSKPGCYDNGKHYQINQQWERTYLGNALVCTCYGGSRGFNCESKPEAEETCFDKYTGNTYRVGDTYERPKDSMIWDCTCIGAGRGRISCTIANRCHEGGQSYKIGDTWRRPHETGGYMLECVCLGNGKGEWTCKPIAEKCFDHAAGTSYVVGETWEKPYQGWMMVDCTCLGEGSGRITCTSRNRCNDQDTRTSYRIGDTWSKKDNRGNLLQCICTGNGRGEWKCERHTSVQTTSSGSGPFTDVRAAVYQPQPHPQPPPYGHCVTDSGVVYSVGMQWLKTQGNKQMLCTCLGNGVSCQETAVTQTYGGNSNGEPCVLPFTYNGRTFYSCTTEGRQDGHLWCSTTSNYEQDQKYSFCTDHTVLVQTRGGNSNGALCHFPFLYNNHNYTDCTSEGRRDNMKWCGTTQNYDADQKFGFCPMAAHEEICTTNEGVMYRIGDQWDKQHDMGHMMRCTCVGNGRGEWTCIAYSQLRDQCIVDDITYNVNDTFHKRHEEGHMLNCTCFGQGRGRWKCDPVDQCQDSETGTFYQIGDSWEKYVHGVRYQCYCYGRGIGEWHCQPLQTYPSSSGPVEVFITETPSQPNSHPIQWNAPQPSHISKYILRWRPKNSVGRWKEATIPGHLNSYTIKGLKPGVVYEGQLISIQQYGHQEVTRFDFTTTSTSTPVTSNTVTGETTPFSPLVATSESVTEITASSFVVSWVSASDTVSGFRVEYELSEEGDEPQYLDLPSTATSVNIPDLLPGRKYIVNVYQISEDGEQSLILSTSQTTAPDAPPDPTVDQVDDTSIVVRWSRPQAPITGYRIVYSPSVEGSSTELNLPETANSVTLSDLQPGVQYNITIYAVEENQESTPVVIQQETTGTPRSDTVPSPRDLQFVEVTDVKVTIMWTPPESAVTGYRVDVIPVNLPGEHGQRLPISRNTFAEVTGLSPGVTYYFKVFAVSHGRESKPLTAQQTTKLDAPTNLQFVNETDSTVLVRWTPPRAQITGYRLTVGLTRRGQPRQYNVGPSVSKYPLRNLQPASEYTVSLVAIKGNQESPKATGVFTTLQPGSSIPPYNTEVTETTIVITWTPAPRIGFKLGVRPSQGGEAPREVTSDSGSIVVSGLTPGVEYVYTIQVLRDGQERDAPIVNKVVTPLSPPTNLHLEANPDTGVLTVSWERSTTPDITGYRITTTPTNGQQGNSLEEVVHADQSSCTFDNLSPGLEYNVSVYTVKDDKESVPISDTIIPEVPQLTDLSFVDITDSSIGLRWTPLNSSTIIGYRITVVAAGEGIPIFEDFVDSSVGYYTVTGLEPGIDYDISVITLINGGESAPTTLTQQTAVPPPTDLRFTNIGPDTMRVTWAPPPSIDLTNFLVRYSPVKNEEDVAELSISPSDNAVVLTNLLPGTEYVVSVSSVYEQHESTPLRGRQKTGLDSPTGIDFSDITANSFTVHWIAPRATITGYRIRHHPEHFSGRPREDRVPHSRNSITLTNLTPGTEYVVSIVALNGREESPLLIGQQSTVSDVPRDLEVVAATPTSLLISWDAPAVTVRYYRITYGETGGNSPVQEFTVPGSKSTATISGLKPGVDYTITVYAVTGRGDSPASSKPISINYRTEIDKPSQMQVTDVQDNSISVKWLPSSSPVTGYRVTTTPKNGPGPTKTKTAGPDQTEMTIEGLQPTVEYVVSVYAQNPSGESQPLVQTAVTNIDRPKGLAFTDVDVDSIKIAWESPQGQVSRYRVTYSSPEDGIHELFPAPDGEEDTAELQGLRPGSEYTVSVVALHDDMESQPLIGTQSTAIPAPTDLKFTQVTPTSLSAQWTPPNVQLTGYRVRVTPKEKTGPMKEINLAPDSSSVVVSGLMVATKYEVSVYALKDTLTSRPAQGVVTTLENVSPPRRARVTDATETTITISWRTKTETITGFQVDAVPANGQTPIQRTIKPDVRSYTITGLQPGTDYKIYLYTLNDNARSSPVVIDASTAIDAPSNLRFLATTPNSLLVSWQPPRARITGYIIKYEKPGSPPREVVPRPRPGVTEATITGLEPGTEYTIYVIALKNNQKSEPLIGRKKTDELPQLVTLPHPNLHGPEILDVPSTVQKTPFVTHPGYDTGNGIQLPGTSGQQPSVGQQMIFEEHGFRRTTPPTTATPIRHRPRPYPPNVGEEIQIGHIPREDVDYHLYPHGPGLNPNASTGQEALSQTTISWAPFQDTSEYIISCHPVGTDEEPLQFRVPGTSTSATLTGLTRGATYNIIVEALKDQQRHKVREEVVTVGNSVNEGLNQPTDDSCFDPYTVSHYAVGDEWERMSESGFKLLCQCLGFGSGHFRCDSSRWCHDNGVNYKIGEKWDRQGENGQMMSCTCLGNGKGEFKCDPHEATCYDDGKTYHVGEQWQKEYLGAICSCTCFGGQRGWRCDNCRRPGGEPSPEGTTGQSYNQYSQRYHQRTNTNVNCPIECFMPLDVQADREDSRE

SEQ ID NO: 281 - protein, 2355 aa, Homo sapiens [sequence omitted]

SEQ ID NO: 282 - protein, 843 aa, Homo sapiens
MLRGPGPGLLLLAVLCLGTAVPSTGASKSKRQAQQMVQPQSPVAVSQSKPGCYDNGKHYQINQQWERTYLGNALVCTCYGGSRGFNCESKPEAEETCFDKYTGNTYRVGDTYERPKDSMIWDCTCIGAGRGRISCTIANRCHEGGQSYKIGDTWRRPHETGGYMLECVCLGNGKGEWTCKPIAEKCFDHAAGTSYVVGETWEKPYQGWMMVDCTCLGEGSGRITCTSRNRCNDQDTRTSYRIGDTWSKKDNRGNLLQCICTGNGRGEWKCERHTSVQTTSSGSGPFTDVRAAVYQPQPHPQPPPYGHCVTDSGVVYSVGMQWLKTQGNKQMLCTCLGNGVSCQETAVTQTYGGNSNGEPCVLPFTYNGRTFYSCTTEGRQDGHLWCSTTSNYEQDQKYSFCTDHTVLVQTRGGNSNGALCHFPFLYNNHNYTDCTSEGRRDNMKWCGTTQNYDADQKFGFCPMAAHEEICTTNEGVMYRIGDQWDKQHDMGHMMRCTCVGNGRGEWTCIAYSQLRDQCIVDDITYNVNDTFHKRHEEGHMLNCTCFGQGRGRWKCDPVDQCQDSETGTFYQIGDSWEKYVHGVRYQCYCYGRGIGEWHCQPLQTYPSSSGPVEVFITETPSQPNSHPIQWNAPQPSHISKYILRWRPKNSVGRWKEATIPGHLNSYTIKGLKPGVVYEGQLISIQQYGHQEVTRFDFTTTSTSTPVTSNTVTGETTPFSPLVATSESVTEITASSFVVSWVSASDTVSGFRVEYELSEEGDEPQYLDLPSTATSVNIPDLLPGRKYIVNVYQISEDGEQSLILSTSQTTAPDAPPDPTVDQVDDTSIVVRWSRPQAPITGQLK

SEQ ID NO: 283 - protein, 2446 aa, Homo sapiens [sequence omitted]

SEQ ID NO: 284 - protein, 2330 aa, Homo sapiens [sequence omitted]

SEQ ID NO: 285 - protein, 843 aa, Homo sapiens; identical to SEQ ID NO: 282

SEQ ID NO: 286 - protein, 657 aa, Homo sapiens
MLRGPGPGLLLLAVQCLGTAVPSTGASKSKRQAQQMVQPQSPVAVSQSKPGCYDNGKHYQINQQWERTYLGNALVCTCYGGSRGFNCESKPEAEETCFDKYTGNTYRVGDTYERPKDSMIWDCTCIGAGRGRISCTIANRCHEGGQSYKIGDTWRRPHETGGYMLECVCLGNGKGEWTCKPIAEKCFDHAAGTSYVVGETWEKPYQGWMMVDCTCLGEGSGRITCTSRNRCNDQDTRTSYRIGDTWSKKDNRGNLLQCICTGNGRGEWKCERHTSVQTTSSGSGPFTDVRAAVYQPQPHPQPPPYGHCVTDSGVVYSVGMQWLKTQGNKQMLCTCLGNGVSCQETAVTQTYGGNSNGEPCVLPFTYNGRTFYSCTTEGRQDGHLWCSTTSNYEQDQKYSFCTDHTVLVQTRGGNSNGALCHFPFLYNNHNYTDCTSEGRRDNMKWCGTTQNYDADQKFGFCPMAAHEEICTTNEGVMYRIGDQWDKQHDMGHMMRCTCVGNGRGEWTCIAYSQLRDQCIVDDITYNVNDTFHKRHEEGHMLNCTCFGQGRGRWKCDPVDQCQDSETGTFYQIGDSWEKYVHGVRYQCYCYGRGIGEWHCQPLQTYPSSSGPVEVFITETPSQPNSHPIQWNAPQPSHISKYILRWRPVSIPPRNLGY

SEQ ID NO: 287 - protein, 984 aa, Homo sapiens [sequence omitted]

SEQ ID NO: 288 - protein, 2296 aa, Homo sapiens [sequence omitted]

SEQ ID NO: 289 - protein, 2296 aa, Homo sapiens
MLRGPGPGLLLLAVQCLGTAVPSTGASKSKRQAQQMVQPQSPVAVSQSKPGCYDNGKHYQINQQWERTYLGNALVCTCYGGSRGFNCESKPEAEETCFDKYTGNTYRVGDTYERPKDSMIWDCTCIGAGRGRISCTIANRCHEGGQSYKIGDTWRRPHETGGYMLECVCLGNGKGEWTCKPIAEKCFDHAAGTSYVVGETWEKPYQGWMMVDCTCLGEGSGRITCTSRNRCNDQDTRTSYRIGDTWSKKDNRGNLLQCICTGNGRGEWKCERHTSVQTTSSGSGPFTDVRAAVYQPQPHPQPPPYGHCVTDSGVVYSVGMQWLKTQGNKQMLCTCLGNGVSCQETAVTQTYGGNSNGEPCVLPFTYNGRTFYSCTTEGRQDGHLWCSTTSNYEQDQKYSFCTDHTVLVQTRGGNSNGALCHFPFLYNNHNYTDCTSEGRRDNMKWCGTTQNYDADQKFGFCPMAAHEEICTTNEGVMYRIGDQWDKQHDMGHMMRCTCVGNGRGEWTCIAYSQLRDQCIVDDITYNVNDTFHKRHEEGHMLNCTCFGQGRGRWKCDPVDQCQDSETGTFYQIGDSWEKYVHGVRYQCYCYGRGIGEWHCQPLQTYPSSSGPVEVFITETPSQPNSHPIQWNAPQPSHISKYILRWRPKNSVGRWKEATIPGHLNSYTIKGLKPGVVYEGQLISIQQYGHQEVTRFDFTTTSTSTPVTSNTVTGETTPFSPLVATSESVTEITASSFVVSWVSASDTVSGFRVEYELSEEGDEPQYLDLPSTATSVNIPDLLPGRKYIVNVYQISEDGEQSLILSTSQTTAPDAPPDPTVDQVDDTSIVVRWSRPQAPITGYRIVYSPSVEGSSTELNLPETANSVTLSDLQPGVQYNITIYAVEENQESTPVVIQQETTGTPRSDTVPSPRDLQFVEVTDVKVTIMWTPPESAVTGYRVDVIPVNLPGEHGQRLPISRNTFAEVTGLSPGVTYYFKVFAVSHGRESKPLTAQQTTKLDAPTNLQFVNETDSTVLVRWTPPRAQITGYRLTVGLTRRGQPRQYNVGPSVSKYPLRNLQPASEYTVSLVAIKGNQESPKATGVFTTLQPGSSIPPYNTEVTETTIVITWTPAPRIGFKLGVRPSQGGEAPREVTSDSGSIVVSGLTPGVEYVYTIQVLRDGQERDAPIVNKVVTPLSPPTNLHLEANPDTGVLTVSWERSTTPDITGYRITTTPTNGQQGNSLEEVVHADQSSCTFDNLSPGLEYNVSVYTVKDDKESVPISDTIIPAVPPPTDLRFTNIGPDTMRVTWAPPPSIDLTNFLVRYSPVKNEEDVAELSISPSDNAVVLTNLLPGTEYVVSVSSVYEQHESTPLRGRQKTGLDSPTGIDFSDITANSFTVHWIAPRATITGYRIRHHPEHFSGRPREDRVPHSRNSITLTNLTPGTEYVVSIVALNGREESPLLIGQQSTVSDVPRDLEVVAATPTSLLISWDAPAVTVRYYRITYGETGGNSPVQEFTVPGSKSTATISGLKPGVDYTITVYAVTGRGDSPASSKPISINYRTEIDKPSQMQVTDVQDNSISVKWLPSSSPVTGYRVTTTPKNGPGPTKTKTAGPDQTEMTIEGLQPTVEYVVSVYAQNPSGESQPLVQTAVTTIPAPTDLKFTQVTPTSLSAQWTPPNVQLTGYRVRVTPKEKTGPMKEINLAPDSSSVVVSGLMVATKYEVSVYALKDTLTSRPAQGVVTTLENVSPPRRARVTDATETTITISWRTKTETITGFQVDAVPANGQTPIQRTIKPDVRSYTITGLQPGTDYKIYLYTLNDNARSSPVVIDASTAIDAPSNLRFLATTPNSLLVSWQPPRARITGYIIKYEKPGSPPREVVPRPRPGVTEATITGLEPGTEYTIYVIALKNNQKSEPLIGRKKTDELPQLVTLPHPNLHGPEILDVPSTVQKTPFVTHPGYDTGNGIQLPGTSGQQPSVGQQMIFEEHGFRRTTPPTTATPIRHRPRPYPPNVGEEIQIGHIPREDVDYHLYPHGPGLNPNASTGQEALSQTTISWAPFQDTSEYIISCHPVGTDEEPLQFRVPGTSTSATLTGLTRGATYNIIVEALKDQQRHKVREEVVTVGNSVNEGLNQPTDDSCFDPYTVSHYAVGDEWERMSESGFKLLCQCLGFGSGHFRCDSSRWCHDNGVNYKIGEKWDRQGENGQMMSCTCLGNGKGEFKCDPHEATCYDDGKTYHVGEQWQKEYLGAICSCTCFGGQRGWRCDNCRRPGGEPSPEGTTGQSYNQYSQRYHQRTNTNVNCPIECFMPLDVQADREDSRE

SEQ ID NO: 290 - protein, 2386 aa, Homo sapiens
MLRGPGPGLLLLAVQCLGTAVPSTGASKSKRQAQQMVQPQSPVAVSQSKPGCYDNGKHYQINQQWERTYLGNALVCTCYGGSRGFNCESKPEAEETCFDKYTGNTYRVGDTYERPKDSMIWDCTCIGAGRGRISCTIANRCHEGGQSYKIGDTWRRPHETGGYMLECVCLGNGKGEWTCKPIAEKCFDHAAGTSYVVGETWEKPYQGWMMVDCTCLGEGSGRITCTSRNRCNDQDTRTSYRIGDTWSKKDNRGNLLQCICTGNGRGEWKCERHTSVQTTSSGSGPFTDVRAAVYQPQPHPQPPPYGHCVTDSGVVYSVGMQWLKTQGNKQMLCTCLGNGVSCQETAVTQTYGGNSNGEPCVLPFTYNGRTFYSCTTEGRQDGHLWCSTTSNYEQDQKYSFCTDHTVLVQTQGGNSNGALCHFPFLYNNHNYTDCTSEGRRDNMKWCGTTQNYDADQKFGFCPMAAHEEICTTNEGVMYRIGDQWDKQHDMGHMMRCTCVGNGRGEWTCIAYSQLRDQCIVDDITYNVNDTFHKRHEEGHMLNCTCFGQGRGRWKCDPVDQCQDSETGTFYQIGDSWEKYVHGVRYQCYCYGRGIGEWHCQPLQTYPSSSGPVEVFITETPSQPNSHPIQWNAPQPSHISKYILRWRPKNSVGRWKEATIPGHLNSYTIKGLKPGVVYEGQLISIQQYGHQEVTRFDFTTTSTSTPVTSNTVTGETTPFSPLVATSESVTEITASSFVVSWVSASDTVSGFRVEYELSEEGDEPQYLDLPSTATSVNIPDLLPGRKYIVNVYQISEDGEQSLILSTSQTTAPDAPPDPTVDQVDDTSIVVRWSRPQAPITGYRIVYSPSVEGSSTELNLPETANSVTLSDLQPGVQYNITIYAVEENQESTPVVIQQETTGTPRSDTVPSPRDLQFVEVTDVKVTIMWTPPESAVTGYRVDVIPVNLPGEHGQRLPISRNTFAEVTGLSPGVTYYFKVFAVSHGRESKPLTAQQTTKLDAPTNLQFVNETDSTVLVRWTPPRAQITGYRLTVGLTRRGQPRQYNVGPSVSKYPLRNLQPASEYTVSLVAIKGNQESPKATGVFTTLQPGSSIPPYNTEVTETTIVITWTPAPRIGFKLGVRPSQGGEAPREVTSDSGSIVVSGLTPGVEYVYTIQVLRDGQERDAPIVNKVVTPLSPPTNLHLEANPDTGVLTVSWERSTTPDITGYRITTTPTNGQQGNSLEEVVHADQSSCTFDNLSPGLEYNVSVYTVKDDKESVPISDTIIPAVPPPTDLRFTNIGPDTMRVTWAPPPSIDLTNFLVRYSPVKNEEDVAELSISPSDNAVVLTNLLPGTEYVVSVSSVYEQHESTPLRGRQKTGLDSPTGIDFSDITANSFTVHWIAPRATITGYRIRHHPEHFSGRPREDRVPHSRNSITLTNLTPGTEYVVSIVALNGREESPLLIGQQSTVSDVPRDLEVVAATPTSLLISWDAPAVTVRYYRITYGETGGNSPVQEFTVPGSKSTATISGLKPGVDYTITVYAVTGRGDSPASSKPISINYRTEIDKPSQMQVTDVQDNSISVKWLPSSSPVTGYRVTTTPKNGPGPTKTKTAGPDQTEMTIEGLQPTVEYVVSVYAQNPSGESQPLVQTAVTNIDRPKGLAFTDVDVDSIKIAWESPQGQVSRYRVTYSSPEDGIHELFPAPDGEEDTAELQGLRPGSEYTVSVVALHDDMESQPLIGTQSTAIPAPTDLKFTQVTPTSLSAQWTPPNVQLTGYRVRVTPKEKTGPMKEINLAPDSSSVVVSGLMVATKYEVSVYALKDTLTSRPAQGVVTTLENVSPPRRARVTDATETTITISWRTKTETITGFQVDAVPANGQTPIQRTIKPDVRSYTITGLQPGTDYKIYLYTLNDNARSSPVVIDASTAIDAPSNLRFLATTPNSLLVSWQPPRARITGYIIKYEKPGSPPREVVPRPRPGVTEATITGLEPGTEYTIYVIALKNNQKSEPLIGRKKTDELPQLVTLPHPNLHGPEILDVPSTVQKTPFVTHPGYDTGNGIQLPGTSGQQPSVGQQMIFEEHGFRRTTPPTTATPIRHRPRPYPPNVGEEIQIGHIPREDVDYHLYPHGPGLNPNASTGQEALSQTTISWAPFQDTSEYIISCHPVGTDEEPLQFRVPGTSTSATLTGLTRGATYNIIVEALKDQQRHKVREEVVTVGNSVNEGLNQPTDDSCFDPYTVSHYAVGDEWERMSESGFKLLCQCLGFGSGHFRCDSSRWCHDNGVNYKIGEKWDRQGENGQMMSCTCLGNGKGEFKCDPHEATCYDDGKTYHVGEQWQKEYLGAICSCTCFGGQRGWRCDNCRRPGGEPSPEGTTGQSYNQYSQRYHQRTNTNVNCPIECFMPLDVQADREDSRE

SEQ ID NO: 291 - protein, 2355 aa, Homo sapiens
MLRGPGPGLLLLAVQCLGTAVPSTGASKSKRQAQQMVQPQSPVAVSQSKPGCYDNGKHYQINQQWERTYLGNALVCTCYGGSRGFNCESKPEAEETCFDKYTGNTYRVGDTYERPKDSMIWDCTCIGAGRGRISCTIANRCHEGGQSYKIGDTWRRPHETGGYMLECVCLGNGKGEWTCKPIAEKCFDHAAGTSYVVGETWEKPYQGWMMVDCTCLGEGSGRITCTSRNRCNDQDTRTSYRIGDTWSKKDNRGNLLQCICTGNGRGEWKCERHTSVQTTSSGSGPFTDVRAAVYQPQPHPQPPPYGHCVTDSGVVYSVGMQWLKTQGNKQMLCTCLGNGVSCQETAVTQTYGGNSNGEPCVLPFTYNGRTFYSCTTEGRQDGHLWCSTTSNYEQDQKYSFCTDHTVLVQTRGGNSNGALCHFPFLYNNHNYTDCTSEGRRDNMKWCGTTQNYDADQKFGFCPMAAHEEICTTNEGVMYRIGDQWDKQHDMGHMMRCTCVGNGRGEWTCIAYSQLRDQCIVDDITYNVNDTFHKRHEEGHMLNCTCFGQGRGRWKCDPVDQCQDSETGTFYQIGDSWEKYVHGVRYQCYCYGRGIGEWHCQPLQTYPSSSGPVEVFITETPSQPNSHPIQWNAPQPSHISKYILRWRPKNSVGRWKEATIPGHLNSYTIKGLKPGVVYEGQLISIQQYGHQEVTRFDFTTTSTSTPVTSNTVTGETTPFSPLVATSESVTEITASSFVVSWVSASDTVSGFRVEYELSEEGDEPQYLDLPSTATSVNIPDLLPGRKYIVNVYQISEDGEQSLILSTSQTTAPDAPPDPTVDQVDDTSIVVRWSRPQAPITGYRIVYSPSVEGSSTELNLPETANSVTLSDLQPGVQYNITIYAVEENQESTPVVIQQETTGTPRSDTVPSPRDLQFVEVTDVKVTIMWTPPESAVTGYRVDVIPVNLPGEHGQRLPISRNTFAEVTGLSPGVTYYFKVFAVSHGRESKPLTAQQTTKLDAPTNLQFVNETDSTVLVRWTPPRAQITGYRLTVGLTRRGQPRQYNVGPSVSKYPLRNLQPASEYTVSLVAIKGNQESPKATGVFTTLQPGSSIPPYNTEVTETTIVITWTPAPRIGFKLGVRPSQGGEAPREVTSDSGSIVVSGLTPGVEYVYTIQVLRDGQERDAPIVNKVVTPLSPPTNLHLEANPDTGVLTVSWERSTTPDITGYRITTTPTNGQQGNSLEEVVHADQSSCTFDNLSPGLEYNVSVYTVKDDKESVPISDTIIPAVPPPTDLRFTNIGPDTMRVTWAPPPSIDLTNFLVRYSPVKNEEDVAELSISPSDNAVVLTNLLPGTEYVVSVSSVYEQHESTPLRGRQKTGLDSPTGIDFSDITANSFTVHWIAPRATITGYRIRHHPEHFSGRPREDRVPHSRNSITLTNLTPGTEYVVSIVALNGREESPLLIGQQSTVSDVPRDLEVVAATPTSLLISWDAPAVTVRYYRITYGETGGNSPVQEFTVPGSKSTATISGLKPGVDYTITVYAVTGRGDSPASSKPISINYRTEIDKPSQMQVTDVQDNSISVKWLPSSSPVTGYRVTTTPKNGPGPTKTKTAGPDQTEMTIEGLQPTVEYVVSVYAQNPSGESQPLVQTAVTNIDRPKGLAFTDVDVDSIKIAWESPQGQVSRYRVTYSSPEDGIHELFPAPDGEEDTAELQGLRPGSEYTVSVVALHDDMESQPLIGTQSTAIPAPTDLKFTQVTPTSLSAQWTPPNVQLTGYRVRVTPKEKTGPMKEINLAPDSSSVVVSGLMVATKYEVSVYALKDTLTSRPAQGVVTTLENVSPPRRARVTDATETTITISWRTKTETITGFQVDAVPANGQTPIQRTIKPDVRSYTITGLQPGTDYKIYLYTLNDNARSSPVVIDASTAIDAPSNLRFLATTPNSLLVSWQPPRARITGYIIKYEKPGSPPREVVPRPRPGVTEATITGLEPGTEYTIYVIALKNNQKSEPLIGRKKTDELPQLVTLPHPNLHGPEILDVPSTVQKTPFVTHPGYDTGNGIQLPGTSGQQPSVGQQMIFEEHGFRRTTPPTTATPIRHRPRPYPPNVGQEALSQTTISWAPFQDTSEYIISCHPVGTDEEPLQFRVPGTSTSATLTGLTRGATYNIIVEALKDQQRHKVREEVVTVGNSVNEGLNQPTDDSCFDPYTVSHYAVGDEWERMSESGFKLLCQCLGFGSGHFRCDSSRWCHDNGVNYKIGEKWDRQGENGQMMSCTCLGNGKGEFKCDPHEATCYDDGKTYHVGEQWQKEYLGAICSCTCFGGQRGWRCDNCRRPGGEPSPEGTTGQSYNQYSQRYHQRTNTNVNCPIECFMPLDVQADREDSRE

SEQ ID NO: 292 - protein, 843 aa, Homo sapiens; identical to SEQ ID NO: 282

SEQ ID NO: 293 - protein, 727 aa, Homo sapiens; identical to SEQ ID NO: 274

SEQ ID NO: 294 - protein, 2176 aa, Homo sapiens [sequence omitted]

SEQ ID NO: 295 - protein, 2355 aa, Homo sapiens [sequence omitted]

SEQ ID NO: 296 - protein, 2504 aa, Homo sapiens
MEEVVIAGMFGKLPESENLQEFWDNLIGGVDMVTDDDRRWKAGLYGLPRRSGKLKDLSRFDASFFGVHPKQAHTMDPQLRLLLEATYEAIVDGGINPDSLRGTHTGVWVGVSGSETSEALSRDPETLVGYSMVGCQRAMMANRLSFFFDFRGPSIALDTACSSSLMALQNAYQAIHSGQCPAAIVGGINVLLKPNTSVQFLRLGMLSPEGTCKAFDTAGNGYCRSEGVVAVLLTKKSLARKVYTTILNKGTNTDGFKEQGVTFPQDIQEQPIRSLYQSAGVAPESFEYIEAHGPGTKVGDPQERNGITRALCATRQEPLLIGSTKSNMGHPEPASGLDALAKVLLSLEHGLWAPNLHFHSPNPEIPALLDGRLQVVDQPLPVRGGNVGINSFGFGGSNMHIILRPNTQSAPAPAPHATLPRLLRASGRTPEAVQKLLEQGLRHSQGLAFLSMLNDIAAVPATAMPFRGYAVLGGETRWPRVQQVPAGERPLWFICSGMGTQWRGMGLSLMRLDRFRDSILRSDEAVNRFGLKVSQLLLSTDESTFDDIVHSFVSLTAIQIGLIDLLSCMGPEADGIVGHSLGEWLSVRDGCLSQEEAVLAAYWRGQCIKEAPLPAGAMAAVGLSWEECKQRCPPAVVPACHNSKDTVTISGPQAPVFEFVEQLRKEGVFAKEVRTGGMAFHSYFMEAIAPPLLQELKKVIREPKPRSARWLSTSIPEAQWHSSLARTSSAEYNVNNLVSPVLFQEALWHVPEHAVVLEIAPTPCPQAVLKRVRKPSCTIIPRMKKDHRDNLEFFLAGIGRLHLSGIDANPNALFPPVESPAPRGTPLISPLIKWDHSLAWDAPAAEDFPNGSGSPSATIYTCTPSSESPDRYLVDHTIDGRVLFPATGYLSIVWKTLARAWAGLEQLPVVFEDVVQHQATILPKTGTVSLEVRLLEATGAFEVSENGNLVVSGKVYQWDDPDPRLFDHPESPHPNSPRSPLFLAQAEVYKELRLRGYDYGPHFQGILEASLEGDSGRLLWKDNWVSFMDTMLQMSILGSAKHGLYLPTRVTAIHIDPATHRQKLYTLQDKAQVADVVVSRWPRVTVAGGVHISGLHTESAPRRHEEQQVPILEKFCFTPHTEEGCLSEHAALEEELQLCKGLVEALETKVTQQGLKMVVPDWTGPRSPRDPSQQELPRLLSAACRLQLNGNLQLELAQVLAQERPKLPEDPLLSGLLDSPALKACLDTAVENMPSLKMKVVEVLAGHGHLYSRIPGLLSPHPLLQLSYTATDRHPQALEAAQAELQQHDVAQGQWDPADPAPSALGSADLLVCNCAVAALGDPASALSNMVAALREGGFLLLHTLLRGHPRDIVAFLTSTEPQYGQGILSQDAWESLFSRVSLRLVGLKKSFYGATLFLCRRPTPQDSPIFLPVDDTSFRWVESLKGILADEDSSRPVWLKAINCATSGVVGLVNCLRREPGGTVRCVLLSNLSSTSHVPEVDPGSAELQKVLQGDLVMNVYRDGAWGVFRHFLLEDKPEEPTAHAFVSTLTRGDLSSIRWVCSSLRHAQPTCPGAQLCTVYYASLNFRDIMLATGKLSPDAIPGKWTSQDSLLGMEFSGRDASGKRVMGLVPAKGLATSVLLSPDFLWDVPSNWTLEEAASVPVVYSTAYYALVVRGRVRPGETLLIHSGSGGVGQAAIAIALSLGCRVFTTVGSAEKRAYLQARFPQLDSTSFANSRDTSFEQHVLWHTGGKGVDLVLNSLAEEKLQASVRCFGTHGRFLEIGKFDLSQNHPLGMAIFLKNVTFHGVLLDAFFNESSADWREVWALVEAAIRDGVVRPLKCTVFHGAQVEDAFRYMAQGKHIGKVVVQVLAEEPAVLKGAKPKLMSAISKTFCPAHKSYIIAGGLGGFGLELAQWLIQRGVQKLVLTSRSGIRTGYQAKQVRRWRRQGLQVQVSTSNISSLEGARGLIAEAAQLGPVGGVFNLAVVLRDGLLENQTPEFFQDVCKPKYSGTLNLDRVTREACPELDYFVVFSSVSCGRGNAGQSNYGFANSAMERICEKRRHEGLPGLAVQWGAIGTVGILVETMSTNDTIVSGTLPTRIGVLGLEVLDLFLNQPHMVLSSFVLAEKAAAYRDRDSQRDLVEAVAHILGIRDLAAVNLGGSLADLGLDSLMSAPVRQTLERELNLVLSVREVRQLTLRKLQELSSKADEASELACPTPKEDGLAQQQTQLNLRSLLVKPEGPTLMRLNSVQSSERPLFLVHPIEATTVFHSLGPGLSIPTYGLQCTPAAPLDSIHSLAAYYIDCIRQVQPEGPYRVAGYSYGACVAFEMCSQLQAQQSPAPTHNSLFLFDGSPTYVLAYTQSYRAKLTPGCKAEAETEAICFFVQQFTDMEHNRVLEALLPLKGLEERVAAAVDLIIKSHQGLDRQELSFAARSFYYRLRAADQYTPKAKYSGNVMLLRAKTGGRYGEDLGADYNLSQVCDGKVSVHIIEGDHRTLLEGSGLESIISIIHSSLAEPRVSREG

SEQ ID NO: 297 - protein, 74 aa, Homo sapiens
ASTRHFFPFSHPISRETCYSAPPPTLRLRRSSKQKVALGGSGGFESGGPIAVTTSLKLLSAACRDTLPPRCLEL

SEQ ID NO: 298 - protein, 207 aa, Homo sapiens
MAPFEPLASGILLLLWLIAPSRACTCVPPHPQTAFCNSDLVIRAKFVGTPEVNQTTLYQRYEIKMTKMYKGFQALGDAADIRFVYTPAMESVCGYFHRSHNRSEEFLIAGKLQDGLLHITTCSFVAPWNSLSLAQRRGFTKTYTVGCEECTVFPCLSIPCKLQSGTHCLWTDQLLQGSEKGFQSRHLACLPREPGLCTWQSLRSQIA

SEQ ID NO: 299 - protein, 207 aa, Homo sapiens; identical to SEQ ID NO: 298

SEQ ID NO: 300 - protein, 189 aa, Homo sapiens
MAPFEPLASGILLLLWLIAPSRACTCVPPHPQTAFCNSDLVIRAKFVGTPEVNQTTLYQRYEIKMTKMYKGFQALGDAADIRFVYTPAMESVCGYFHRSHNRSEEFLIAGKLQDGLLHITTCSFVAPWNSLSLAQRRGFTKTYTVGCEECTVFPCLSIPCKLQSGTHCLWTDQLLQGLCTWQSLRSQIA

SEQ ID NO: 301 - protein, 555 aa, Homo sapiens
MAAAAWLQVLPVILLLLGAHPSPLSFFSAGPATVAAADRSKWHIPIPSGKNYFSFGKILFRNTTIFLKFDGEPCDLSLNITWYLKSADCYNEIYNFKAEEVELYLEKLKEKRGLSGKYQTSSKLFQNCSELFKTQTFSGDFMHRLPLLGEKQEAKENGTNLTFIGDKTAMHEPLQTWQDAPYIFIVHIGISSSKESSKENSLSNLFTMTVEVKGPYEYLTLEDYPLMIFFMVMCIVYVLFGVLWLAWSACYWRDLLRIQFWIGAVIFLGMLEKAVFYAEFQNIRYKGESVQGALILAELLSAVKRSLARTLVIIVSLGYGIVKPRLGVTLHKVVVAGALYLLFSGMEGVLRVTGAQTDLASLAFIPLAFLDTALCWWIFISLTQTMKLLKLRRNIVKLSLYRHFTNTLILAVAASIVFIIWTTMKFRIVTCQSDWRELWVDDAIWRLLFSMILFVIMVLWRPSANNQRFAFSPLSEEEEEDEQKEPMLKESFEGMKMRSTKQEPNGNSKVNKAQEDDLKWVEENVPSSVTDVALPALLDSDEERMITHFERSKME

SEQ ID NO: 302 - protein, 181 aa, Homo sapiens
MAAAAWLQVLPVILLLLGAHPSPLSFFSAGPATVAAADRSKWHIPIPSGKNYFSFGKILFRNTTIFLKFDGEPCDLSLNITWYLKSADCYNEIYNFKAEEVELYLEKLKEKRGLSGKYQTSSKLFQNCSELFKTQTFSGDFMHRLPLLGEKQEAKENGTNLTFIGDKTIQMPFLKKHFLDC

SEQ ID NO: 303 - protein, 555 aa, Homo sapiens [sequence omitted]

SEQ ID NO: 304 - protein, 607 aa, Homo sapiens
MEAPAAGLFLLLLLGTWAPAPGSASSEAPPLINEDVKRTVDLSSHLAKVTAEVVLAHLGGGSTSRATSFLLALEPELEARLAHLGVQVKGEDEEENNLEVRETKIKGKSGRFFTVKLPVALDPGAKISVIVETVYTHVLHPYPTQITQSEKQFVVFEGNHYFYSPYPTKTQTMRVKLASRNVESYTKLGNPTRSEDLLDYGPFRDVPAYSQDTFKVHYENNSPFLTITSMTRVIEVSHWGNIAVEENVDLKHTGAVLKGPFSRYDYQRQPDSGISSIRSFKTILPAAAQDVYYRDEIGNVSTSHLLILDDSVEMEIRPRFPLFGGWKTHYIVGYNLPSYEYLYNLGDQYALKMRFVDHVFDEQVIDSLTVKIILPEGAKNIEIDSPYEISRAPDELHYTYLDTFGRPVIVAYKKNLVEQHIQDIVVHYTFNKVLMLQEPLLVVAAFYILFFTVIIYVRLDFSITKDPAAEARMKVACITEQVLTLVNKRIGLYRHFDETVNRYKQSRDISTLNSGKKSLETEHKALTSEIALLQSRLKTEGSDLCDRVSEMQKLDAQVKELVLKSAVEAERLVAGKLKKDTYIENEKLISGKRQELVTKIDHILDAL

SEQ ID NO: 305 - protein, 607 aa, Homo sapiens; identical to SEQ ID NO: 304

SEQ ID NO: 306 - protein, 607 aa, Homo sapiens; identical to SEQ ID NO: 304

SEQ ID NO: 307 - protein, 607 aa, Homo sapiens; identical to SEQ ID NO: 304

SEQ ID NO: 308 - protein, 381 aa, Homo sapiens
MPFSNSHNALKLRFPAEDEFPDLSAHNNHMAKVLTPELYAELRAKSTPSGFTLDDVIQTGVDNPGHPYIMTVGCVAGDEESYEVFKDLFDPIIEDRHGGYKPSDEHKTDLNPDNLQGGDDLDPNYVLSSRVRTGRSIRGFCLPPHCSRGERRAIEKLAVEALSSLDGDLAGRYYALKSMTEAEQQQLIDDHFLFDKPVSPLLLASGMARDWPDARGIWHNDNKTFLVWVNEEDHLRVISMQKGGNMKEVFTRFCTGLTQIETLFKSKDYEFMWNPHLGYILTCPSNLGTGLRAGVHIKLPNLGKHEKFSEVLKRLRLQKRGTGGVDTAAVGGVFDVSNADRLGFSEVELVQMVVDGVKLLIEMEQRLEQGQAIDDLMPAQK

SEQ ID NO: 309 - protein, 381 aa, Homo sapiens [sequence omitted]

SEQ ID NO: 310 - protein, 405 aa, Homo sapiens
MPFSNSHNALKLRFPAEDEFPDLSAHNNHMAKVLTPELYAELRAKSTPSGFTLDDVIQTGVDNPGHPYIMTVGCVAGDEESYEVFKDLFDPIIEDRHGGYKPSDEHKTDLNPDNLQVRGCGRAGRAGPGSSGAHSRLASQGGDDLDPNYVLSSRVRTGRSIRGFCLPPHCSRGERRAIEKLAVEALSSLDGDLAGRYYALKSMTEAEQQQLIDDHFLFDKPVSPLLLASGMARDWPDARGIWHNDNKTFLVWVNEEDHLRVISMQKGGNMKEVFTRFCTGLTQIETLFKSKDYEFMWNPHLGYILTCPSNLGTGLRAGVHIKLPNLGKHEKFSEVLKRLRLQKRGTGGVDTAAVGGVFDVSNADRLGFSEVELVQMVVDGVKLLIEMEQRLEQGQAIDDLMPAQK

SEQ ID NO: 311 - protein, 381 aa, Homo sapiens; identical to SEQ ID NO: 308

SEQ ID NO: 312 - protein, 117 aa, Homo sapiens
MTVGEKVFSSNGQSITFDAIQEACARAGGRIAVPRNPEENEAIASFVKKYNTYAYVGLTEGPSPGDFRYSDGTPVNYTNWYRGEPAGRGKEQCVEMYTDGQWNDRNCLYSRLTICEF

SEQ ID NO: 313 - protein, 1117 aa, Homo sapiens
MARTRDRVRLLLLLICFNVGSGLHLQVLSTRNENKLLPKHPHLVRQKRAWITAPVALREGEDLSKKNPIAKIHSDLAEERGLKITYKYTGKGITEPPFGIFVFNKDTGELNVTSILDREETPFFLLTGYALDARGNNVEKPLELRIKVLDINDNEPVFTQDVFVGSVEELSAAHTLVMKINATDADEPNTLNSKISYRIVSLEPAYPPVFYLNKDTGEIYTTSVTLDREEHSSYTLTVEARDGNGEVTDKPVKQAQVQIRILDVNDNIPVVENKVLEGMVEENQVNVEVTRIKVFDADEIGSDNWLANFTFASGNEGGYFHIETDAQTNEGIVTLIKEVDYEEMKNLDFSVIVANKAAFHKSIRSKYKPTPIPIKVKVKNVKEGIHFKSSVISIYVSESMDRSSKGQIIGNFQAFDEDTGLPAHARYVKLEDRDNWISVDSVTSEIKLAKLPDFESRYVQNGTYTVKIVAISEDYPRKTITGTVLINVEDINDNCPTLIEPVQTICHDAEYVNVTAEDLDGHPNSGPFSFSVIDKPPGMAEKWKIARQESTSVLLQQSEKKLGRSEIQFLISDNQGFSCPEKQVLTLTVCEVLHGSGCREAQHDSYVGLGPAAIALMILAFLLLLLVPLLLLMCHCGKGAKAFTPIPGTIEMLHPWNNEGAPPEDKVVPSFLPVDQGGSLVGRNGVGGMAKEATMKGSSSASIVKGQHEMSEMDGRWEEHRSLLSGRATQFTGATGAIMTTETTKTARATGASRDMAGAQAAAVALNEEFLRNYFTDKAASYTEEDENHTAKDCLLVYSQEETESLNASIGCCSFIEGELDDRFLDDLGLKFKTLAEVCLGQKIDINKEIEQRQKPATETSMNTASHSLCEQTMVNSENTYSSGSSFPVPKSLQEANAEKVTQEIVTERSVSSRQAQKVATPLPDPMASRNVIATETSYVTGSTMPPTTVILGPSQPQSLIVTERVYAPASTLVDQPYANEGTVVVTERVIQPHGGGSNPLEGTQHLQDVPYVMVRERESFLAPSSGVQPTLAMPNIAVGQNVTVTERVLAPASTLQSSYQIPTENSMTARNTTVSGAGVPGPLPDFGLEESGHSNSTITTSSTRVTKHSTVQHSYS

SEQ ID NO: 314 - protein, 1118 aa, Homo sapiens
MARSPGRAYALLLLLICFNVGSGLHLQVLSTRNENKLLPKHPHLVRQKRAWITAPVALREGEDLSKKNPIAKIHSDLAEERGLKITYKYTGKGITEPPFGIFVFNKDTGELNVTSILDREETPFFLLTGYALDARGNNVEKPLELRIKVLDINDNEPVFTQDVFVGSVEELSAAHTLVMKINATDADEPNTLNSKISYRIVSLEPAYPPVFYLNKDTGEIYTTSVTLDREEHSSYTLTVEARDGNGEVTDKPVKQAQVQIRILDVNDNIPVVENKVLEGMVEENQVNVEVTRIKVFDADEIGSDNWLANFTFASGNEGGYFHIETDAQTNEGIVTLIKEVDYEEMKNLDFSVIVANKAAFHKSIRSKYKPTPIPIKVKVKNVKEGIHFKSSVISIYVSESMDRSSKGQIIGNFQAFDEDTGLPAHARYVKLEDRDNWISVDSVTSEIKLAKLPDFESRYVQNGTYTVKIVAISEDYPRKTITGTVLINVEDINDNCPTLIEPVQTICHDAEYVNVTAEDLDGHPNSGPFSFSVIDKPPGMAEKWKIARQESTSVLLQQSEKKLGRSEIQFLISDNQGFSCPEKQVLTLTVCECLHGSGCREAQHDSYVGLGPAAIALMILAFLLLLLVPLLLLMCHCGKGAKGFTPIPGTIEMLHPWNNEGAPPEDKVVPSFLPVDQGGSLVGRNGVGGMAKEATMKGSSSASIVKGQHEMSEMDGRWEEHRSLLSGRATQFTGATGAIMTTETTKTARATGASRDMAGAQAAAVALNEEFLRNYFTDKAASYTEEDENHTAKDCLLVYSQEETESLNASIGCCSFIEGELDDRFLDDLGLKFKTLAEVCLGQKIDINKEIEQRQKPATETSMNTASHSLCEQTMVNSENTYSSGSSFPVPKSLQEANAEKVTQEIVTERSVSSRQAQKVATPLPDPMASRNVIATETSYVTGSTMPPTTVILGPSQPQSLIVTERVYAPASTLVDQPYANEGTVVVTERVIQPHGGGSNPLEGTQHLQDVPYVMVRERESFLAPSSGVQPTLAMPNIAVGQNVTVTERVLAPASTLQSSYQIPTENSMTARNTTVSGAGVPGPLPDFGLEESGHSNSTITTSSTRVTKHSTVQHSYS

SEQ ID NO: 315 - protein, 224 aa, Homo sapiens
MRVSGVLRLLALIFAIVTTWMFIRSYMSFSMKTIRLPRWLAASPTKEIQVKKYKCGLIKPCPANYFAFKICSGAANVVGPTMCFEDRMIMSPVKNNVGRGLNIALVNGTTGAVLGQKAFDMYSGDVMHLVKFLKEIPGGALVLVASYDDPGTKMNDESRKLFSDLGSSYAKQLGFRDSWVFIGAKDLRGKSPFEQFLKNSPDTNKYEGWPELLEMEGCMPPKPF

SEQ ID NO: 316 - protein, 224 aa, Homo sapiens; identical to SEQ ID NO: 315

SEQ ID NO: 317 - protein, 530 aa, Homo sapiens
MACTGWTSPLPLCVCLLLTCGFAEAGKLLVVPMDGSHWFTMRSVVEKLILRGHEVVVVMPEVSWQLGRSLNCTVKTYSTSYTLEDLDREFKAFAHAQWKAQVRSIYSLLMGSYNDIFDLFFSNCRSLFKDKKLVEYLKESSFDAVFLDPFDNCGLIVAKYFSLPSVVFARGILCHYLEEGAQCPAPLSYVPRILLGFSDAMTFKERVRNHIMHLEEHLLCHRFFKNALEIASEILQTPVTEYDLYSHTSIWLLRTDFVLDYPKPVMPNMIFIGGINCHQGKPLPMEFEAYINASGEHGIVVFSLGSMVSEIPEKKAMAIADALGKIPQTVLWRYTGTRPSNLANNTILVKWLPQNDLLGHPMTRAFITHAGSHGVYESICNGVPMVMMPLFGDQMDNAKRMETKGAGVTLNVLEMTSEDLENALKAVINDKSYKENIMRLSSLHKDRPVEPLDLAVFWVEFVMRHKGAPHLRPAAHDLTWYQYHSLDVIGFLLAVVLTVAFITFKCCAYGYRKCLGKKGRVKKAHKSKTH

SEQ ID NO: 318 - protein, 530 aa, Homo sapiens [sequence omitted]

SEQ ID NO: 319 - protein, 532 aa, Homo sapiens
MACLLRSFQRISAGVFFLALWGMVVGDKLLVVPQDGSHWLSMKDIVEVLSDRGHEIVVVVPEVNLLLKESKYYTRKIYPVPYDQEELKNRYQSFGNNHFAERSFLTAPQTEYRNNMIVIGLYFINCQSLLQDRDTLNFFKESKFDALFTDPALPCGVILAEYLGLPSVYLFRGFPCSLEHTFSRSPDPVSYIPRCYTKFSDHMTFSQRVANFLVNLLEPYLFYCLFSKYEELASAVLKRDVDIITLYQKVSVWLLRYDFVLEYPRPVMPNMVFIGGINCKKRKDLSQEFEAYINASGEHGIVVFSLGSMVSEIPEKKAMAIADALGKIPQTVLWRYTGTRPSNLANNTILVKWLPQNDLLGHPMTRAFITHAGSHGVYESICNGVPMVMMPLFGDQMDNAKRMETKGAGVTLNVLEMTSEDLENALKAVINDKSYKENIMRLSSLHKDRPVEPLDLAVFWVEFVMRHKGAPHLRPAAHDLTWYQYHSLDVIGFLLAVVLTVAFITFKCCAYGYRKCLGKKGRVKKAHKSKTH

SEQ ID NO: 320 - protein, 532 aa, Homo sapiens; identical to SEQ ID NO: 319

SEQ ID NO: 321 - protein, 530 aa, Homo sapiens
MACTGWTSPLPLCVCLLLTCGFAEAGKLVVVPMDGSHWFTMRSVVEKLILRGHEVVVVSARGELATGKINELHSEDLFNFIYLEDLDREFKAFAHAQWKAQVRSIYSLLMGSYNDIFDLFFSNCRSLFKDKKLVEYLKESSFDAVFLDPFDNCGLIVAKYFSLPSVVFARGILCHYLEEGAQCPAPLSYVPRILLGFSDDMTFKERVRNHIMHLEEHLLCHRFFKNALEIASEILQTPVTEYDLYSHTSIWLLRTDFVLDYPKPVMPNMIFIGGINCHERKALPMEFEAYINASGEHGIVVFSLGSMVSEIPEKKAMAIADALGKIPQTVLWRYTGTRPSNLANNTILVKWLPQNDLLGHPMTRAFITHAGSHGVYESICNGVPMVMMPLFGDQMDNAKRMETKGAGVTLNVLEMTSEDLENALKAVINDKSYKENIMRLSSLHKDRPVEPLDLAVFWVEFVMRHKGAPHLRPAAHDLTWYQYHSLDVIGFLLAVVLTVAFITFKCCAYGYRKCLGKKGRVKKAHKSKTH

SEQ ID NO: 322 - protein, 534 aa, Homo sapiens
MATGLQVPLPWLATGLLLLLSVQPWAESGKVLVVPIDGSHWLSMREVLRELHARGHQAVVLTPEVNMHIKEENFFTLTTYAISWTQDEFDRHVLGHTQLYFETEHFLKKFFRSMAMLNNMSLVYHRSCVELLHNEALIRHLNATSFDVVLTDPVNLCAAVLAKYLSIPTVFFLRNIPCDLDFKGTQCPNPSSYIPRLLTTNSDHMTFMQRVKNMLYPLALSYICHAFSAPYASLASELFQREVSVVDILSHASVWLFRGDFVMDYPRPIMPNMVFIGGINCANRKPLSQEFEAYINASGEHGIVVFSLGSMVSEIPEKKAMAIADALGKIPQTVLWRYTGTRPSNLANNTILVKWLPQNDLLGHPMTRAFITHAGSHGVYESICNGVPMVMMPLFGDQMDNAKRMETKGAGVTLNVLEMTSEDLENALKAVINDKSYKENIMRLSSLHKDRPVEPLDLAVFWVEFVMRHKGAPHLRPAAHDLTWYQYHSLDVIGFLLAVVLTVAFITFKCCAYGYRKCLGKKGRVKKAHKSKTH

SEQ ID NO: 323 - protein, 533 aa, Homo sapiens
MAVESQGGRPLVLGLLLCVLGPVVSHAGKILLIPVDGSHWLSMLGAIQQLQQRGHEIVVLAPDASLYIRDGAFYTLKTYPVPFQREDVKESFVSLGHNVFENDSFLQRVIKTYKKIKKDSAMLLSGCSHLLHNKELMASLAESSFDVMLTDPFLPCSPIVAQYLSLPTVFFLHALPCSLEFEATQCPNPFSYVPRPLSSHSDHMTFLQRVKNMLIAFSQNFLCDVVYSPYATLASEFLQREVTVQDLLSSASVWLFRSDFVKDYPRPIMPNMVFVGGINCLHQNPLSQEFEAYINASGEHGIVVFSLGSMVSEIPEKKAMAIADALGKIPQTVLWRYTGTRPSNLANNTILVKWLPQNDLLGHPMTRAFITHAGSHGVYESICNGVPMVMMPLFGDQMDNAKRMETKGAGVTLNVLEMTSEDLENALKAVINDKSYKENIMRLSSLHKDRPVEPLDLAVFWVEFVMRHKGAPHLRPAAHDLTWYQYHSLDVIGFLLAVVLTVAFITFKCCAYGYRKCLGKKGRVKKAHKSKTH

SEQ ID NO: 324 - protein, 530 aa, Homo sapiens
MARAGWTSPVPLCVCLLLTCGFAEAGKLLVVPMDGSHWFTMQSVVEKLILRGHEVVVVMPEVSWQLERSLNCTVKTYSTSYTLEDQNREFMVFAHAQWKAQAQSIFSLLMSSSSGFLDLFFSHCRSLFNDRKLVEYLKESSFDAVFLDPFDTCGLIVAKYFSLPSVVFTRGIFCHHLEEGAQCPAPLSYVPNDLLGFSDAMTFKERVWNHIVHLEDHLFCQYLFRNALEIASEILQTPVTAYDLYSHTSIWLLRTDFVLDYPKPVMPNMIFIGGINCHQGKPLPMEFEAYINASGEHGIVVFSLGSMVSEIPEKKAMAIADALGKIPQTVLWRYTGTRPSNLANNTILVKWLPQNDLLGHPMTRAFITHAGSHGVYESICNGVPMVMMPLFGDQMDNAKRMETKGAGVTLNVLEMTSEDLENALKAVINDKSYKENIMRLSSLHKDRPVEPLDLAVFWVEFVMRHKGAPHLRPAAHDLTWYQYHSLDVIGFLLAVVLTVAFITFKCCAYGYRKCLGKKGRVKKAHKSKTH

SEQ ID NO: 325 - protein, 534 aa, Homo sapiens
MARGLQVPLPRLATGLLLLLSVQPWAESGKVLVVPTDGSPWLSMREALRELHARGHQAVVLTPEVNMHIKEEKFFTLTAYAVPWTQKEFDRVTLGYTQGFFETEHLLKRYSRSMAIMNNVSLALHRCCVELLHNEALIRHLNATSFDVVLTDPVNLCGAVLAKYLSIPAVFFWRYIPCDLDFKGTQCPNPSSYIPKLLTTNSDHMTFLQRVKNMLYPLALSYICHTFSAPYASLASELFQREVSVVDLVSYASVWLFRGDFVMDYPRPIMPNMVFIGGINCANGKPLSQEFEAYINASGEHGIVVFSLGSMVSEIPEKKAMAIADALGKIPQTVLWRYTGTRPSNLANNTILVKWLPQNDLLGHPMTRAFITHAGSHGVYESICNGVPMVMMPLFGDQMDNAKRMETKGAGVTLNVLEMTSEDLENALKAVINDKSYKENIMRLSSLHKDRPVEPLDLAVFWVEFVMRHKGAPHLRPAAHDLTWYQYHSLDVIGFLLAVVLTVAFITFKCCAYGYRKCLGKKGRVKKAHKSKTH

SEQ ID NO: 326 - protein, 530 aa, Homo sapiens
MARAGWTGLLPLYVCLLLTCGFAKAGKLLVVPMDGSHWFTMQSVVEKLILRGHEVVVVMPEVSWQLGRSLNCTVKTYSTSYTLEDQDREFMVFADARWTAPLRSAFSLLTSSSNGIFDLFFSNCRSLFNDRKLVEYLKESCFDAVFLDPFDACGLIVAKYFSLPSVVFARGIFCHYLEEGAQCPAPLSYVPRLLLGFSDAMTFKERVWNHIMHLEEHLFCPYFFKNVLEIASEILQTPVTAYDLYSHTSIWLLRTDFVLEYPKPVMPNMIFIGGINCHQGKPVPMEFEAYINASGEHGIVVFSLGSMVSEIPEKKAMAIADALGKIPQTVLWRYTGTRPSNLANNTILVKWLPQNDLLGHPMTRAFITHAGSHGVYESICNGVPMVMMPLFGDQMDNAKRMETKGAGVTLNVLEMTSEDLENALKAVINDKSYKENIMRLSSLHKDRPVEPLDLAVFWVEFVMRHKGAPHLRPAAHDLTWYQYHSLDVIGFLLAVVLTVAFITFKCCAYGYRKCLGKKGRVKKAHKSKTH

SEQ ID NO: 327 - protein, 530 aa, Homo sapiens
MARTGWTSPIPLCVSLLLTCGFAEAGKLLVVPMDGSHWFTMQSVVEKLILRGHEVVVVMPEVSWQLGKSLNCTVKTYSTSYTLEDLDREFMDFADAQWKAQVRSLFSLFLSSSNGFFNLFFSHCRSLFNDRKLVEYLKESSFDAVFLDPFDACGLIVAKYFSLPSVVFARGIACHYLEEGAQCPAPLSYVPRILLGFSDAMTFKERVRNHIMHLEEHLFCQYFSKNALEIASEILQTPVTAYDLYSHTSIWLLRTDFVLDYPKPVMPNMIFIGGINCHQGKPLPMEFEAYINASGEHGIVVFSLGSMVSEIPEKKAMAIADALGKIPQTVLWRYTGTRPSNLANNTILVKWLPQNDLLGHPMTRAFITHAGSHGVYESICNGVPMVMMPLFGDQMDNAKRMETKGAGVTLNVLEMTSEDLENALKAVINDKSYKENIMRLSSLHKDRPVEPLDLAVFWVEFVMRHKGAPHLRPAAHDLTWYQYHSLDVIGFLLAVVLTVAFITFKCCAYGYRKCLGKKGRVKKAHKSKTH

SEQ ID NO: 328 - protein, 533 aa, Homo sapiens; identical to SEQ ID NO: 323

SEQ ID NO: 329 - protein, 534 aa, Homo sapiens
MATGLQVPLPQLATGLLLLLSVQPWAESGKVLVVPTDGSHWLSMREALRDLHARGHQVVVLTLEVNMYIKEENFFTLTTYAISWTQDEFDRLLLGHTQSFFETEHLLMKFSRRMAIMNNMSLIIHRSCVELLHNEALIRHLHATSFDVVLTDPFHLCAAVLAKYLSIPAVFFLRNIPCDLDFKGTQCPNPSSYIPRLLTTNSDHMTFLQRVKNMLYPLALSYLCHAVSAPYASLASELFQREVSVVDLVSHASVWLFRGDFVMDYPRPIMPNMVFIGGINCANGKPLSQEFEAYINASGEHGIVVFSLGSMVSEIPEKKAMAIADALGKIPQTVLWRYTGTRPSNLANNTILVKWLPQNDLLGHPMTRAFITHAGSHGVYESICNGVPMVMMPLFGDQMDNAKRMETKGAGVTLNVLEMTSEDLENALKAVINDKSYKENIMRLSSLHKDRPVEPLDLAVFWVEFVMRHKGAPHLRPAAHDLTWYQYHSLDVIGFLLAVVLTVAFITFKCCAYGYRKCLGKKGRVKKAHKSKTH

SEQ ID NO: 330 - protein, 265 aa, Homo sapiens
MPNMVFIGGINCKKRKDLSQEFEAYINASGEHGIVVFSLGSMVSEIPEKKAMAIADALGKIPQTVLWRYTGTRPSNLANNTILVKWLPQNDLLGHPMTRAFITHAGSHGVYESICNGVPMVMMPLFGDQMDNAKRMETKGAGVTLNVLEMTSEDLENALKAVINDKSYKENIMRLSSLHKDRPVEPLDLAVFWVEFVMRHKGAPHLRPAAHDLTWYQYHSLDVIGFLLAVVLTVAFITFKCCAYGYRKCLGKKGRVKKAHKSKTH

SEQ ID NO: 331 - protein, 530 aa, Homo sapiens; identical to SEQ ID NO: 324

SEQ ID NO: 332 - protein, 534 aa, Homo sapiens; identical to SEQ ID NO: 329

SEQ ID NO: 333 - protein, 530 aa, Homo sapiens; identical to SEQ ID NO: 327

SEQ ID NO: 334 - protein, 530 aa, Homo sapiens; identical to SEQ ID NO: 317

SEQ ID NO: 335 - protein, 534 aa, Homo sapiens; identical to SEQ ID NO: 325

SEQ ID NO: 336 - protein, 534 aa, Homo sapiens; identical to SEQ ID NO: 322

SEQ ID NO: 337 - protein, 180 aa, Homo sapiens
MAPGVARGPTPYWRLRLGGAALLLLLIPVAAAQEPPGAACSQNTNKTCEECLKNVSCLWCNTNKACLDYPVTSVLPPASLCKLSSARWGVCWVNFEALIITMSVVGGTLLLGIAICCCCCCRRKRSRKPDRSEEKAMREREERRIRQEERRAEMKTRHDEIRKKYGLFKEENPYARFENN

SEQ ID NO: 338 - protein, 158 aa, Homo sapiens
LILKQADCGSTLSRRAACSQNTNKTCEECLKNVSCLWCNTNKACLDYPVTSVLPPASLCKLSSARWGVCWVNFEALIITMSVVGGTLLLGIAICCCCCCRRKRSRKPDRSEEKAMREREERRIRQEERRAEMKTRHDEIRKKYGLFKEENPYARFENN

SEQ ID NO: 339 - protein, 253 aa, Homo sapiens
MGEFNEKKTTCGTVCLKYLLFTYNCCFWLAGLAVMAVGIWTLALKSDYISLLASGTYLATAYILVVAGTVVMVTGVLGCCATFKERRNLLRLYFILLLIIFLLEIIAGILAYAYYQQLNTELKENLKDTMTKRYHQPGHEAVTSAVDQLQQEFHCCGSNNSQDWRDSEWIRSQEAGGRVVPDSCCKTVVALCGQRDHASNIYKVEGGCITKLETFIQEHLRVIGAVGIGIACVQVFGMIFTCCLYRSLKLEHY

SEQ ID NO: 340 - protein, 253 aa, Homo sapiens; identical to SEQ ID NO: 339

SEQ ID NO: 341 - protein, 211 aa, Homo sapiens
MGEFNEKKTTCGTVCLKYLLFTYNCCFWLAGLAVMAVGIWTLALKSDYISLLASGTYLATAYILVVAGTVVMVTGVLGCCATFKERRNLLRLYFILLLIIFLLEIIAGILAYAYYQQLNTELKENLKDTMTKRYHQPGHEAVTSAVDQLQQEFHCCGSNNSQDWRDSEWIRSQEAGGRVVPDSCCKTVVALCGQRDHASNIYKVEGGCITK

SEQ ID NO: 342 - protein, 253 aa, Homo sapiens; identical to SEQ ID NO: 339

SEQ ID NO: 343 - protein, 124 aa, Homo sapiens [sequence omitted]

SEQ ID NO: 344 - protein, 124 aa, Homo sapiens [sequence omitted]

SEQ ID NO: 345 - protein, 253 aa, Homo sapiens; identical to SEQ ID NO: 339

SEQ ID NO: 346 - protein, 253 aa, Homo sapiens [sequence omitted]

SEQ ID NO: 347 - protein, 594 aa, Homo sapiens [sequence omitted]

SEQ ID NO: 348 - protein, 654 aa, Homo sapiens [sequence omitted]

SEQ ID NO: 349 - protein, 601 aa, Homo sapiens [sequence omitted]

SEQ ID NO: 350 - protein, 494 aa, Homo sapiens [sequence omitted]

SEQ ID NO: 351 - protein, 596 aa, Homo sapiens
MVLLHVLFEHAVGYALVALKEVEEISLLQPQVEESVLNLGKFHSIVRLVAFCPFASSQVALENANAVSEGVVHEDLRLLLETHLPSKKKKVLLGVGDPKIGAAIQEELGYNCQTGGVIAEILRGVRLHFHNLVKGLTDLSACKAQLGLGHSYSRAKVKFNVNRVDNMIIQSISLLDQLDKDINTFSMRVREWYGYHFPELVKIINDNATYCRLAQFIGNRRELNEDKLEKLEELTMDGAKAKAILDASRSSMGMDISAIDLINIESFSSRVVSLSEYRQSLHTYLRSKMSQVAPSLSALIGEAVGARLIAHAGSLTNLAKYPASTVQILGAEKALFRALKTRGNTPKYGLIFHSTFIGRAAAKNKGRISRYLANKCSIASRIDCFSEVPTSVFGEKLREQVEERLSFYETGEIPRKNLDVMKEAMVQAEAEEAAAEITRKLEKQEKKRLKKEKKRLAALALASSENSSSTPEECEEMSEKPKKKKKQKPQEVPQENGMEDPSISFSKPKKKKSFSKEELMSSDLEETAGSTSIPKRKKSTPKEETVNDPEEAGHRSGSKKKRKFSKEEPVSSGPEEAVGKSSSKKKKKFHKASQED

SEQ ID NO: 352 - protein, 428 aa, Homo sapiens [sequence omitted]

SEQ ID NO: 353 - protein, 655 aa, Homo sapiens [sequence omitted]

SEQ ID NO: 354 - protein, 602 aa, Homo sapiens
MKWVTFISLLFLFSSAYSRGVFRRDAHKSEVAHRFKDLGEENFKALVLIAFAQYLQQCPFEDHVKLVNEVTEFAKTCVADESAENCDKSLHTLFGDKLCTVATLRETYGEMADCCAKQEPERNECFLQHKDDNPNLPRLVRPEVDVMCTAFHDNEETFLKKYLYEIARRHPYFYAPELLFFAKRYKAAFTECCQAADKAACLLPKLDELRDEGKASSAKQRLKCASLQKFGERAFKAWAVARLSQRFPKAEFAEVSKLVTDLTKVHTECCHGDLLECADDRADLAKYICENQDSISSKLKECCEKPLLEKSHCIAEVENDEMPADLPSLAADFVESKDVCKNYAEAKDVFLGMFLYEYARRHPDYSVVLLLRLAKTYETTLEKCCAAADPHECYAKVFDEFKPLVEEPQNLIKQNCELFEQLGEYKFQNALLVRYTKKVPQVSTPTLVEVSRNLGKVGSKCCKHPEAKRMPCAEDYLCVLHEKTPVSDRVTKCCTESLVNRRPCFSALEVDETYVPKEFNAETFTFHADICTLSEKERQIKKQTALVELVKHKPKATKEQLKAVMDDFAAFVEKCCKADDKETCFAEEGKKLVAASQAALGL

SEQ ID NO: 355 - protein, 499 aa, Homo sapiens
MADCCAKQEPERNECFLQHKDDNPNLPRLVRPEVDVMCTAFHDNEETFLKKYLYEIARRHPYFYAPELLFFAKRYKAAFTECCQAADKAACLLPKLDELRDEGKASSAKQRLKCASLQKFGERAFKAWAVARLSQRFPKAEFAEVSKLVTDLTKVHTECCHGDLLECADDRADLAKYICENQDSISSKLKECCEKPLLEKSHCIAEVENDEMPADLPSLAADFVESKDVCKNYAEAKDVFLGMFLYEYARRHPDYSVVLLLRLAKTYETTLEKCCAAADPHECYAKVFDEFKPLVEEPQNLIKQNCELFEQLGEYKFQNALLVRYTKKVPQVSTPTLVEVSRNLGKVGSKCCKHPEAKRMPCAEDYLSVVLNQLCVLHEKTPVSDRVTKCCTESLVNRRPCFSALEVDETYVPKEFNAETFTFHADICTLSEKERQIKKQTALVELVKHKPKATKEQLKAVMDDFAAFVEKCCKADDKETCFAEEGKKLVAASQAALGL

SEQ ID NO: 356 - protein, 609 aa, Homo sapiens [sequence omitted]

SEQ ID NO: 357 - protein, 404 aa, Homo sapiens
LDELRDEGKASSAKQRLKCASLQKFGERAFKAWAVARLSQRFPKAEFAEVSKLVTDLTKVHTECCHGDLLECADDRADLAKYICENQDSISSKLKECCEKPLLEKSHCIAEVENDEMPADLPSLAADFVESKDVCKNYAEAKDVFLGMFLYEYARRHPDYSVVLLLRLAKTYETTLEKCCAAADPHECYAKVFDEFKPLVEEPQNLIKQNCELFEQLGEYKFQNALLVRYTKKVPQVSTPTLVEVSRNLGKVGSKCCKHPEAKRMPCAEDYLSVVLNQLCVLHEKTPVSDRVTKCCTESLVNRRPCFSALEVDETYVPKEFNAETFTFHADICTLSEKERQIKKQTALVELVKHKPKATKEQLKAVMDDFAAFVEKCCKADDKETCFAEEGKKLVAASQAALGL

SEQ ID NO: 358 - protein, 499 aa, Homo sapiens; identical to SEQ ID NO: 355

SEQ ID NO: 359 - protein, 609 aa, Homo sapiens [sequence omitted]

SEQ ID NO: 360 - protein, 463 aa, Homo sapiens [sequence omitted]

SEQ ID NO: 361 - protein, 404 aa, Homo sapiens; identical to SEQ ID NO: 357

SEQ ID NO: 362 - protein, 510 aa, Homo sapiens [sequence omitted]

SEQ ID NO: 363 - protein, 426 aa, Homo sapiens
NCQKTSLLLCPGTPFLCCLLPKLDELRDEGKASSAKQRLKCASLQKFGERAFKAWAVARLSQRFPKAEFAEVSKLVTDLTKVHTECCHGDLLECADDRADLAKYICENQDSISSKLKECCEKPLLEKSHCIAEVENDEMPADLPSLAADFVESKDVCKNYAEAKDVFLGMFLYEYARRHPDYSVVLLLRLAKTYETTLEKCCAAADPHECYAKVFDEFKPLVEEPQNLIKQNCELFEQLGEYKFQNALLVRYTKKVPQVSTPTLVEVSRNLGKVGSKCCKHPEAKRMPCAEDYLSVVLNQLCVLHEKTPVSDRVTKCCTESLVNRRPCFSALEVDETYVPKEFNAETFTFHADICTLSEKERQIKKQTALVELVKHKPKATKEQLKAVMDDFAAFVEKCCKADDKETCFAEEGKKLVAASQAALGL

SEQ ID NO: 364 - protein, 405 aa, Homo sapiens
KLDELRDEGKASSAKQRLKCASLQKFGERAFKAWAVARLSQRFPKAEFAEVSKLVTDLTKVHTECCHGDLLECADDRADLAKYICENQDSISSKLKECCEKPLLEKSHCIAEVENDEMPADLPSLAADFVESKDVCKNYAEAKDVFLGMFLYEYARRHPDYSVVLLLRLAKTYETTLEKCCAAADPHECYAKVFDEFKPLVEEPQNLIKQNCELFEQLGEYKFQNALLVRYTKKVPQVSTPTLVEVSRNLGKVGSKCCKHPEAKRMPCAEDYLSVVLNQLCVLHEKTPVSDRVTKCCTESLVNRRPCFSALEVDETYVPKEFNAETFTFHADICTLSEKERQIKKQTALVELVKHKPKATKEQLKAVMDDFAAFVEKCCKADDKETCFAEEGKKLVAASQAALGL

SEQ ID NO: 365 - protein, 417 aa, Homo sapiens
MKWVTFISLLFLFSSAYSRGVFRRDAHKSEVAHRFKDLGEENFKALAVARLSQRFPKAEFAEVSKLVTDLTKVHTECCHGDLLECADDRADLAKYICENQDSISSKLKECCEKPLLEKSHCIAEVENDEMPADLPSLAADFVESKDVCKNYAEAKDVFLGMFLYEYARRHPDYSVVLLLRLAKTYETTLEKCCAAADPHECYAKVFDEFKPLVEEPQNLIKQNCELFEQLGEYKFQNALLVRYTKKVPQVSTPTLVEVSRNLGKVGSKCCKHPEAKRMPCAEDYLSVVLNQLCVLHEKTPVSDRVTKCCTESLVNRRPCFSALEVDETYVPKEFNAETFTFHADICTLSEKERQIKKQTALVELVKHKPKATKEQLKAVMDDFAAFVEKCCKADDKETCFAEEGKKLVAASQAALGL

SEQ ID NO: 366 - protein, 328 aa, Homo sapiens
ADLAKYICENQDSISSKLKECCEKPLLEKSHCIAEVENDEMPADLPSLAADFVESKDVCKNYAEAKDVFLGMFLYEYARRHPDYSVVLLLRLAKTYETTLEKCCAAADPHECYAKVFDEFKPLVEEPQNLIKQNCELFEQLGEYKFQNALLVRYTKKVPQVSTPTLVEVSRNLGKVGSKCCKHPEAKRMPCAEDYLSVVLNQLCVLHEKTPVSDRVTKCCTESLVNRRPCFSALEVDETYVPKEFNAETFTFHADICTLSEKERQIKKQTALVELVKHKPKATKEQLKAVMDDFAAFVEKCCKADDKETCFAEEGKKLVAASQAALGL

SEQ ID NO: 367 - protein, 518 aa, Homo sapiens
MKWVTFISLLFLFSSAYSRGVFRRDAHKSEVAHRFKDLGEENFKALVLIAFAQYLQQCPFEDHVKLVNEVTEFAKTCVADESAENCDKSLHTLFGDKLCTVATLRETYGEMADCCAKQEPERNECFLQHKDDNPNLPRLVRPEVDVMCTAFHDNEETFLKKYLYEIARRHPYFYAPELLFFAKRYKAAFTECCQAADKAACLLPKLDELRDEGKASSAKQRLKCASLQKFGERAFKAWAVARLSQRFPKAEFAEVSKLVTDLTKVHTECCHGDLLECADDRADLAKYICENQDSISSKLKECCEKPLLEKSHCIAEVENDEMPADLPSLAADFVESKDVCKNYAEAKDVFLGMFLYEYARRHPDYSVVLLLRLAKTYETTLEKCCAAADPHECYAKVFDEFKPLVEEPQNLIKQNCELFEQLGEYKFQNALLVRYTKKVPQVSTPTLVEVSRNLGKVGSKCCKHPEAKRMPCAEDYWKSMKHTFPKSLMLKHSPSMQIYAHFLRRRDKSRNKLHLLSS

SEQ ID NO: 368 - protein, 519 aa, Homo sapiens
MAESLYEIRFRENVEKRILCHMQLSSAQVEQLRQAIEELYYFEFVVDDLPIRGFVGYMEESGFLPHSHKIGLWTHLDFHLEFHGDRIIFANVSVRDVKPHSLDGLRPDEFLGLTHTYSVRWSETSVERRSDRRRGDDGGFFPRTLEIHWLSIINSMVLVFLLVGFVAVILMRVLRNDLARYNLDEETTSAGSGDDFDQGDNGWKIIHTDVFRFPPYRGLLCAVLGVGAQFLALGTGIIVMALLGMFNVHRHGAINSAAILLYALTCCISGYVSSHFYRQIGGERWVWNIILTTSLFSVPFFLTWSVVNSVHWANGSTQALPATTILLLLTVWLLVGFPLTVIGGIFGKNNASPFDAPCRTKNIAREIPPQPWYKSTVIHMTVGGFLPFSAISVELYYIFATVWGREQYTLYGILFFVFAILLSVGACISIALTYFQLSGEDYRWWWRSVLSVGSTGLFIFLYSVFYYARRSNMSGAVQTVEFFGYSLLTGYVFFLMLGTISFFSSLKFIRYIYVNLKMD

SEQ ID NO: 369 - protein, 489 aa, Homo sapiens
MTVVGNPRSWSCQWLPILILLLGTGHGPGVEGVTHYKAGDPVILYVNKVGPYHNPQETYHYYQLPVCCPEKIRHKSLSLGEVLDGDRMAESLYEIRFRENVEKRILCHMQLSSAQVEQLRQAIEELYYFEFVVDDLPIRGFVGYMEESGFLPHSHKIGLWTHLDFHLEFHGDRIIFANVSVRDVKPHSLDGLRPDEFLGLTHTYSVRWSETSVERRSDRRRGDDGGFFPRTLEIHWLSIINSMVLVFLLVGFVAVILMRVLRNDLARYNLDEETTSAGSGDDFDQGDNGWKIIHTDVFRFPPYRGLLCAVLGVGAQFLALGTGIIVMALLGMFNVHRHGAINSAAILLYALTCCISGYVSSHFYRQIGGERWVWNIILTTSLFSVPFFLTWSVVNSVHWANGSTQALPATTILLLLTVWLLVGFPLTVIGGIFGKNNASPFDAPCRTKNIAREIPPQPWYKSTVIHMTVGGFLPFRYPPFIPWLLLSGS

SEQ ID NO: 370 - protein, 606 aa, Homo sapiens
MTVVGNPRSWSCQWLPILILLLGTGHGPGVEGVTHYKAGDPVILYVNKVGPYHNPQETYHYYQLPVCCPEKIRHKSLSLGEVLDGDRMAESLYEIRFRENVEKRILCHMQLSSAQVEQLRQAIEELYYFEFVVDDLPIRGFVGYMEESGFLPHSHKIGLWTHLDFHLEFHGDRIIFANVSVRDVKPHSLDGLRPDEFLGLTHTYSVRWSETSVERRSDRRRGDDGGFFPRTLEIHWLSIINSMVLVFLLVGFVAVILMRVLRNDLARYNLDEETTSAGSGDDFDQGDNGWKIIHTDVFRFPPYRGLLCAVLGVGAQFLALGTGIIVMALLGMFNVHRHGAINSAAILLYALTCCISGYVSSHFYRQIGGERWVWNIILTTSLFSVPFFLTWSVVNSVHWANGSTQALPATTILLLLTVWLLVGFPLTVIGGIFGKNNASPFDAPCRTKNIAREIPPQPWYKSTVIHMTVGGFLPFSAISVELYYIFATVWGREQYTLYGILFFVFAILLSVGACISIALTYFQLSGEDYRWWWRSVLSVGSTGLFIFLYSVFYYARRSNMSGAVQTVEFFGYSLLTGYVFFLMLGTISFFSSLKFIRYIYVNLKMD

SEQ ID NO: 371 - protein, 462 aa, Homo sapiens
MEESGFLPHSHKIGLWTHLDFHLEFHGDRIIFANVSVRDVKPHSLDGLRPDEFLGLTHTYSVRWSETSVERRSDRRRGDDGGFFPRTLEIHWLSIINSMVLVFLLVGFVAVILMRVLRNDLARYNLDEETTSAGSGDDFDQGDNGWKIIHTDVFRFPPYRGLLCAVLGVGAQFLALGTGIIVMALLGMFNVHRHGAINSAAILLYALTCCISGYVSSHFYRQIGGERWVWNIILTTSLFSVPFFLTWSVVNSVHWANGSTQALPATTILLLLTVWLLVGFPLTVIGGIFGKNNASPFDAPCRTKNIAREIPPQPWYKSTVIHMTVGGFLPFSAISVELYYIFATVWGREQYTLYGILFFVFAILLSVGACISIALTYFQLSGEDYRWWWRSVLSVGSTGLFIFLYSVFYYARRSNMSGAVQTVEFFGYSLLTGYVFFLMLGTISFFSSLKFIRYIYVNLKMD

SEQ ID NO: 372 - protein, 606 aa, Homo sapiens
MTVVGNPRSWSCQWLPILILLLGTGHGPGVEGVTHYKAGDPVILYVNKVGPYHNPQETYHYYQLPVCCPEKIRHKSLSLGEVLDGDRMAESLYEIRFRENVEKRILCHMQLSSAQVEQLRQAIEELYYFEFVVDDLPIRGFVGYMEESGFLPHSHKIGLWTHLDFHLEFHGDRIIFANVSVRDVKPHSLDGLRPDEFLGLTHTYSVRWSETSVERRSDRRRGDDGGFFPRTLEIHWLSIINSMVLVFLLVGFVAVILMRVLRNDLARYNLDEETTSAGSGDDFDQGDNGWKIIHTDVFRFPPYRGLLCAVLGVGAQFLALGTGIIVMALLGMFNVHRHGAINSAAILLYALTCCISGYVSSHFYRQIGGERWVWNIILTTSLFSVPFFLTWSVVNSVHWANGSTQALPATTILLLLTVWLLVGFPLTVIGGIFGKNNASPFDAPCRTKNIAREINPQPWYKSTDIHMTVGGFLPFSAISVELYYIFATVWGREQYTLYGILFFVFAILLSVGASISIALTYFQLSGEDYRWWWRSVLSVGSTGLFIFLYSVFYYARRSNMSGAVQTVEFFGYSLLTGYVFFLMLGTISFFSSLKFIRYIYVNLKMD

SEQ ID NO: 373 - protein, 606 aa, Homo sapiens; identical to SEQ ID NO: 370

SEQ ID NO: 374 - protein, 440 aa, Homo sapiens
MSSCRGQKVAGGLRVVSPFPLCQPAGEPSQGKMRSSCVLLTALVALAAYYVYIPLPGSVSDPWKLMLLDATFRGAQQVSNLIHYLGLSHHLLALNFIIVSFGKKSAWSSAQVKVTDTDFDGVEVRVFEGPPKPEEPLKRSVVYIHGGGWALASAKIRYYDELCTAMAEELNAVIVSIEYRLVPKVYFPEQIHDVVRATKYFLKPEVLQKYMVDPGRICISGDSAGGNLAAALGQQFTQDASLKNKLKLQALIYPVLQALDFNTPSYQQNVNTPILPRYVMVKYWVDYFKGNYDFVQAMIVNNHTSLDVEEAAAVRARLNWTSLLPASFTKNYKPVVQTTGNARIVQELPQLLDARSAPLIADQAVLQLLPKTYILTCEHDVLRDDGIMYAKRLESAGVEVTLDHFEDGFHGCMIFTSWPTNFSVGIRTRNSYIKWLDQNL

SEQ ID NO: 375 - protein, 430 aa, Homo sapiens
MLVSLKMSYKAAAGEDYKADCPPGNPAPTSNHGPDATEAEEDFVDPWTVQTSSAKGIDYDKLIVRFGSSKIDKELINRIERATGQRPHHFLRRGIFFSHRDMNQVLDAYENKKPFYLYTGRGPSSEAMHVGHLIPFIFTKWLQDVFNVPLVIQMTDDEKYLWKDLTLDQAYSYAVENAKDIIACGFDINKTFIFSDLDYMGMSSGFYKNVVKIQKHVTFNQVKGIFGFTDSDCIGKISFPAIQAAPSFSNSFPQIFRDRTDIQCLIPCAIDQDPYFRMTRDVAPRIGYPKPALLHSTFFPALQGAQTKMSASDPNSSIFLTDTAKQIKTKVNKHAFSGGRDTIEEHRQFGGNCDVDVSFMYLTFFLEDDDKLEQIRKDYTSGAMLTGELKKALIEVLQPLIAEHQARRKEVTDEIVKEFMTPRKLSFDFQ

SEQ ID NO: 376 - protein, 445 aa, Homo sapiens
MTAKTFFIIHGWTMSGIFENWLHKLVSALHTREKDANVVVVDWLPLAHQLYTDAVNNTRVVGHSIARMLDWLQEKDDFSLGNVHLIGYSLGAHVAGYAGNFVKGTVGRITGLDPAGPMFEGADIHKRLSPDDADFVDVLHTYTRSFGLSIGIQMPVGHIDIYPNGGDFQPGCGLNDVLGSIAYGTITEVVKCEHERAVHLFVDSLVNQDKPSFAFQCTDSNRFKKGICLSCRKNRCNSIGYNAKKMRNKRNSKMYLKTRAGMPFRVYHYQMKIHVFSYKNMGEIEPTFYVTLYGTNADSQTLPLEIVERIEQNATNTFLVYTEEDLGDLLKIQLTWEGASQSWYNLWKEFRSYLSQPRNPGRELNIRRIRVKSGETQRKLTFCTEDPENTSISPGRELWFRKCRDGWRMKNETRSGQQFTKEPEQEHHFTEDEKKNYFNCSSLKA

SEQ ID NO: 377 - protein, 500 aa, Homo sapiens
MSNSVPLLCFWSLCYCFAAGSPVPFGPEGRLEDKLHKPKATQTEVKPSVRFNLRTSKDPEHEGCYLSVGHSQPLEDCSFNMTAKTFFIIHGWTMSGIFENWLHKLVSALHTREKDANVVVVDWLPLAHQLYTDAVNNTRVVGHSIARMLDWLQEKDDFSLGNVHLIGYSLGAHVAGYAGNFVKGTVGRITGLDPAGPMFEGADIHKRLSPDDADFVDVLHTYTRSFGLSIGIQMPVGHIDIYPNGGDFQPGCGLNDVLGSIAYGTITEVVKCEHERAVHLFVDSLVNQDKPSFAFQCTDSNRFKKGICLSCRKNRCNSIGYNAKKMRNKRNSKMYLKTRAGMPFRVYHYQMKIHVFSYKNMGEIEPTFYVTLYGTNADSQTLPLEIVERIEQNATNTFLVYTEEDLGDLLKIQLTWEGASQSWYNLWKEFRSYLSQPRNPGRELNIRRIRVKSGETQRKLTFCTEDPENTSISPGRELWFRKCRDGWRMKNETSPTVELP

SEQ ID NO: 378 - protein, 500 aa, Homo sapiens; identical to SEQ ID NO: 377

SEQ ID NO: 379 - protein, 500 aa, Homo sapiens; identical to SEQ ID NO: 377

SEQ ID NO: 380 - protein, 72 aa, Homo sapiens
STIFPLVNSIHRLYRVTVITKCFFLSKYPEFFTSSRDCRFLSSLPLGHCQETERPLNQQLDKEDLKSWEETV

SEQ ID NO: 381 - protein, 23 aa, Homo sapiens
PHQSGAPKCFFLSKAALSTGYVQ

SEQ ID NO: 382 - protein, 23 aa, Homo sapiens
PHQSGAPKCFFLSKAALSTGYVQ

SEQ ID NO: 383 - protein, 14 aa, Homo sapiens
MYFNFKCFFISKNI

SEQ ID NO: 384 - protein, 993 aa, Homo sapiens
MAAEWASRFWLWATLLIPAAAVYEDQVGKFDWRQQYVGKVKFASLEFSPGSKKLVVATEKNVIAALNSRTGEILWRHVDKGTAEGAVDAMLLHGQDVITVSNGGRIMRSWETNIGGLNWEITLDSGSFQALGLVGLQESVRYIAVLKKTTLALHHLSSGHLKWVEHLPESDSIHYQMVYSYGSGVVWALGVVPFSHVNIVKFNVEDGEIVQQVRVSTPWLQHLSGACGVVDEAVLVCPDPSSRSLQTLALETEWELRQIPLQSLDLEFGSGFQPRVLPTQPNPVDASRAQFFLHLSPSHYALLQYHYGTLSLLKNFPQTALVSFATTGEKTVAAVMACRNEVQKSSSSEDGSMGSFSEKSSSKDSLACFNQTYTINLYLVETGRRLLDTTITFSLEQSGTRPERLYIQVFLKKDDSVGYRALVQTEDHLLLFLQQLAGKVVLWSREESLAEVVCLEMVDLPLTGAQAELEGEFGKKADGLLGMFLKRLSSQLILLQAWTSHLWKMFYDARKPRSQIKNEINIDTLARDEFNLQKMMVMVTASGKLFGIESSSGTILWKQYLPNVKPDSSFKLMVQRTTAHFPHPPQCTLLVKDKESGMSSLYVFNPIFGKWSQVAPPVLKRPILQSLLLPVMDQDYAKVLLLIDDEYKVTAFPATRNVLRQLHELAPSIFFYLVDAEQGRLCGYRLRKDLTTELSWELTIPPEVQRIVKVKGKRSSEHVHSQGRVMGDRSVLYKSLNPNLLAVVTESTDAHHERTFIGIFLIDGVTGRIIHSSVQKKAKGPVHIVHSENWVVYQYWNTKARRNEFTVLELYEGTEQYNATAFSSLDRPQLPQVLQQSYIFPSSISAMEATITERGITSRHLLIGLPSGAILSLPKALLDPRRPEIPTEQSREENLIPYSPDVQIHAERFINYNQTVSRMRGIYTAPSGLESTCLVVAYGLDIYQTRVYPSKQFDVLKDDYDYVLISSVLFGLVFATMITKRLAQVKLLNRAWR

SEQ ID NO: 385 - protein, 943 aa, Homo sapiens
MAAEWASRFWLWATLLIPAAAVYEDQVGKFDWRQQYVGKVKFASLEFSPGSKKLVVATEKNVIAALNSRTGEILWRHVDKGTAEGAVDAMLLHGQDVITVSNGGRIMRSWETNIGGLNWEITLDSGSFQALGLVGLQESVRYIAVLKKTTLALHHLSSGHLKWVEHLPESDSIHYQMVYSYGSGVVWALGVVPFSHVNIVKFNVEDGEIVQQSLDLEFGSGFQPRVLPTQPNPVDASRAQFFLHLSPSHYALLQYHYGTLSLLKNFPQTALVSFATTGEKTVAAVMACRNEVVSIENNSQHLGFSFLVSTRNPENQKSGHIDLQKSSSSEDGSMGSFSEKSSSKDSLACFNQTYTINLYLVETGRRLLDTTITFSLEQSGTRPERLYIQVFLKKDDSVGYRALVQTEDHLLLFLQQLAGKVVLWSREESLAEVVCLEMVDLPLTGAQAELEGEFGKKADGLLGMFLKRLSSQLILLQAWTSHLWKMFYDARKPRSQIKNEINIDTLARDEFNLQKMMVMVTASGKLFGIESSSGTILWKQYLPNVKPDSSFKLMVQRTTAHFPHPPQCTLLVKDKSLLLPVMDQDYAKVLLLIDDEYKVTAFPATRNVLRQLHELAPSIFFYLVDAEQGRLCGYRLRKDLTTELSWELTIPPEVQRIVKVKGKRSSEHVHSQGRVMGDRSVLYKSLNPNLLAVVTESTDAHHERTFIGIFLIDGVTGRIIHSSVQKKAKGPVHIVHSENWVVYQYWNTKARRNEFTVLELYEGTEQYNATAFSSLDRPQLPQVLQQSYIFPSSISAMEATITERGITSRHLLIGLPSGAILSLPKALLDPRRPEIPTEQSREENLIPYSPDVQIHAERFINYNQTVSRMRGIYTAPSGLESTCLVVAYGLDIYQTRVYPSKQFDVLKDDYDYVLISSVLFGLVFATMITKRLAQVKLLNRAWR

SEQ ID NO: 386 - protein, 971 aa, Homo sapiens
MAAEWASRFWLWATLLIPAAAVYEDQVGKFDWRQQYVGKVKFASLEFSPGSKKLVVATEKNVIAALNSRTGEIYVITVSNGGRIMRSWETNIGGLNWEITLDSGSFQALGLVGLQESVRYIAVLKKTTLALHHLSSGHLKWVEHLPESDSIHYQMVYSYGSGVVWALGVVPFSHVNIVKFNVEDGEIVQQVRVSTPWLQHLSGACGVVDEAVLVCPDPSSRSLQTLALETEWELRQIPLQSLDLEFGSGFQPRVLPTQPNPVDASRAQFFLHLSPSHYALLQYHYGTLSLLKNFPQTALVSFATTGEKTVAAVMACRNEVQKSSSSEDGSMGSFSEKSSSKDSLACFNQTYTINLYLVETGRRLLDTTITFSLEQSGTRPERLYIQVFLKKDDSVGYRALVQTEDHLLLFLQQLAGKVVLWSREESLAEVVCLEMVDLPLTGAQAELEGEFGKKADGLLGMFLKRLSSQLILLQAWTSHLWKMFYDARKPRSQIKNEINIDTLARDEFNLQKMMVMVTASGKLFGIESSSGTILWKQYLPNVKPDSSFKLMVQRTTAHFPHPPQCTLLVKDKESGMSSLYVFNPIFGKWSQVAPPVLKRPILQSLLLPVMDQDYAKVLLLIDDEYKVTAFPATRNVLRQLHELAPSIFFYLVDAEQGRLCGYRLRKDLTTELSWELTIPPEVQRIVKVKGKRSSEHVHSQGRVMGDRSVLYKSLNPNLLAVVTESTDAHHERTFIGIFLIDGVTGRIIHSSVQKKAKGPVHIVHSENWVVYQYWNTKARRNEFTVLELYEGTEQYNATAFSSLDRPQLPQVLQQSYIFPSSISAMEATITERGITSRHLLIGLPSGAILSLPKALLDPRRPEIPTEQSREENLIPYSPDVQIHAERFINYNQTVSRMRGIYTAPSGLESTCLVVAYGLDIYQTRVYPSKQFDVLKDDYDYVLISSVLFGLVFATMITKRLAQVKLLNRAWR

SEQ ID NO: 387 - protein, 501 aa, Homo sapiens
MQVCSQPQRGCVREQSAINTAPPSAHNAASPGGARGHRVPLTEACKDSRIGGMMKTLLLFVGLLLTWESGQVLGDQTVSDNELQEMSNQGSKYVNKEIQNAVNGVKQIKTLIEKTNEERKTLLSNLEEAKKKKEDALNETRESETKLKELPGVCNETMMALWEECKPCLKQTCMKFYARVCRSGSGLVGRQLEEFLNQSSPFYFWMNGDRIDSLLENDRQQTHMLDVMQDHFSRASSIIDELFQDRFFTREPQDTYHYLPFSLPHRRPHFFFPKSRIVRSLMPFSPYEPLNFHAMFQPFLEMIHEAQQAMDIHFHSPAFQHPPTEFIREGDDDRTVCREIRHNSTGCLRMKDQCDKCREILSVDCSTNNPSQAKLRRELDESLQVAERLTRKYNELLKSYQWKMLNTSSLLEQLNEQFNWVSRLANLTQGEDQYYLRVTTVASHTSDSDVPSGVTEVVVKLFDSDPITVTVPVEVSRKNPKFMETVAEKALQEYRKKHREE

SEQ ID NO: 388 - protein, 449 aa, Homo sapiens
MMKTLLLFVGLLLTWESGQVLGDQTVSDNELQEMSNQGSKYVNKEIQNAVNGVKQIKTLIEKTNEERKTLLSNLEEAKKKKEDALNETRESETKLKELPGVCNETMMALWEECKPCLKQTCMKFYARVCRSGSGLVGRQLEEFLNQSSPFYFWMNGDRIDSLLENDRQQTHMLDVMQDHFSRASSIIDELFQDRFFTREPQDTYHYLPFSLPHRRPHFFFPKSRIVRSLMPFSPYEPLNFHAMFQPFLEMIHEAQQAMDIHFHSPAFQHPPTEFIREGDDDRTVCREIRHNSTGCLRMKDQCDKCREILSVDCSTNNPSQAKLRRELDESLQVAERLTRKYNELLKSYQWKMLNTSSLLEQLNEQFNWVSRLANLTQGEDQYYLRVTTVASHTSDSDVPSGVTEVVVKLFDSDPITVTVPVEVSRKNPKFMETVAEKALQEYRKKHREE

SEQ ID NO: 389 - protein, 410 aa, Homo sapiens
MVCFRLFPVPGSGLVLVCLVLGAVRSYALELNLTDSENATCLYAKWQMNFTVRYETTNKTYKTVTISDHGTVTYNGSICGDDQNGPKIAVQFGPGFSWIANFTKAASTYSIDSVSFSYNTGDNTTFPDAEDKGILTVDELLAIRIPLNDLFRCNSLSTLEKNDVVQHYWDVLVQAFVQNGTVSTNEFLCDKDKTSTVAPTIHTTVPSPTTTPTPKEKPEAGTYSVNNGNDTCLLATMGLQLNITQDKVASVININPNTTHSTGSCRSHTALLRLNSSTIKYLDFVFAVKNENRFYLKEVNISMYLVNGSVFSIANNNLSYWDAPLGSSYMCNKEQTVSVSGAFQINTFDLRVQPFNVTQGKYSTAQDCSADDDNFLVPIAVGAALAGVLILVLLAYFIGLKHHHAGYEQF

SEQ ID NO: 390 - protein, 411 aa, Homo sapiens
MVCFRLFPVPGSGLVLVCLVLGAVRSYALELNLTDSENATCLYAKWQMNFTVRYETTNKTYKTVTISDHGTVTYNGSICGDDQNGPKIAVQFGPGFSWIANFTKAASTYSIDSVSFSYNTGDNTTFPDAEDKGILTVDELLAIRIPLNDLFRCNSLSTLEKNDVVQHYWDVLVQAFVQNGTVSTNEFLCDKDKTSTVAPTIHTTVPSPTTTPTPKEKPEAGTYSVNNGNDTCLLATMGLQLNITQDKVASVININPNTTHSTGSCRSHTALLRLNSSTIKYLDFVFAVKNENRFYLKEVNISMYLVNGSVFSIANNNLSYWDAPLGSSYMCNKEQTVSVSGAFQINTFDLRVQPFNVTQGKYSTAEECSADSDLNFLIPVAVGVALGFLIIVVFISYMIGRRKSRTGYQSV

SEQ ID NO: 391 - protein, 410 aa, Homo sapiens
MVCFRLFPVPGSGLVLVCLVLGAVRSYALELNLTDSENATCLYAKWQMNFTVRYETTNKTYKTVTISDHGTVTYNGSICGDDQNGPKIAVQFGPGFSWIANFTKAASTYSIDSVSFSYNTGDNTTFPDAEDKGILTVDELLAIRIPLNDLFRCNSLSTLEKNDVVQHYWDVLVQAFVQNGTVSTNEFLCDKDKTSTVAPTIHTTVPSPTTTPTPKEKPEAGTYSVNNGNDTCLLATMGLQLNITQDKVASVININPNTTHSTGSCRSHTALLRLNSSTIKYLDFVFAVKNENRFYLKEVNISMYLVNGSVFSIANNNLSYWDAPLGSSYMCNKEQTVSVSGAFQINTFDLRVQPFNVTQGKYSTAQECSLDDDTILIPIIVGAGLSGLIIVIVIAYVIGRRKSYAGYQTL

SEQ ID NO: 392 - protein, 410 aa, Homo sapiens; identical to SEQ ID NO: 389

SEQ ID NO: 393 - protein, 410 aa, Homo sapiens; identical to SEQ ID NO: 391

SEQ ID NO: 394 - protein, 439 aa, Homo sapiens
MFSKLAHLQRFAVLSRGVHSSVASATSVATKKTVQGPPTSDDIFEREYKYGAHNYHPLPVALERGKGIYLWDVEGRKYFDFLSSYSAVNQGHCHPKIVNALKSQVDKLTLTSRAFYNNVLGEYEEYITKLFNYHKVLPMNTGVEAGETACKLARKWGYTVKGIQKYKAKIVFAAGNFWGRTLSAISSSTDPTSYDGFGPFMPGFDIIPYNDLPALERALQDPNVAAFMVEPIQGEAGVVVPDPGYLMGVRELCTRHQVLFIADEIQTGLARTGRWLAVDYENVRPDIVLLGKALSGGLYPVSAVLCDDDIMLTIKPGEHGSTYGGNPLGCRVAIAALEVLEEENLAENADKLGIILRNELMKLPSDVVTAVRGKGLLNAIVIKETKDWDAWKVCLRLRDNGLLAKPTHGDIIRFAPPLVIKEDELRESIEIINKTILSF

SEQ ID NO: 395 - protein, 439 aa, Homo sapiens; identical to SEQ ID NO: 394

SEQ ID NO: 396 - protein, 267 aa, Homo sapiens
MFSKLAPLQRFAVLSRGAHSSVASATSVATKKTVQGPPTSDYIFERESKCGAHNYHPLPVALERGKCIYLWDVEGRKYFDFLSSYSAVNQGHCHPKIVNALKSQGKKLTLTSRAFYNNVLGEYEEYITKLFNYHKVLPMNTGMEAGETACKLAHKWGYTVKGIQKYKAKVISAAGNFWGRTFSAISSSTDLTSYDGFGPFMPGFDVIPCNDLPALESAFQNPNVAAFMVEPIQGEAGVVPDPGYLMGVRELCTRHQDLYIADEIQSG

SEQ ID NO: 397 - protein, 308 aa, Homo sapiens
MFSKLAPLQRFAVLSRGAHSSKTVQGPPTSDYIFERESKCGAHNYHPLPVALERGKCIYLWDVEGRKYFDFLSSYSAVNQGHCHPKIVNALKSQGKKLTLTSRAFYNNVLGEYEEYITKLFNYHKVLPMNTGMEAGETACKLAHKWGYTVKGIQKYKAKVISAAGNFWGRTFSAISSSTDLTSYDGFGPFMPGFDVIPCNDLPALESAFQNPNVAAFMVEPIQGEAGVVPDPVLWDDDIMLTIKPGECGSTYGGNPLGCQVTIAALEVLEEENLAENTEKKWVSPLLVVKGDEIRESSELINKAILSF

SEQ ID NO: 398 - protein, 439 aa, Homo sapiens; identical to SEQ ID NO: 394

SEQ ID NO: 399 - protein, 362 aa, Homo sapiens [sequence omitted]

SEQ ID NO: 400 - protein, 362 aa, Homo sapiens [sequence omitted]

SEQ ID NO: 401 - protein, 362 aa, Homo sapiens [sequence omitted]

SEQ ID NO: 402 - protein, 362 aa, Homo sapiens [sequence omitted]

SEQ ID NO: 403 - protein, 362 aa, Homo sapiens [sequence omitted]

SEQ ID NO: 404 - protein, 362 aa, Homo sapiens [sequence omitted]

SEQ ID NO: 405 - protein, 362 aa, Homo sapiens [sequence omitted]

SEQ ID NO: 406 - protein, 366 aa, Homo sapiens [sequence omitted]

SEQ ID NO: 407 - protein, 362 aa, Homo sapiens [sequence omitted]

SEQ ID NO: 408 - protein, 401 aa, Homo sapiens
MPVQLSEHPEWNESMHSLRISVGGLPVLASMTKAADPRFRPRWKVILTFFVGAAILWLLCSHRPAPGRPPTHNAHNWRLGQAPANWYNDTYPLSPPQRTPAGIRYRIAVIADLDTESRAQEENTWFSYLKKGYLTLSDSGDKVAVEWDKDHGVLESHLAEKGRGMELSDLIVFNGKLYSVDDRTGVVYQIEGSKAVPWVILSDGDGTVEKGFKAEWLAVKDERLYVGGLGKEWTTTTGDVVNENPEWVKVVGYKGSVDHENWVSNYNALRAAAGIQPPGYLIHESACWSDTLQRWFFLPRRASQERYSEKDDERKGANLLLSASPDFGDIAVSHVGAVVPTHGFSSFKFIPNTDDQIIVALKSEEDSGRVASYIMAFTLDGRFLLPETKIGSVKYEGIEFI

SEQ ID NO: 409 - protein, 222 aa, Homo sapiens [sequence omitted]

SEQ ID NO: 410 - protein, 401 aa, Homo sapiens; identical to SEQ ID NO: 408

SEQ ID NO: 411 - protein, 401 aa, Homo sapiens; identical to SEQ ID NO: 408

SEQ ID NO: 412 - protein, 401 aa, Homo sapiens; identical to SEQ ID NO: 408

SEQ ID NO: 413 - protein, 401 aa, Homo sapiens; identical to SEQ ID NO: 408

SEQ ID NO: 414 - protein, 401 aa, Homo sapiens; identical to SEQ ID NO: 408

SEQ ID NO: 415 - protein, 541 aa, Homo sapiens
MASMGTLAFDEYGRPFLIIKDQDRKSRLMGLEALKSHIMAAKAVANTMRTSLGPNGLDKMMVDKDGDVTVTNDGATILSMMDVDHQIAKLMVELSKSQDDEIGDGTTGVVVLAGALLEEAEQLLDRGIHPIRIADGYEQAARVAIEHLDKISDSVLVDIKDTEPLIQTAKTTLGSKVVNSCHRQMAEIAVNAVLTVADMERRDVDFELIKVEGKVGGRLEDTKLIKGVIVDKDFSHPQMPKKVEDAKIAILTCPFEPPKPKTKHKLDVTSVEDYKALQKYEKEKFEEMIQQIKETGANLAICQWGFDDEANHLLLQNNLPAVRWVGGPEIELIAIATGGRIVPRFSELTAEKLGFAGLVQEISFGTTKDKMLVIEQCKNSRAVTIFIRGGNKMIIEEAKRSLHDALCVIRNLIRDNRVVYGGGAAEISCALAVSQEADKCPTLEQYAMRAFADALEVIPMALSENSGMNPIQTMTEVRARQVKEMNPALGIDCLHKGTNDMKQQHVIETLIGKKQQISLATQMVRMILKIDDIRKPGESEE

SEQ ID NO: 416 - protein, 519 aa, Homo sapiens [sequence omitted]

SEQ ID NO: 417 - protein, 541 aa, Homo sapiens; identical to SEQ ID NO: 415

SEQ ID NO: 418 - protein, 168 aa, Homo sapiens
MFWKLSLSLFMVAVLVKVAEARKNRPAGAIHSPYKDGSSNNSERWQHQIKEVLASSQEALVVTERKYLKSDWCKTQPLRQTVSEEGCRSRTILNRFCYGQCNSFYIPRHVKKEEESFQSCAFCKPQRVTSVLVELECPGLDPPFRLKKIQKVKQCRCMSVNLSDSDKQ

SEQ ID NO: 419 - protein, 1176 aa, Homo sapiens
MAERKGTAKVDFLKKIEKEIQQKWDTERVFEVNASNLEKQTSKGKYFVTFPYPYMNGRLHLGHTFSLSKCEFAVGYQRLKGKCCLFPFGLHCTGMPIKACADKLKREIELYGCPPDFPDEEEEEEETSVKTEDIIIKDKAKGKKSKAAAKAGSSKYQWGIMKSLGLSDEEIVKFSEAEHWLDYFPPLAIQDLKRMGLKVDWRRSFITTDVNPYYDSFVRWQFLTLRERNKIKFGKRYTIYSPKDGQPCMDHDRQTGEGVGPQEYTLLKLKALEPYPSKLSGLKGKNIFLVAATLRPETMFGQTNCWVRPDMKYIGFETVNGDIFICTQKAARNMSYQGFTKDNGVVPVVKELMGEEILGASLSAPLTSYKVIYVLPMLTIKEDKGTGVVTSVPSDSPDDIAALRDLKKKQALRAKYGIRDDMVLPFEPVPVIEIPGFGNLSAVTICDELKIQSQNDREKLAEAKEKIYLKGFYEGIMLVDGFKGQKVQDVKKTIQKKMIDAGDALIYMEPEKQVMSRSSDECVVALCDQWYLDYGEENWKKQTSQCLKNLETFCEETRRNFEATLGWLQEHACSRTYGLGTHLPWDEQWLIESLSDSTIYMAFYTVAHLLQGGNLHGQAESPLGIRPQQMTKEVWDYVFFKEAPFPKTQIAKEKLDQLKQEFEFWYPVDLRVSGKDLVPNHLSYYLYNHVAMWPEQSDKWPTAVRANGHLLLNSEKMSKSTGNFLTLTQAIDKFSADGMRLALADAGDTVEDANFVEAMADAGILRLYTWVEWVKEMVANWDSLRSGPASTFNDRVFASELNAGIIKTDQNYEKMMFKEALKTGFFEFQAAKDKYRELAVEGMHRELVFRFIEVQTLLLAPFCPHLCEHIWTLLGKPDSIMNASWPVAGPVDEVLIHSSQYLMEVTHDLRLRLKNYMMPAKGKKTDKQPLQKPSHCTIYVAKNYPPWQHTTLSVLRKHFEANNGKLPDNKVIASELGSMPELKKYMKKVMPFVAMIKENLEKMGPRILDLQLEFDEKAVLMENIVYLTNSLELEHIEVKFASEAEDKIREDCCPGKPLNVFRIEPGVSVSLVNPQPSNGHFSTKIEIKQGDNCDSIIRRLMKMNRGIKDLSKVKLMRFDDPLLGPRRVPVLGKEYTEKTPISEHAVFNVDLMSKKIHLTENGIRVDIGDTIIYLVH

SEQ ID NO: 420 - protein, 1176 aa, Homo sapiens
MAERKGTAKVDFLKKIEKEIQQKWDTERVFEVNASNLEKQTSKGKYFVTFPYPYMNGRLHLGHTFSLSKCEFAVGYQRLKGKCCLFPFGLHCTGMPIKACADKLKREIELYGCPPDFPDEEEEEEETSVKTEDIIIKDKAKGKKSKAAAKAGSSKYQWGIMKSLGLSDEEIVKFSEAEHWLDYFPPLAIQDLKRMGLKVDWRRSFITTDVNPYYDSFVRWQFLTLRERNKIKFGKRYTIYSPKDGQPCMDHDRQTGEGVGPQEYTLLKLKVLEPYPSKLSGLKGKNIFLVAATLRPETMFGQTNCWVRPDMKYIGFETVNGDIFICTQKAARNMSYQGFTKDNGVVPVVKELMGEEILGASLSAPLTSYKVIYVLPMLTIKEDKGTGVVTSVPSDSPDDIAALRDLKKKQALRAKYGIRDDMVLPFEPVPVIEIPGFGNLSAVTICDELKIQSQNDREKLAEAKEKIYLKGFYEGIMLVDGFKGQKVQDVKKTIQKKMIDAGDALIYMEPEKQVMSRSSDECVVALCDQWYLDYGEENWKKQTSQCLKNLETFCEETRRNFEATLGWLQEHACSRTYGLGTHLPWDEQWLIESLSDSTIYMAFYTVAHLLQGGNLHGQAESPLGIRPQQMTKEVWDYVFFKEAPFPKTQIAKEKLDQLKQEFEFWYPVDLRVSGKDLVPNHLSYYLYNHVAMWPEQSDKWPTAVRANGHLLLNSEKMSKSTGNFLTLTQAIDKFSADGMRLALADAGDTVEDANFVEAMADAGILRLYTWVEWVKEMVANWDSLRSGPASTFNDRVFASELNAGIIKTDQNYEKMMFKEALKTGFFEFQAAKDKYRELAVEGMHRELVFRFIEVQTLLLAPFCPHLCEHIWTLLGKPDSIMNASWPVAGPVNEVLIHSSQYLMEVTHDLRLRLKNYMMPAKGKKTDKQPLQKPSHCTIYVAKNYPPWQHTTLSVLRKHFEANNGKLPDNKVIASELGSMPELKKYMKKVMPFVAMIKENLEKMGPRILDLQLEFDEKAVLMENIVYLTNSLELEHIEVKFASEAEDKIREDCCPGKPLNVFRIEPGVSVSLVNPQPSNGHFSTKIEIRQGDNCDSIIRRLMKMNRGIKDLSKVKLMRFDDPLLGPRRVPVLGKEYTEKTPISEHAVFNVDLMSKKIHLTENGIRVDIGDTIIYLVH

SEQ ID NO: 421 - protein, 1093 aa, Homo sapiens [sequence omitted]

SEQ ID NO: 422 - protein, 1176 aa, Homo sapiens; identical to SEQ ID NO: 420

SEQ ID NO: 423 - protein, 1805 aa, Homo sapiens
MAGPRPSPWARLLLAALISVSLSGTLANRCKKAPVKSCTECVRVDKDCAYCTDEMFRDRRCNTQAELLAAGCQRESIVVMESSFQITEETQIDTTLRRSQMSPQGLRVRLRPGEERHFELEVFEPLESPVDLYILMDFSNSMSDDLDNLKKMGQNLARVLSQLTSDYTIGFGKFVDKVSVPQTDMRPEKLKEPWPNSDPPFSFKNVISLTEDVDEFRNKLQGERISGNLDAPEGGFDAILQTAVCTRDIGWRPDSTHLLVFSTESAFHYEADGANVLAGIMSRNDERCHLDTTGTYTQYRTQDYPSVPTLVRLLAKHNIIPIFAVTNYSYSYYEKLHTYFPVSSLGVLQEDSSNIVELLEEAFNRIRSNLDIRALDSPRGLRTEVTSKMFQKTRTGSFHIRRGEVGIYQVQLRALEHVDGTHVCQLPEDQKGNIHLKPSFSDGLKMDAGIICDVCTCELQKEVRSARCSFNGDFVCGQCVCSEGWSGQTCNCSTGSLSDIQPCLREGEDKPCSGRGECQCGHCVCYGEGRYEGQFCEYDNFQCPRTSGFLCNDRGRCSMGQCVCEPGWTGPSCDCPLSNATCIDSNGGICNGRGHCECGRCHCHQQSLYTDTICEINYSAIHPGLCEDLRSCVQCQAWGTGEKKGRTCEECNFKVKMVDELKRAEEVVVRCSFRDEDDDCTYSYTMEGDGAPGPNSTVLVHKKKDCPPGSFWWLIPLLLLLLPLLALLLLLCWKYCACCKACLALLPCCNRGHMVGFKEDHYMLRENLMASDHLDTPMLRSGNLKGRDVVRWKVTNNMQRPGFATHAASINPTELVPYGLSLRLARLCTENLLKPDTRECAQLRQEVEENLNEVYRQISGVHKLQQTKFRQQPNAGKKQDHTIVDTVLMAPRSAKPALLKLTEKQVEQRAFHDLKVAPGYYTLTADQDARGMVEFQEGVELVDVRVPLFIRPEDDDEKQLLVEAIDVPAGTATLGRRLVNITIIKEQARDVVSFEQPEFSVSRGDQVARIPVIRRVLDGGKSQVSYRTQDGTAQGNRDYIPVEGELLFQPGEAWKELQVKLLELQEVDSLLRGRQVRRFHVQLSNPKFGAHLGQPHSTTIIIRDPDELDRSFTSQMLSSQPPPHGDLGAPQNPNAKAAGSRKIHFNWLPPSGKPMGYRVKYWIQGDSESEAHLLDSKVPSVELTNLYPYCDYEMKVCAYGAQGEGPYSSLVSCRTHQEVPSEPGRLAFNVVSSTVTQLSWAEPAETNGEITAYEVCYGLVNDDNRPIGPMKKVLVDNPKNRMLLIENLRESQPYRYTVKARNGAGWGPEREAIINLATQPKRPMSIPIIPDIPIVDAQSGEDYDSFLMYSDDVLRSPSGSQRPSVSDDTEHLVNGRMDFAFPGSTNSLHRMTTTSAAAYGTHLSPHVPHRVLSTSSTLTRDYNSLTRSEHSHSTTLPRDYSTLTSVSSHGLPPIWEHGRSRLPLSWALGSRSRAQMKGFPPSRGPRDSIILAGRPAAPSWGPDSRLTAGVPDTPTRLVFSALGPTSLRVSWQEPRCERPLQGYSVEYQLLNGGELHRLNIPNPAQTSVVVEDLLPNHSYVFRVRAQSQEGWGREREGVITIESQVHPQSPLCPLPGSAFTLSTPSAPGPLVFTALSPDSLQLSWERPRRPNGDIVGYLVTCEMAQGGGPATAFRVDGDSPESRLTVPGLSENVPYKFKVQARTTEGFGPEREGIITIESQDGGPFPQLGSRAGLFQHPLQSEYSSITTTHTSATEPFLVDGLTLGAQHLEAGGSLTRHVTQEFVSRTLTTSGTLSTHMDQQFFQT

SEQ ID NO: 424 - protein, 1752 aa, Homo sapiens
MAGPRPSPWARLLLAALISVSLSGTLANRCKKAPVKSCTECVRVDKDCAYCTDEMFRDRRCNTQAELLAAGCQRESIVVMESSFQITEETQIDTTLRRSQMSPQGLRVRLRPGEERHFELEVFEPLESPVDLYILMDFSNSMSDDLDNLKKMGQNLARVLSQLTSDYTIGFGKFVDKVSVPQTDMRPEKLKEPWPNSDPPFSFKNVISLTEDVDEFRNKLQGERISGNLDAPEGGFDAILQTAVCTRDIGWRPDSTHLLVFSTESAFHYEADGANVLAGIMSRNDERCHLDTTGTYTQYRTQDYPSVPTLVRLLAKHNIIPIFAVTNYSYSYYEKLHTYFPVSSLGVLQEDSSNIVELLEEAFNRIRSNLDIRALDSPRGLRTEVTSKMFQKTRTGSFHIRRGEVGIYQVQLRALEHVDGTHVCQLPEDQKGNIHLKPSFSDGLKMDAGIICDVCTCELQKEVRSARCSFNGDFVCGQCVCSEGWSGQTCNCSTGSLSDIQPCLREGEDKPCSGRGECQCGHCVCYGEGRYEGQFCEYDNFQCPRTSGFLCNDRGRCSMGQCVCEPGWTGPSCDCPLSNATCIDSNGGICNGRGHCECGRCHCHQQSLYTDTICEINYSAIHPGLCEDLRSCVQCQAWGTGEKKGRTCEECNFKVKMVDELKRAEEVVVRCSFRDEDDDCTYSYTMEGDGAPGPNSTVLVHKKKDCPPGSFWWLIPLLLLLLPLLALLLLLCWKYCACCKACLALLPCCNRGHMVGFKEDHYMLRENLMASDHLDTPMLRSGNLKGRDVVRWKVTNNMQRPGFATHAASINPTELVPYGLSLRLARLCTENLLKPDTRECAQLRQEVEENLNEVYRQISGVHKLQQTKFRQQPNAGKKQDHTIVDTVLMAPRSAKPALLKLTEKQVEQRAFHDLKVAPGYYTLTADQDARGMVEFQEGVELVDVRVPLFIRPEDDDEKQLLVEAIDVPAGTATLGRRLVNITIIKEQARDVVSFEQPEFSVSRGDQVARIPVIRRVLDGGKSQVSYRTQDGTAQGNRDYIPVEGELLFQPGEAWKELQVKLLELQEVDSLLRGRQVRRFHVQLSNPKFGAHLGQPHSTTIIIRDPDELDRSFTSQMLSSQPPPHGDLGAPQNPNAKAAGSRKIHFNWLPPSGKPMGYRVKYWIQGDSESEAHLLDSKVPSVELTNLYPYCDYEMKVCAYGAQGEGPYSSLVSCRTHQEVPSEPGRLAFNVVSSTVTQLSWAEPAETNGEITAYEVCYGLVNDDNRPIGPMKKVLVDNPKNRMLLIENLRESQPYRYTVKARNGAGWGPEREAIINLATQPKRPMSIPIIPDIPIVDAQSGEDYDSFLMYSDDVLRSPSGSQRPSVSDDTEHLVNGRMDFAFPGSTNSLHRMTTTSAAAYGTHLSPHVPHRVLSTSSTLTRDYNSLTRSEHSHSTTLPRDYSTLTSVSSHDSRLTAGVPDTPTRLVFSALGPTSLRVSWQEPRCERPLQGYSVEYQLLNGGELHRLNIPNPAQTSVVVEDLLPNHSYVFRVRAQSQEGWGREREGVITIESQVHPQSPLCPLPGSAFTLSTPSAPGPLVFTALSPDSLQLSWERPRRPNGDIVGYLVTCEMAQGGGPATAFRVDGDSPESRLTVPGLSENVPYKFKVQARTTEGFGPEREGIITIESQDGGPFPQLGSRAGLFQHPLQSEYSSITTTHTSATEPFLVDGLTLGAQHLEAGGSLTRHVTQEFVSRTLTTSGTLSTHMDQQFFQT

SEQ ID NO: 425 - protein, 734 aa, Homo sapiens
MAGPRPSPWARLLLAALISVSLSGTLANRCKKAPVKSCTECVRVDKDCAYCTDEMFRDRRCNTQAELLAAGCQRESIVVMESSFQITEETQIDTTLRRSQMSPQGLRVRLRPGEERHFELEVFEPLESPVDLYILMDFSNSMSDDLDNLKKMGQNLARVLSQLTSDYTIGFGKFVDKVSVPQTDMRPEKLKEPWPNSDPPFSFKNVISLTEDVDEFRNKLQGERISGNLDAPEGGFDAILQTAVCTRDIGWRPDSTHLLVFSTESAFHYEADGANVLAGIMSRNDERCHLDTTGTYTQYRTQDYPSVPTLVRLLAKHNIIPIFAVTNYSYSYYEKLHTYFPVSSLGVLQEDSSNIVELLEEAFNRIRSNLDIRALDSPRGLRTEVTSKMFQKTRTGSFHIRRGEVGIYQVQLRALEHVDGTHVCQLPEDQKGNIHLKPSFSDGLKMDAGIICDVCTCELQKEVRSARCSFNGDFVCGQCVCSEGWSGQTCNCSTGSLSDIQPCLREGEDKPCSGRGECQCGHCVCYGEGRYEGQFCEYDNFQCPRTSGFLCNDRGRCSMGQCVCEPGWTGPSCDCPLSNATCIDSNGIHPGLCEDLRSCVQCQAWGTGEKKGRTCEECNFKVKMVDELKRAEEVVVRCSFRDEDDDCTYSYTMEGDGAPGPNSTVLVHKKKGTTSPCLLLSRLPSGLLLVAHPPAPPPPAAPGPATAAMLEVLCLLQGLPGTSPVLQPRSHGGL

SEQ ID NO: 426 - protein, 964 aa, Homo sapiens
MAGPRPSPWARLLLAALISVSLSGTLANRCKKAPVKSCTECVRVDKDCAYCTDEMFRDRRCNTQAELLAAGCQRESIVVMESSFQITEETQIDTTLRRSQMSPQGLRVRLRPGEERHFELEVFEPLESPVDLYILMDFSNSMSDDLDNLKKMGQNLARVLSQLTSDYTIGFGKFVDKVSVPQTDMRPEKLKEPWPNSDPPFSFKNVISLTEDVDEFRNKLQGERISGNLDAPEGGFDAILQTAVCTRDIGWRPDSTHLLVFSTESAFHYEADGANVLAGIMSRNDERCHLDTTGTYTQYRTQDYPSVPTLVRLLAKHNIIPIFAVTNYSYSYYEKLHTYFPVSSLGVLQEDSSNIVELLEEAFNRIRSNLDIRALDSPRGLRTEVTSKMFQKTRTGSFHIRRGEVGIYQVQLRALEHVDGTHVCQLPEDQKGNIHLKPSFSDGLKMDAGIICDVCTCELQKEVRSARCSFNGDFVCGQCVCSEGWSGQTCNCSTGSLSDIQPCLREGEDKPCSGRGECQCGHCVCYGEGRYEGQFCEYDNFQCPRTSGFLCNDRGRCSMGQCVCEPGWTGPSCDCPLSNATCIDSNGGICNGRGHCECGRCHCHQQSLYTDTICEINYSAIHPGLCEDLRSCVQCQAWGTGEKKGRTCEECNFKVKMVDELKRAEEVVVRCSFRDEDDDCTYSYTMEGDGAPGPNSTVLVHKKKDCPPGSFWWLIPLLLLLLPLLALLLLLCWKYCACCKACLALLPCCNRGHMVGFKEDHYMLRENLMASDHLDTPMLRSGNLKGRDVVRWKVTNNMQRPGFATHAASINPTELVPYGLSLRLARLCTENLLKPDTRECAQLRQEVEENVRTQELGLAGDVAERGLQADLRCTQAPADQVPAAAQCREKARPHHCGHSADGAPLGQAGPAEAYREAGGTEGLPRPQGGPRLLHPHCRPGRPGHGGVPGGRGAGGRTGAPLYPA

SEQ ID NO: 427 - protein, 1822 aa, Homo sapiens
MAGPRPSPWARLLLAALISVSLSGTLANRCKKAPVKSCTECVRVDKDCAYCTDEMFRDRRCNTQAELLAAGCQRESIVVMESSFQITEETQIDTTLRRSQMSPQGLRVRLRPGEERHFELEVFEPLESPVDLYILMDFSNSMSDDLDNLKKMGQNLARVLSQLTSDYTIGFGKFVDKVSVPQTDMRPEKLKEPWPNSDPPFSFKNVISLTEDVDEFRNKLQGERISGNLDAPEGGFDAILQTAVCTRDIGWRPDSTHLLVFSTESAFHYEADGANVLAGIMSRNDERCHLDTTGTYTQYRTQDYPSVPTLVRLLAKHNIIPIFAVTNYSYSYYEKLHTYFPVSSLGVLQEDSSNIVELLEEAFNRIRSNLDIRALDSPRGLRTEVTSKMFQKTRTGSFHIRRGEVGIYQVQLRALEHVDGTHVCQLPEDQKGNIHLKPSFSDGLKMDAGIICDVCTCELQKEVRSARCSFNGDFVCGQCVCSEGWSGQTCNCSTGSLSDIQPCLREGEDKPCSGRGECQCGHCVCYGEGRYEGQFCEYDNFQCPRTSGFLCNDRGRCSMGQCVCEPGWTGPSCDCPLSNATCIDSNGGICNGRGHCECGRCHCHQQSLYTDTICEINYSAIHPGLCEDLRSCVQCQAWGTGEKKGRTCEECNFKVKMVDELKRAEEVVVRCSFRDEDDDCTYSYTMEGDGAPGPNSTVLVHKKKDCPPGSFWWLIPLLLLLLPLLALLLLLCWKYCACCKACLALLPCCNRGHMVGFKEDHYMLRENLMASDHLDTPMLRSGNLKGRDVVRWKVTNNMQRPGFATHAASINPTELVPYGLSLRLARLCTENLLKPDTRECAQLRQEVEENLNEVYRQISGVHKLQQTKFRQQPNAGKKQDHTIVDTVLMAPRSAKPALLKLTEKQVEQRAFHDLKVAPGYYTLTADQDARGMVEFQEGVELVDVRVPLFIRPEDDDEKQLLVEAIDVPAGTATLGRRLVNITIIKEQARDVVSFEQPEFSVSRGDQVARIPVIRRVLDGGKSQVSYRTQDGTAQGNRDYIPVEGELLFQPGEAWKELQVKLLELQEVDSLLRGRQVRRFHVQLSNPKFGAHLGQPHSTTIIIRDPDELDRSFTSQMLSSQPPPHGDLGAPQNPNAKAAGSRKIHFNWLPPSGKPMGYRVKYWIQGDSESEAHLLDSKVPSVELTNLYPYCDYEMKVCAYGAQGEGPYSSLVSCRTHQEVPSEPGRLAFNVVSSTVTQLSWAEPAETNGEITAYEVCYGLVNDDNRPIGPMKKVLVDNPKNRMLLIENLRESQPYRYTVKARNGAGWGPEREAIINLATQPKRPMSIPIIPDIPIVDAQSGEDYDSFLMYSDDVLRSPSGSQRPSVSDDTGCGWKFEPLLGEELDLRRVTWRLPPELIPRLSASSGRSSDAEAPHGPPDDGGAGGKGGSLPRSATPGPPGEHLVNGRMDFAFPGSTNSLHRMTTTSAAAYGTHLSPHVPHRVLSTSSTLTRDYNSLTRSEHSHSTTLPRDYSTLTSVSSHDSRLTAGVPDTPTRLVFSALGPTSLRVSWQEPRCERPLQGYSVEYQLLNGGELHRLNIPNPAQTSVVVEDLLPNHSYVFRVRAQSQEGWGREREGVITIESQVHPQSPLCPLPGSAFTLSTPSAPGPLVFTALSPDSLQLSWERPRRPNGDIVGYLVTCEMAQGGGPATAFRVDGDSPESRLTVPGLSENVPYKFKVQARTTEGFGPEREGIITIESQDGGPFPQLGSRAGLFQHPLQSEYSSITTTHTSATEPFLVDGLTLGAQHLEAGGSLTRHVTQEFVSRTLTTSGTLSTHMDQQFFQT

SEQ ID NO: 428 - protein, 1875 aa, Homo sapiens
MAGPRPSPWARLLLAALISVSLSGTLANRCKKAPVKSCTECVRVDKDCAYCTDEMFRDRRCNTQAELLAAGCQRESIVVMESSFQITEETQIDTTLRRSQMSPQGLRVRLRPGEERHFELEVFEPLESPVDLYILMDFSNSMSDDLDNLKKMGQNLARVLSQLTSDYTIGFGKFVDKVSVPQTDMRPEKLKEPWPNSDPPFSFKNVISLTEDVDEFRNKLQGERISGNLDAPEGGFDAILQTAVCTRDIGWRPDSTHLLVFSTESAFHYEADGANVLAGIMSRNDERCHLDTTGTYTQYRTQDYPSVPTLVRLLAKHNIIPIFAVTNYSYSYYEKLHTYFPVSSLGVLQEDSSNIVELLEEAFNRIRSNLDIRALDSPRGLRTEVTSKMFQKTRTGSFHIRRGEVGIYQVQLRALEHVDGTHVCQLPEDQKGNIHLKPSFSDGLKMDAGIICDVCTCELQKEVRSARCSFNGDFVCGQCVCSEGWSGQTCNCSTGSLSDIQPCLREGEDKPCSGRGECQCGHCVCYGEGRYEGQFCEYDNFQCPRTSGFLCNDRGRCSMGQCVCEPGWTGPSCDCPLSNATCIDSNGGICNGRGHCECGRCHCHQQSLYTDTICEINYSAIHPGLCEDLRSCVQCQAWGTGEKKGRTCEECNFKVKMVDELKRAEEVVVRCSFRDEDDDCTYSYTMEGDGAPGPNSTVLVHKKKDCPPGSFWWLIPLLLLLLPLLALLLLLCWKYCACCKACLALLPCCNRGHMVGFKEDHYMLRENLMASDHLDTPMLRSGNLKGRDVVRWKVTNNMQRPGFATHAASINPTELVPYGLSLRLARLCTENLLKPDTRECAQLRQEVEENLNEVYRQISGVHKLQQTKFRQQPNAGKKQDHTIVDTVLMAPRSAKPALLKLTEKQVEQRAFHDLKVAPGYYTLTADQDARGMVEFQEGVELVDVRVPLFIRPEDDDEKQLLVEAIDVPAGTATLGRRLVNITIIKEQARDVVSFEQPEFSVSRGDQVARIPVIRRVLDGGKSQVSYRTQDGTAQGNRDYIPVEGELLFQPGEAWKELQVKLLELQEVDSLLRGRQVRRFHVQLSNPKFGAHLGQPHSTTIIIRDPDELDRSFTSQMLSSQPPPHGDLGAPQNPNAKAAGSRKIHFNWLPPSGKPMGYRVKYWIQGDSESEAHLLDSKVPSVELTNLYPYCDYEMKVCAYGAQGEGPYSSLVSCRTHQEVPSEPGRLAFNVVSSTVTQLSWAEPAETNGEITAYEVCYGLVNDDNRPIGPMKKVLVDNPKNRMLLIENLRESQPYRYTVKARNGAGWGPEREAIINLATQPKRPMSIPIIPDIPIVDAQSGEDYDSFLMYSDDVLRSPSGSQRPSVSDDTGCGWKFEPLLGEELDLRRVTWRLPPELIPRLSASSGRSSDAEAPHGPPDDGGAGGKGGSLPRSATPGPPGEHLVNGRMDFAFPGSTNSLHRMTTTSAAAYGTHLSPHVPHRVLSTSSTLTRDYNSLTRSEHSHSTTLPRDYSTLTSVSSHGLPPIWEHGRSRLPLSWALGSRSRAQMKGFPPSRGPRDSIILAGRPAAPSWGPDSRLTAGVPDTPTRLVFSALGPTSLRVSWQEPRCERPLQGYSVEYQLLNGGELHRLNIPNPAQTSVVVEDLLPNHSYVFRVRAQSQEGWGREREGVITIESQVHPQSPLCPLPGSAFTLSTPSAPGPLVFTALSPDSLQLSWERPRRPNGDIVGYLVTCEMAQGGGPATAFRVDGDSPESRLTVPGLSENVPYKFKVQARTTEGFGPEREGIITIESQDGGPFPQLGSRAGLFQHPLQSEYSSITTTHTSATEPFLVDGLTLGAQHLEAGGSLTRHVTQEFVSRTLTTSGTLSTHMDQQFFQT

SEQ ID NO: 429 - protein, 1822 aa, Homo sapiens; identical to SEQ ID NO: 427

SEQ ID NO: 430 - protein, 1822 aa, Homo sapiens [sequence omitted]

SEQ ID NO: 431 - protein, 1805 aa, Homo sapiens; identical to SEQ ID NO: 423

SEQ ID NO: 432 - protein, 1752 aa, Homo sapiens; identical to SEQ ID NO: 424

SEQ ID NO: 433 - protein, 1875 aa, Homo sapiens; identical to SEQ ID NO: 428

SEQ ID NO: 434 - protein, 1822 aa, Homo sapiens; identical to SEQ ID NO: 427

SEQ ID NO: 435 - protein, 1702 aa, Homo sapiens
MAGPRPSPWARLLLAALISVSLSGTLANRCKKAPVKSCTECVRVDKDCAYCTDEMFRDRRCNTQAELLAAGCQRESIVVMESSFQITEETQIDTTLRRSQMSPQGLRVRLRPGEERHFELEVFEPLESPVDLYILMDFSNSMSDDLDNLKKMGQNLARVLSQLTSDYTIGFGKFVDKVSVPQTDMRPEKLKEPWPNSDPPFSFKNVISLTEDVDEFRNKLQGERISGNLDAPEGGFDAILQTAVCTRDIGWRPDSTHLLVFSTESAFHYEADGANVLAGIMSRNDERCHLDTTGTYTQYRTQDYPSVPTLVRLLAKHNIIPIFAVTNYSYSYYEKLHTYFPVSSLGVLQEDSSNIVELLEEAFNRIRSNLDIRALDSPRGLRTEVTSKMFQKTRTGSFHIRRGEVGIYQVQLRALEHVDGTHVCQLPEDQKGNIHLKPSFSDGLKMDAGIICDVCTCELQKEVRSARCSFNGDFVCGQCVCSEGWSGQTCNCSTGSLSDIQPCLREGEDKPCSGRGECQCGHCVCYGEGRYEGQFCEYDNFQCPRTSGFLCNDRGRCSMGQCVCEPGWTGPSCDCPLSNATCIDSNGGICNGRGHCECGRCHCHQQSLYTDTICEINYSAIHPGLCEDLRSCVQCQAWGTGEKKGRTCEECNFKVKMVDELKRAEEVVVRCSFRDEDDDCTYSYTMEGDGAPGPNSTVLVHKKKDCPPGSFWWLIPLLLLLLPLLALLLLLCWKYCACCKACLALLPCCNRGHMVGFKEDHYMLRENLMASDHLDTPMLRSGNLKGRDVVRWKVTNNMQRPGFATHAASINPTELVPYGLSLRLARLCTENLLKPDTRECAQLRQEVEENLNEVYRQISGVHKLQQTKFRQQPNAGKKQDHTIVDTVLMAPRSAKPALLKLTEKQVEQRAFHDLKVAPGYYTLTADQDARGMVEFQEGVELVDVRVPLFIRPEDDDEKQLLVEAIDVPAGTATLGRRLVNITIIKEQARDVVSFEQPEFSVSRGDQVARIPVIRRVLDGGKSQVSYRTQDGTAQGNRDYIPVEGELLFQPGEAWKELQVKLLELQEVDSLLRGRQVRRFHVQLSNPKFGAHLGQPHSTTIIIRDPDELDRSFTSQMLSSQPPPHGDLGAPQNPNAKAAGSRKIHFNWLPPSGKPMGYRVKYWIQGDSESEAHLLDSKVPSVELTNLYPYCDYEMKVCAYGAQGEGPYSSLVSCRTHQEVPSEPGRLAFNVVSSTVTQLSWAEPAETNGEITAYEVCYGLVNDDNRPIGPMKKVLVDNPKNRMLLIENLRESQPYRYTVKARNGAGWGPEREAIINLATQPKRPMSIPIIPDIPIVDAQSGEDYDSFLMYSDDVLRSPSGSQRPSVSDDTEHLVNGRMDFAFPGSTNSLHRMTTTSAAAYGTHLSPHVPHRVLSTSSTLTRDYNSLTRSEHSHSTTLPRDYSTLTSVSSHGELHRLNIPNPAQTSVVVEDLLPNHSYVFRVRAQSQEGWGREREGVITIESQVHPQSPLCPLPGSAFTLSTPSAPGPLVFTALSPDSLQLSWERPRRPNGDIVGYLVTCEMAQGGGPATAFRVDGDSPESRLTVPGLSENVPYKFKVQARTTEGFGPEREGIITIESQDGGPFPQLGSRAGLFQHPLQSEYSSITTTHTSATEPFLVDGLTLGAQHLEAGGSLTRHVTQEFVSRTLTTSGTLSTHMDQQFFQT

SEQ ID NO: 436 - protein, 1752 aa, Homo sapiens; identical to SEQ ID NO: 424

SEQ ID NO: 437 - protein, 1640 aa, Homo sapiens
MAQILPVRFQEHFQLQNLGINPANIGFSTLTMESDKFICIREKVGEQAQVTIIDMSDPMAPIRRPISAESAIMNPASKVIALKAGKTLQIFNIEMKSKMKAHTMAEEVIFWKWVSVNTVALVTETAVYHWSMEGDSQPMKMFDRHTSLVGCQVIHYRTDEYQKWLLLVGISAQQNRVVGAMQLYSVDRKVSQPIEGHAAAFAEFKMEGNAKPATLFCFAVRNPTGGKLHIIEVGQPAAGNQPFVKKAVDVFFPPEAQNDFPVAMQIGAKHGVIYLITKYGYLHLYDLESGVCICMNRISADTIFVTAPHKPTSGIIGVNKKGQVLSVCVEEDNIVNYATNVLQNPDLGLRLAVRSNLAGAEKLFVRKFNTLFAQGSYAEAAKVAASAPKGILRTRETVQKFQSIPAQSGQASPLLQYFGILLDQGQLNKLESLELCHLVLQQGRKQLLEKWLKEDKLECSEELGDLVKTTDPMLALSVYLRANVPSKVIQCFAETGQFQKIVLYAKKVGYTPDWIFLLRGVMKISPEQGLQFSRMLVQDEEPLANISQIVDIFMENSLIQQCTSFLLDALKNNRPAEGLLQTWLLEMNLVHAPQVADAILGNKMFTHYDRAHIAQLCEKAGLLQQALEHYTDLYDIKRAVVHTHLLNPEWLVNFFGSLSVEDSVECLHAMLSANIRQNLQLCVQVASKYHEQLGTQALVELFESFKSYKGLFYFLGSIVNFSQDPDVHLKYIQAACKTGQIKEVERICRESSCYNPERVKNFLKEAKLTDQLPLIIVCDRFGFVHDLVLYLYRNNLQRYIEIYVQKVNPSRTPAVIGGLLDVDCSEEVIKHLIMAVRGQFSTDELVAEVEKRNRLKLLLPWLESQIQEGCEEPATHNALAKIYIDSNNSPECFLRENAYYDSSVVGRYCEKRDPHLACVAYERGQCDLELIKVCNENSLFKSEARYLVCRKDPELWAHVLEETNPSRRQLIDQVVQTALSETRDPEEISVTVKAFMTADLPNELIELLEKIVLDNSVFSEHRNLQNLLILTAIKADRTRVMEYISRLDNYDALDIASIAVSSALYEEAFTVFHKFDMNASAIQVLIEHIGNLDRAYEFAERCNEPAVWSQLAQAQLQKDLVKEAINSYIRGDDPSSYLEVVQSASRSNNWEDLVKFLQMARKKGRESYIETELIFALAKTSRVSELEDFINGPNNAHIQQVGDRCYEEGMYEAAKLLYSNVSNFARLASTLVHLGEYQAAVDNSRKASSTRTWKEVCFACMDGQEFRFAQLCGLHIVIHADELEELMCYYQDRGYFEELILLLEAALGLERAHMGMFTELAILYSKFKPQKMLEHLELFWSRVNIPKVLRAAEQAHLWAELVFLYDKYEEYDNAVLTMMSHPTEAWKEGQFKDIITKVANVELCYRALQFYLDYKPLLINDLLLVLSPRLDHTWTVSFFSKAGQLPLVKPYLRSVQSHNNKSVNEALNHLLTEEEDYQGLRASIDAYDNFDNISLAQQLEKHQLMEFRCIAAYLYKGNNWWAQSVELCKKDHLYKDAMQHAAESRDAELAQKLLQWFLEEGKRECFAACLFTCYDLLRPDMVLELAWRHNLVDLAMPYFIQVMREYLSKVDKLDALESLRKQEEHVTEPAPLVFDFDGHE

SEQ ID NO: 438 - protein, 1640 aa, Homo sapiens; identical to SEQ ID NO: 437

SEQ ID NO: 439 - protein, 1583 aa, Homo sapiens
MAQILPVRFQEHFQLQNLGINPANIGFSTLTMESDKFICIREKVGEQAQVTIIDMSDPMAPIRRPISAESAIMNPASKVIALKAGKTLQIFNIEMKSKMKAHTMAEEVIFWKWVSVNTVALVTETAVYHWSMEGDSQPMKMFDRHTSLVGCQVIHYRTDEYQKWLLLVGISAQQNRVVGAMQLYSVDRKVSQPIEGHAAAFAEFKMEGNAKPATLFCFAVRNPTGGKLHIIEVGQPAAGNQPFVKKAVDVFFPPEAQNDFPVAMQIGAKHGVIYLITKYGYLHLYDLESGVCICMNRISADTIFVTAPHKPTSGIIGVNKKGQVLSVCVEEDNIVNYATNVLQNPDLGLRLAVRSNLAGAEKLFVRKFNTLFAQGSYAEAAKVAASAPKGILRTRETVQKFQSIPAQSGQASPLLQYFGILLDQGQLNKLESLELCHLVLQQGRKQLLEKWLKEDKLECSEELGDLVKTTDPMLALSVYLRANVPSKVIQCFAETGQFQKIVLYAKKVGYTPDWIFLLRGVMKISPEQGLQFSRMLVQDEEPLANISQIVDIFMENSLIQQCTSFLLDALKNNRPAEGLLQTWLLEMNLVHAPQVADAILGNKMFTHYDRAHIAQLCEKAGLLQQALEHYTDLYDIKRAVVHTHLLNPEWLVNFFGSLSVEDSVECLHAMLSANIRQNLQLCVQVASKYHEQLGTQALVELFESFKSYKGLFYFLGSIVNFSQDPDVHLKYIQAACKTGQIKEVERICRESSCYNPERVKNFLKEAKLTDQLPLIIVCDRFGFVHDLVLYLYRNNLQRYIEIYVQKVNPSRTPAVIGGLLDVDCSEEVIKHLIMAVRGQFSTDELVAEVEKRNRLKLLLPWLESQIQEGCEEPATHNALAKIYIDSNNSPECFLRENAYYDSSVVGRYCEKRDPHLACVAYERGQCDLELIKVCNENSLFKSEARYLVCRKDPELWAHVLEETNPSRRQLIDQVVQTALSETRDPEEISVTVKAFMTADLPNELIELLEKIVLDNSVFSEHRNLQNLLILTAIKADRTRVMEYISRLDNYDALDIASIAVSSALYEEAFTVFHKFDMNASAIQVLIEHIGNLDRAYEFAERCNEPAVWSQLAQAQLQKDLVKEAINSYIRGDDPSSYLEVVQSASRSNNWEDLVKFLQMARKKGRESYIETELIFALAKTSRVSELEDFINGPNNAHIQQVGDRCYEEGMYEAAKLLYSNVSNFARLASTLVHLGEYQAAVDNSRKASSTRTWKEVCFACMDGQEFRFAQLCGLHIVIHADELEELMCYYQDRGYFEELILLLEAALGLERAHMGMFTELAILYSKFKPQKMLEHLELFWSRVNIPKVLRAAEQAHLWAELVFLYDKYEEYDNAVLTMMSHPTEAWKEGQFKDIITKVANVELCYRALQFYLDYKPLLINDLLLVLSPRLDHTWTVSFFSKAGQLPLVKPYLRSVQSHNNKSVNEALNHLLTEEEDYQDAMQHAAESRDAELAQKLLQWFLEEGKRECFAACLFTCYDLLRPDMVLELAWRHNLVDLAMPYFIQVMREYLSKVDKLDALESLRKQEEHVTEPAPLVFDFDGHE

SEQ ID NO: 440 - protein, 5405 aa, Homo sapiens
MGALWSWWILWAGATLLWGLTQEASVDLKNTGREEFLTAFLQNYQLAYSKAYPRLLISSLSESPASVSILSQADNTSKKVTVRPGESVMVNISAKAEMIGSKIFQHAVVIHSDYAISVQALNAKPDTAELTLLRPIQALGTEYFVLTPPGTSARNVKEFAVVAGAAGASVSVTLKGSVTFNGKFYPAGDVLRVTLQPYNVAQLQSSVDLSGSKVTASSPVAVLSGHSCAQKHTTCNHVVEQLLPTSAWGTHYVVPTLASQSRYDLAFVVASQATKLTYNHGGITGSRGLQAGDVVEFEVRPSWPLYLSANVGIQVLLFGTGAIRNEVTYDPYLVLIPDVAAYCPAYVVKSVPGCEGVALVVAQTKAISGLTIDGHAVGAKLTWEAVPGSEFSYAEVELGTADMIHTAEATTNLGLLTFGLAKAIGYATAADCGRTVLSPVEPSCEGMQCAAGQRCQVVGGKAGCVAESTAVCRAQGDPHYTTFDGRRYDMMGTCSYTMVELCSEDDTLPAFSVEAKNEHRGSRRVSYVGLVTVRAYSHSVSLTRGEVGFVLVDNQRSRLPVSLSEGRLRVYQSGPRAVVELVFGLVVTYDWDCQLALSLPARFQDQVCGLCGNYNGDPADDFLTPDGALAPDAVEFASSWKLDDGDYLCEDGCQNNCPACTPGQAQHYEGDRLCGMLTKLDGPFAVCHDTLDPRPFLEQCVYDLCVVGGERLSLCRGLSAYAQACLELGISVGDWRSPANCPLSCPANSRYELCGPACPTSCNGAAAPSNCSGRPCVEGCVCLPGFVASGGACVPASSCGCTFQGLQLAPGQEVWADELCQRRCTCNGATHQVTCRDKQSCPAGERCSVQNGLLGCYPDRFGTCQGSGDPHYVSFDGRRFDFMGTCTYLLVGSCGQNAALPAFRVLVENEHRGSQTVSYTRAVRVEARGVKVAVRREYPGQVLVDDVLQYLPFQAADGQVQVFRQGRDAVVRTDFGLTVTYDWNARVTAKVPSSYAEALCGLCGNFNGDPADDLALRGGGQAANALAFGNSWQEETRPGCGATEPGDCPKLDSLVAQQLQSKNECGILADPKGPFRECHSKLDPQGAVRDCVYDRCLLPGQSGPLCDALATYAAACQAAGATVHPWRSEELCPLSCPPHSHYEACSYGCPLSCGDLPVPGGCGSECHEGCVCDEGFALSGESCLPLASCGCVHQGTYHPPGQTFYPGPGCDSLCHCQEGGLVSCESSSCGPHEACQPSGGSLGCVAVGSSTCQASGDPHYTTFDGRRFDFMGTCVYVLAQTCGTRPGLHRFAVLQENVAWGNGRVSVTRVITVQVANFTLRLEQRQWKVTVNGVDMKLPVVLANGQIRASQHGSDVVIETDFGLRVAYDLVYYVRVTVPGNYYQQMCGLCGNYNGDPKDDFQKPNGSQAGNANEFGNSWEEVVPDSPCLPPTPCPPGSEDCIPSHKCPPELEKKYQKEEFCGLLSSPTGPLSSCHKLVDPQGPLKDCIFDLCLGGGNLSILCSNIHAYVSACQAAGGHVEPWRTETFCPMECPPNSHYELCADTCSLGCSALSAPPQCQDGCAEGCQCDSGFLYNGQACVPIQQCGCYHNGVYYEPEQTVLIDNCRQQCTCHAGKGMVCQEHSCKPGQVCQPSGGILSCVTKDPCHGVTCRPQETCKEQGGQGVCLPNYEATCWLWGDPHYHSFDGRKFDFQGTCNYVLATTGCPGVSTQGLTPFTVTTKNQNRGNPAVSYVRVVTVAALGTNISIHKDEIGKVRVNGVLTALPVSVADGRISVTQGASKALLVADFGLQVSYDWNWRVDVTLPSSYHGAVCGLCGNMDRNPNNDQVFPNGTLAPSIPIWGGSWRAPGWDPLCWDECRGSCPTCPEDRLEQYEGPGFCGPLAPGTGGPFTTCHAHVPPESFFKGCVLDVCMGGGDRDILCKALASYVAACQAAGVVIEDWRAQVGCEITCPENSHYEVCGPPCPASCPSPAPLTTPAVCEGPCVEGCQCDAGFVLSADRCVPLNNGCGCWANGTYHEAGSEFWADGTCSQWCRCGPGGGSLVCTPASCGLGEVCGLLPSGQHGCQPVSTAECQAWGDPHYVTLDGHRFNFQGTCEYLLSAPCHGPPLGAENFTVTVANEHRGSQAVSYTRSVTLQIYNHSLTLSARWPRKLQVDGVFVTLPFQLDSLLHAHLSGADVVVTTTSGLSLAFDGDSFVRLRVPAAYAGSLCGLCGNYNQDPADDLKAVGGKPAGWQVGGAQGCGECVSKPCPSPCTPEQQESFGGPDACGVISATDGPLAPCHGLVPPAQYFQGCLLDACQVQGHPGGLCPAVATYVAACQAAGAQLREWRRPDFCPFQCPAHSHYELCGDSCPGSCPSLSAPEGCESACREGCVCDAGFVLSGDTCVPVGQCGCLHDDRYYPLGQTFYPGPGCDSLCRCREGGEVSCEPSSCGPHETCRPSGGSLGCVAVGSTTCQASGDPHYTTFDGRRFDFMGTCVYVLAQTCGTRPGLHRFAVLQENVAWGNGRVSVTRVITVQVANFTLRLEQRQWKVTVNGVDMKLPVVLANGQIRASQHGSDVVIETDFGLRVAYDLVYYVRVTVPGNYYQLMCGLCGNYNGDPKDDFQKPNGSQAGNANEFGNSWEEVVPDSPCLPPPTCPPGSEGCIPSEECPPELEKKYQKEEFCGLLSSPTGPLSSCHKLVDPQGPLKDCIFDLCLGGGNLSILCSNIHAYVSACQAAGGHVEPWRNETFCPMECPQNSHYELCADTCSLGCSALSAPLQCPDGCAEGCQCDSGFLYNGQACVPIQQCGCYHNGAYYEPEQTVLIDNCRQQCTCHAGKVVVCQEHSCKPGQVCQPSGGILSCVTKDPCHGVTCRPQETCKEQGGQGVCLPNYEATCWLWGDPHYHSFDGRKFDFQGTCNYVLATTGCPGVSTQGLTPFTVTTKNQNRGNPAVSYVRVVTVAALGTNISIHKDEIGKVRVNGVLTALPVSVADGRISVAQGASKALLVADFGLQVSYDWNWRVDVTLPSSYHGAVCGLCGNMDRNPNNDQVFPNGTLAPSIPIWGGSWRAPGWDPLCWDECRGSCPTCPEDRLEQYEGPGFCGPLAPGTGGPFTTCHAHVPPESFFKGCVLDVCMGGGDHDILCKALASYVAACQAAGVVIEDWRAQVGCEITCPENSHYEVCGPPCPASCPSPAPLTTPAVCEGPCVEGCQCDAGFVLSADRCVPLNNGCGCWANGTYHEAGSEFWADGTCSQWCRCGPGGGSLVCTPASCGLGEVCGLLPSGQHGCQPVSTAECQAWGDPHYVTLDGHRFDFQGTCEYLLSAPCHGPPLGAENFTVTVANEHRGSQAVSYTRSVTLQIYNHSLTLSARWPRKLQVDGVFVTLPFQLDSLLHAHLSGADVVVTTTSGLSLAFDGDSFVRLRVPAAYAGSLCGLCGNYNQDPADDLKAVGGKPAGWQVGGAQGCGECVSKPCPSPCTPEQQESFGGPDACGVISATDGPLAPCHGLVPPAQYFQGCLLDACQVQGHPGGLCPAVATYVAACQAAGAQLREWRRPDFCPFQCPAHSHYELCGDSCPGSCPSLSAPEGCESACREGCVCDAGFVLSGDTCVPVGQCGCLHDDRYYPLGQTFYPGPGCDSLCRCREGGEVSCEPSSCGPHETCRPSGGSLGCVAVGSTTCQASGDPHYTTFDGRRFDFMGTCVYVLAQTCGTRPGLHRFAVLQENVAWGNGRVSVTRVITVQVANFTLRLEQRQWKVTVNGVDMKLPVVLANGQIRASQHGSDVVIETDFGLRVAYDLVYYVRVTVPGNYYQLMCGLCGNYNGDPKDDFQKPNGSQAGNANEFGNSWEEVVPDSPCLPPPTCPPGSEGCIPSEECPPELEKKYQKEEFCGLLSSPTGPLSSCHKLVDPQGPLKDCIFDLCLGGGNLSILCSNIHAYVSACQAAGGHVEPWRNETFCPMECPQNSHYELCADTCSLGCSALSAPLQCPDGCAEGCQCDSGFLYNGQACVPIQQCGCYHNGVYYEPEQTVLIDNCRQQCTCHVGKVVVCQEHSCKPGQVCQPSGGILSCVNKDPCHGVTCRPQETCKEQGGQGVCLPNYEATCWLWGDPHYHSFDGRKFDFQGTCNYVLATTGCPGVSTQGLTPFTVTTKNQNRGNPAVSYVRVVTVAALGTNISIHKDEIGKVRVNGVLTALPVSVADGRISVAQGASKALLVADFGLQVSYDWNWRVDVTLPSSYHGAVCGLCGNMDRNPNNDQVFPNGTLAPSIPIWGGSWRAPGWDPLCWDECRGSCPTCPEDRLEQYEGPGFCGPLASGTGGPFTTCHAHVPPESFFKGCVLDVCMGGGDHDILCKALASYVAACQAAGVVIEDWRAQVGCEITCPENSHYEVCGPPCPASCPSPAPLTTPAVCEGPCVEGCQCDAGFVLSADRCVPLNNGCGCWANGTYHEAGSEFWADGTCSQWCRCGPGGGSLVCTPASCGLGEVCGLLPSGQHSCQPVSTAECQAWGDPHYVTLDGHRFDFQGTCEYLLSAPCHGPPLGAENFTVTVANEHRGSQAVSYTRSVTLQIYNHSLTLSARWPRKLQVDGVFVALPFQLDSLLHAHLSGADVVVTTTSGLSLAFDGDSFVRLRVPAAYAASLCGLCGNYNQDPADDLKAVGGKPAGWQVGGAQGCGECVSKPCPSPCTPEQQESFGGPDACGVISATDGPLAPCHGLVPPAQYFQGCLLDACQVQGHPGGLCPAVATYVAACQAAGAQLGEWRRPDFCPLQCPAHSHYELCGDSCPVSCPSLSAPEGCESACREGCVCDAGFVLSGDTCVPVGQCGCLHDGRYYPLGEVFYPGPECERRCECGPGGHVTCQEGAACGPHEECRLEDGVQACHATGCGRCLANGGIHYITLDGRVYDLHGSCSYVLAQVCHPKPGDEDFSIVLEKNAAGHLQRLLVTVAGQVVSLAQGQQVTVDGEAVALPVAVGRVRVTAEGRNMVLQTTKGLRLLFDGDAHLLMSIPSPFRGRLCGLCGNFNGNWSDDFVLPNGSAASSVETFGAAWRVPGSSKGCGEGCGPQGCPVCLAEETAPYESNEACGQLRNPQGPFATCQAVLSPSEYFRQCVYDLCAQKGDKAFLCRSLAAYTAACQAAGVAVKPWRTDSFCPLHCPAHSHYSICTRTCQGSCAALSGLTGCTTRCFEGCECDDRFLLSQGVCIPVQDCGCTHNGRYLPVNSSLLTSDCSERCSCSSSSGLTCQAAGCPPGRVCEVKAEARNCWATRGLCVLSVGANLTTFDGARGATTSPGVYELSSRCPGLQNTIPWYRVVAEVQICHGKTEAVGQVHIFFQDGMVTLTPNKGVWVNGLRVDLPAEKLASVSVSRTPDGSLLVRQKAGVQVWLGANGKVAVIVSNDHAGKLCGACGNFDGDQTNDWHDSQEKPAMEKWRAQDFSPCYG

SEQ ID NO: 441 - protein, 2843 aa, Homo sapiens
MGALWSWWILWAGATLLWGLTQEASVDLKNTGREEFLTAFLQNYQLAYSKAYPRLLISSLSESPASVSILSQADNTSKKVTVRPGESVMVNISAKAEMIGSKIFQHAVVIHSDYAISVQALNAKPDTAELTLLRPIQALGTEYFVLTPPGTSARNVKEFAVVAGAAGASVSVTLKGSVTFNGKFYPAGDVLRVTLQPYNVAQLQSSVDLSGSKVTASSPVAVLSGHSCAQKHTTCNHVVEQLLPTSAWGTHYVVPTLASQSRYDLAFVVASQATKLTYNHGGITGSRGLQAGDVVEFEVRPSWPLYLSANVGIQVLLFGTGAIRNEVTYDPYLVLIPDVAAYCPAYVVKSVPGCEGVALVVAQTKAISGLTIDGHAVGAKLTWEAVPGSEFSYAEVELGTADMIHTAEATTNLGLLTFGLAKAIGYATAADCGRTVLSPVEPSCEGMQCAAGQRCQVVGGKAGCVAESTAVCRAQGDPHYTTFDGRRYDMMGTCSYTMVELCSEDDTLPAFSVEAKNEHRGSRRVSYVGLVTVRAYSHSVSLTRGEVGFVLVDNQRSRLPVSLSEGRLRVYQSGPRAVVELVFGLVVTYDWDCQLALSLPARFQDQVCGLCGNYNGDPADDFLTPDGALAPDAVEFASSWKLDDGDYLCEDGCQNNCPACTPGQAQHYEGDRLCGMLTKLDGPFAVCHDTLDPRPFLEQCVYDLCVVGGERLSLCRGLSAYAQACLELGISVGDWRSPANCPLSCPANSRYELCGPACPTSCNGAAAPSNCSGRPCVEGCVCLPGFVASGGACVPASSCGCTFQGLQLAPGQEVWADELCQRRCTCNGATHQVTCRDKQSCPAGERCSVQNGLLGCYPDRFGTCQGSGDPHYVSFDGRRFDFMGTCTYLLVGSCGQNAALPAFRVLVENEHRGSQTVSYTRAVRVEARGVKVAVRREYPGQVLVDDVLQYLPFQAADGQVQVFRQGRDAVVRTDFGLTVTYDWNARVTAKVPSSYAEALCGLCGNFNGDPADDLALRGGGQAANALAFGNSWQEETRPGCGATEPGDCPKLDSLVAQQLQSKNECGILADPKGPFRECHSKLDPQGAVRDCVYDRCLLPGQSGPLCDALATYAAACQAAGATVHPWRSEELCPLSCPPHSHYEACSYGCPLSCGDLPVPGGCGSECHEGCVCDEGFALSGESCLPLASCGCVHQGTYHPPGQTFYPGPGCDSLCHCQEGGLVSCESSSCGPHEACQPSGGSLGCVAVGSSTCQASGDPHYTTFDGRRFDFMGTCVYVLAQTCGTRPGLHRFAVLQENVAWGNGRVSVTRVITVQVANFTLRLEQRQWKVTVNGVDMKLPVVLANGQIRASQHGSDVVIETDFGLRVAYDLVYYVRVTVPGNYYQQMCGLCGNYNGDPKDDFQKPNGSQAGNANEFGNSWEEVVPDSPCLPPTPCPPGSEDCIPSHKCPPELEKKYQKEEFCGLLSSPTGPLSSCHKLVDPQGPLKDCIFDLCLGGGNLSILCSNIHAYVSACQAAGGHVEPWRTETFCPMECPPNSHYELCADTCSLGCSALSAPPQCQDGCAEGCQCDSGFLYNGQACVPIQQCGCYHNGVYYEPEQTVLIDNCRQQCTCHAGKGMVCQEHSCKPGQVCQPSGGILSCVTKDPCHGVTCRPQETCKEQGGQGVCLPNYEATCWLWGDPHYHSFDGRKFDFQGTCNYVLATTGCPGVSTQGLTPFTVTTKNQNRGNPAVSYVRVVTVAALGTNISIHKDEIGKVRVNGVLTALPVSVADGRISVTQGASKALLVADFGLQVSYDWNWRVDVTLPSSYHGAVCGLCGNMDRNPNNDQVFPNGTLAPSIPIWGGSWRAPGWDPLCWDECRGSCPTCPEDRLEQYEGPGFCGPLAPGTGGPFTTCHAHVPPESFFKGCVLDVCMGGGDRDILCKALASYVAACQAAGVVIEDWRAQVGCEITCPENSHYEVCGSPCPASCPSPAPLTTPAVCEGPCVEGCQCDAGFVLSADRCVPLNNGCGCWANGTYHEAGSEFWADGTCSQWCRCGPGGGSLVCTPASCGLGEVCGLLPSGQHGCQPVSTAECQAWGDPHYVTLDGHRFNFQGTCEYLLSAPCHGPPLGAENFTVTVANEHRGSQAVSYTRSVTLQIYNHSLTLSARWPRKLQVDGVFVTLPFQLDSLLHAHLSGADVVVTTTSGLSLAFDGDSFVRLRVPAAYAGSLCGLCGNYNQDPADDLKAVGGKPAGWQVGGAQGCGECVSKPCPSPCTPEQQESFGGPDACGVISATDGPLAPCHGLVPPAQYFQGCLLDACQVQGHPGGLCPAVATYVAACQAAGAQLREWRRPDFCPFQCPAHSHYELCGDSCPGSCPSLSAPEGCESACREGCVCDAGFVLSGDTCVPVGQCGCLHDDRYYPLGQTFYPGPGCDSLCRCREGGEVSCEPSSCGPHETCRPSGGSLGCVAVGSTTCQASGDPHYTTFDGRRFDFMGTCVYVLAQTCGTRPGLHRFAVLQENVAWGNGRVSVTRVITVQVANFTLRLEQRQWKVTVNGVDMKLPVVLANGQIRASQHGSDVVIETDFGLRVAYDLVYYVRVTVPGNYYQLMCGLCGNYNGDPKDDFQKPNGSQAGNANEFGNSWEEVVPDSPCLPPPTCPPGSEGCIPSEECPPELEKKYQKEEFCGLLSSPTGPLSSCHKLVDPQGPLKDCIFDLCLGGGNLSILCSNIHAYVSACQAAGGQVEPWRNETFCPMECPQNSHYELCADTCSLGCSALSAPLQCPDGCAEGCQCDSGFLYNGQACVPIQQCGCYHNGAYYEPEQTVLIDNCRQQCTCHVGKVVVCQEHSCKPGQVCQPSGGILSCVNK

SEQ ID NO: 442 - protein, 215 aa, Homo sapiens
MGKGDPKKPRGKMSSYAFFVQTCREEHKKKHPDASVNFSEFSKKCSERWKTMSAKEKGKFEDMAKADKARYEREMKTYIPPKGETKKKFKDPNAPKRPPSAFFLFCSEYRPKIKGEHPGLSIGDVAKKLGEMWNNTAADDKQPYEKKAAKLKEKYEKDIAAYRAKGKPDAAKKGVVKAEKSKKKKEEEEDEEDEEDEEEEEDEEDEDEEEDDDDE

SEQ ID NO: 443 - protein, 215 aa, Homo sapiens; identical to SEQ ID NO: 442

SEQ ID NO: 444 - protein, 742 aa, Homo sapiens [sequence omitted]

SEQ ID NO: 445 - protein, 215 aa, Homo sapiens; identical to SEQ ID NO: 442

SEQ ID NO: 446 - protein, 215 aa, Homo sapiens; identical to SEQ ID NO: 442

SEQ ID NO: 447 - protein, 214 aa, Homo sapiens
GKGDPKKPRGKMSSYAFFVQTCREEHKKKHPDASVNFSEFSKKCSERWKTMSAKEKGKFEDMAKADKARYEREMKTYIPPKGETKKKFKDPNAPKRPPSAFFLFCSEYRPKIKGEHPGLSIGDVAKKLGEMWNNTAADDKQPYEKKAAKLKEKYEKDIAAYRAKGKPDAAKKGVVKAEKSKKKKEEEEDEEDEEDEEEEEDEEDEDEEEDDDDE

SEQ ID NO: 448 - protein, 206 aa, Homo sapiens [sequence omitted]

SEQ ID NO: 449 - protein, 215 aa, Homo sapiens; identical to SEQ ID NO: 442

SEQ ID NO: 450 - protein, 490 aa, Homo sapiens
MAAEQDPEARAAARPLLTDLYQATMALGYWRAGRARDAAEFELFFRRCPFGGAFALAAGLRDCVRFLRAFRLRDADVQFLASVLPPDTDPAFFEHLRALDCSEVTVRALPEGSLAFPGVPLLQVSGPLLVVQLLETPLLCLVSYASLVATNAARLRLIAGPEKRLLEMGLRRAQGPDGGLTASTYSYLGGFDSSSNVLAGQLRGVPVAGTLAHSFVTSFSGSEVPPDPMLAPAAGEGPGVDLAAKAQVWLEQVCAHLGLGVQEPHPGERAAFVAYALAFPRAFQGLLDTYSVWRSGLPNFLAVALALGELGYRAVGVRLDSGDLLQQAQEIRKVFRAAAAQFQVPWLESVLIVVSNNIDEEALARLAQEGSEVNVIGIGTSVVTCPQQPSLGGVYKLVAVGGQPRMKLTEDPEKQTLPGSKAAFRLLGSDGSPLMDMLQLAEEPVPQAGQELRVWPPGAQEPCTVRPAQVEPLLRLCLQQGQVAAPPPSS

SEQ ID NO: 451 - protein, 525 aa, Homo sapiens
MAAEQDPEARAAARPLLTDLYQATMALGYWRAGRARDAAEFELFFRRCPFGGAFALAAGLRDCVRFLRAFRLRDADVQFLASVLPPDTDPAFFEHLRALDCSEVTVRALPEGSLAFPGVPLLQVSGPLLVVQLLETPLLCLVSYASLVATNAARLRLIAGPEKRLLEMGLRRAQGPDGGLTASTYSYLGGFDSSSNVLAGQLRGVPVAGTLAHSFVTSFSGSEVPPDPMLAPAAGEGPGVDLAAKAQVWLEQVCAHLGLGVQEPHPGERAAFVAYALAFPRAFQGLLDTYSVWRSGLPNFLAVALALGELGYRAVGVRLDSGDLLQQAQEIRKVFRAAAAQFQVPWLESVLIVVSNNIDEEALARLAQEGSEVNVIGIGTSVVTCPQQPSLGGVYKLVAVGGQPRMKLTEDPEKQTLPGSKAAFRLLGSDGSPLMDMLQLAEEPVPQAGQELRVWPPGAQEPCTVRPAQLCEPLPSLAESRALAQLSLSRLSPEHRRLRSPAQYQVVLSERLQALVNSLCAGQSP

SEQ ID NO: 452 - protein, 584 aa, Homo sapiens
MAAEQDPEARAAARPLLTDLYQATMALGYWRAGRARDAAEFELFFRRCPFGGAFALAAGLRDCVRFLRAFRLRDADVQFLASVLPPDTDPAFFEHLRALDCSEVTVRALPEGSLAFPGVPLLQVSGPLLVVQLLETPLLCLVSYASLVATNAARLRLIAGPEKRLLEMGLRRAQGPDGGLTASTYSYLGGFDSSSNVLAGQLRGVPVAGTLAHSFVTSFSGSEVPPDPMLAPAAGEGPGVDLAAKAQVWLEQVCAHLGLGVQEPHPGERAAFVAYALAFPRAFQGLLDTYSVWRSGLPNFLAVALALGELGYRAVGVRLDSGDLLQQAQEIRKVFRAAAAQFQVPWLESVLIVVSNNIDEEALARLAQEGSEVNVIGIGTSVVTCPQQPSLGGVYKLVAVGGQPRMKLTEDPEKQTLPGSKAAFRLLGSDGSPLMDMLQLAEEPVPQAGQELRVWPPGAQEPCTVRPAQVEPLLRLCLQQGQLCEPLPSLAESRALAQLSLSRLSPEHRRLRSPAQYQVGGRPTLSFCPVRPRPHPAHRSCPLLPAGGAVREAAGPGEQSVCGAVPLRLGAGLTGNNTNHSLFP

SEQ ID NO: 453 - protein, 165 aa, Homo sapiens
MASGVQVADEVCRIFYDMKVRKCSTPEEIKKRKKAVIFCLSADKKCIIVEEGKEILVGDVGVTITDPFKHFVGMLPEKDCRYALYDASFETKESRKEELMFFLWAPELAPLKSKMIYASSKDAIKKKFQGIKHECQANGPEDLNRACIAEKLGGSLIVAFEGCPV

SEQ ID NO: 454 - protein, 148 aa, Homo sapiens
MKVRKCSTPEEIKKRKKAVIFCLSADKKCIIVEEGKEILVGDVGVTITDPFKHFVGMLPEKDCRYALYDASFETKESRKEELMFFLWAPELAPLKSKMIYASSKDAIKKKFQGIKHECQANGPEDLNRACIAEKLGGSLIVAFEGCPV

SEQ ID NO: 455 - protein, 165 aa, Homo sapiens; identical to SEQ ID NO: 453

SEQ ID NO: 456 - protein, 148 aa, Homo sapiens; identical to SEQ ID NO: 454

SEQ ID NO: 457 - protein, 164 aa, Homo sapiens
ASGVQVADEVCRIFYDMKVRKCSTPEEIKKRKKAVIFCLSADKKCIIVEEGKEILVGDVGVTITDPFKHFVGMLPEKDCRYALYDASFETKESRKEELMFFLWAPELAPLKSKMIYASSKDAIKKKFQGIKHECQANGPEDLNRACIAEKLGGSLIVAFEGCPV

SEQ ID NO: 458 - protein, 720 aa, Homo sapiens
MNNHVSSKPSTMKLKHTINPILLYFIHFLISLYTILTYIPFYFFSESRQEKSNRIKAKPVNSKPDSAYRSVNSLDGLASVLYPGCDTLDKVFTYAKNKFKNKRLLGTREVLNEEDEVQPNGKIFKKVILGQYNWLSYEDVFVRAFNFGNGLQMLGQKPKTNIAIFCETRAEWMIAAQACFMYNFQLVTLYATLGGPAIVHALNETEVTNIITSKELLQTKLKDIVSLVPRLRHIITVDGKPPTWSEFPKGIIVHTMAAVEALGAKASMENQPHSKPLPSDIAVIMYTSGSTGLPKGVMISHSNIIAGITGMAERIPELGEEDVYIGYLPLAHVLELSAELVCLSHGCRIGYSSPQTLADQSSKIKKGSKGDTSMLKPTLMAAVPEIMDRIYKNVMNKVSEMSSFQRNLFILAYNYKMEQISKGRNTPLCDSFVFRKVRSLLGGNIRLLLCGGAPLSATTQRFMNICFCCPVGQGYGLTESAGAGTISEVWDYNTGRVGAPLVCCEIKLKNWEEGGYFNTDKPHPRGEILIGGQSVTMGYYKNEAKTKADFFEDENGQRWLCTGDIGEFEPDGCLKIIDRKKDLVKLQAGEYVSLGKVEAALKNLPLVDNICAYANSYHSYVIGFVVPNQKELTELARKKGLKGTWEELCNSCEMENEVLKVLSEAAISASLEKFEIPVKIRLSPEPWTPETGLVTDAFKLKRKELKTHYQADIERMYGRK

SEQ ID NO: 459 - protein, 720 aa, Homo sapiens; identical to SEQ ID NO: 458

SEQ ID NO: 460 - protein, 720 aa, Homo sapiens
MNNHVSSKPSTMKLKHTINPILLYFIHFLISLYTILTYIPFYFFSESRQEKSNRIKAKPVNSKPDSAYRSVNSLDGLASVLYPGCDTLDKVFTYAKNKFKNKRLLGTREVLNEEDEVQPNGKIFKKVILGQYNWLSYEDVFVRAFNFGNGLQMLGQKPKTNIAIFCETRAEWMIAAQACFMYNFQLVTLYATLGGPAIVHALNETEVTNIITSKELLQTKLKDIVSLVPRLRHIITVDGKPPTWSDFPKGIIVHTMAAVEALGAKASMENQPHSKPLPSDIAVIMYTSGSTGLPKGVMISHSNIIAGITGMAERIPELGEEDVYIGYLPLAHVLELSAELVCLSHGCRIGYSSPQTLADQSSKIKKGSKGDTSMLKPTLMAAVPEIMDRIYKNVMNKVSEMSSFQRNLFILAYNYKMEQISKGRNTPLCDSFVFRKVRSLLGGNIRLLLCGGAPLSATTQRFMNICFCCPVGQGYGLTESAGAGTISEVWDYNTGRVGAPLVCCEIKLKNWEEGGYFNTDKPHPRGEILIGGQSVTMGYYKNEAKTKADFSEDENGQRWLCTGDIGEFEPDGCLKIIDRKKDLVKLQAGEYVSLGKVEAALKNLPLVDNICAYANSYHSYVIGFVVPNQKELTELARKKGLKGTWEELCNSCEMENEVLKVLSEAAISASLEKFEIPVKIRLSPEPWTPETGLVTDAFKLKRKELKTHYQADIERMYGRK

SEQ ID NO: 461 - protein, 720 aa, Homo sapiens; identical to SEQ ID NO: 458

SEQ ID NO: 462 - protein, 720 aa, Homo sapiens; identical to SEQ ID NO: 458

SEQ ID NO: 463 - protein, 199 aa, Homo sapiens
MSSGNAKIGHPAPNFKATAVMPDGQFKDISLSDYKGKYVVFFFYPLDFTFVCPTEIIAFSDRAEEFKKLNCQVIGASVDSHFCHLAWVNTPKKQGGLGPMNIPLVSDPKRTIAQDYGVLKADEGISFRGLFIIDDKGILRQITVNDLPVGRSVDETLRLVQAFQFTDKHGEVCPAGWKPGSDTIKPDVQKSKEYFSKQK

SEQ ID NO: 464 - protein, 199 aa, Homo sapiens; identical to SEQ ID NO: 463

SEQ ID NO: 465 - protein, 188 aa, Homo sapiens
MSSGNAKIGHPAPNFKATAVMPDGQFKDISLSDYKGKYVVFFFYPLDFTFVCPTEIIAFSDRAEEFKKLNCQVIGASVDSHFCHLAWVNTPKKQGGLGPMNIPLVSDPKRTIAQDYGVLKADEGISFRGLFIIDDKGILRQITVNDLPVGRSVDETLRLVQAFQFTDKHGEVCPAGWKPGSDTIKPDV

SEQ ID NO: 466 - protein, 199 aa, Homo sapiens; identical to SEQ ID NO: 463

SEQ ID NO: 467 - protein, 199 aa, Homo sapiens; identical to SEQ ID NO: 463

SEQ ID NO: 468 - protein, 199 aa, Homo sapiens; identical to SEQ ID NO: 463

SEQ ID NO: 469 - protein, 199 aa, Homo sapiens; identical to SEQ ID NO: 463

SEQ ID NO: 470 - protein, 199 aa, Homo sapiens; identical to SEQ ID NO: 463

SEQ ID NO: 471 - protein, 199 aa, Homo sapiens; identical to SEQ ID NO: 463

SEQ ID NO: 472 - protein, 1181 aa, Homo sapiens
MNPRQGYSLSGYYTHPFQGYEHRQLRYQQPGPGSSPSSFLLKQIEFLKGQLPEAPVIGKQTPSLPPSLPGLRPRFPVLLASSTRGRQVDIRGVPRGVHLGSQGLQRGFQHPSPRGRSLPQRGVDCLSSHFQELSIYQDQEQRILKFLEELGEGKATTAHDLSGKLGTPKKEINRVLYSLAKKGKLQKEAGTPPLWKIAVSTQAWNQHSGVVRPDGHSQGAPNSDPSLEPEDRNSTSVSEDLLEPFIAVSAQAWNQHSGVVRPDSHSQGSPNSDPGLEPEDSNSTSALEDPLEFLDMAEIKEKICDYLFNVSDSSALNLAKNIGLTKARDINAVLIDMERQGDVYRQGTTPPIWHLTDKKRERMQIKRNTNSVPETAPAAIPETKRNAEFLTCNIPTSNASNNMVTTEKVENGQEPVIKLENRQEARPEPARLKPPVHYNGPSKAGYVDFENGQWATDDIPDDLNSIRAAPGEFRAIMEMPSFYSHGLPRCSPYKKLTECQLKNPISGLLEYAQFASQTCEFNMIEQSGPPHEPRFKFQVVINGREFPPAEAGSKKVAKQDAAMKAMTILLEEAKAKDSGKSEESSHYSTEKESEKTAESQTPTPSATSFFSGKSPVTTLLECMHKLGNSCEFRLLSKEGPAHEPKFQYCVAVGAQTFPSVSAPSKKVAKQMAAEEAMKALHGEATNSMASDNQVRKIGELVRYLNTNPVGGLLEYARSHGFAAEFKLVDQSGPPHEPKFVYQAKVGGRWFPAVCAHSKKQGKQEAADAALRVLIGENEKAERMGFTELPLTGSTFHDQIAMLSHRCFNTLTNSFQPSLLGRKILAAIIMKKDSEDMGVVVSLGTGNRCVKGDSLSLKGETVNDCHAEIISRRGFIRFLYSELMKYNSQTAKDSIFEPAKGGEKLQIKKTVSFHLYISTAPCGDGALFDKSCSDRAMESTESRHYPVFENPKQGKLRTKVENGEGTIPVESSDIVPTWDGIRLGERLRTMSCSDKILRWNVLGLQGALLTHFLQPIYLKSVTLGYLFSQGHLTRAICCRVTRDGSAFEDGLRHPFIVNHPKVGRVSIYDSKRQSGKTKETSVNWCLADGYDLEILDGTRGTVDGPRNELSRVSKKNIFLLFKKLCSFRYRRDLLRLSYGEAKKAARDYETAKNYFKKGLKDMGYGNWISKPQEEKNFYLCPV

SEQ ID NO: 473 - protein, 1226 aa, Homo sapiens
MNPRQGYSLSGYYTHPFQGYEHRQLRYQQPGPGSSPSSFLLKQIEFLKGQLPEAPVIGKQTPSLPPSLPGLRPRFPVLLASSTRGRQVDIRGVPRGVHLGSQGLQRGFQHPSPRGRSLPQRGVDCLSSHFQELSIYQDQEQRILKFLEELGEGKATTAHDLSGKLGTPKKEINRVLYSLAKKGKLQKEAGTPPLWKIAVSTQAWNQHSGVVRPDGHSQGAPNSDPSLEPEDRNSTSVSEDLLEPFIAVSAQAWNQHSGVVRPDSHSQGSPNSDPGLEPEDSNSTSALEDPLEFLDMAEIKEKICDYLFNVSDSSALNLAKNIGLTKARDINAVLIDMERQGDVYRQGTTPPIWHLTDKKRERMQIKRNTNSVPETAPAAIPETKRNAEFLTCNIPTSNASNNMVTTEKVENGQEPVIKLENRQEARPEPARLKPPVHYNGPSKAGYVDFENGQWATDDIPDDLNSIRAAPGEFRAIMEMPSFYSHGLPRCSPYKKLTECQLKNPISGLLEYAQFASQTCEFNMIEQSGPPHEPRFKFQVVINGREFPPAEAGSKKVAKQDAAMKAMTILLEEAKAKDSGKSEESSHYSTEKESEKTAESQTPTPSATSFFSGKSPVTTLLECMHKLGNSCEFRLLSKEGPAHEPKFQYCVAVGAQTFPSVSAPSKKVAKQMAAEEAMKALHGEATNSMASDNQPEGMISESLDNLESMMPNKVRKIGELVRYLNTNPVGGLLEYARSHGFAAEFKLVDQSGPPHEPKFVYQAKVGGRWFPAVCAHSKKQGKQEAADAALRVLIGENEKAERMGFTEVTPVTGASLRRTMLLLSRSPEAQPKTLPLTGSTFHDQIAMLSHRCFNTLTNSFQPSLLGRKILAAIIMKKDSEDMGVVVSLGTGNRCVKGDSLSLKGETVNDCHAEIISRRGFIRFLYSELMKYNSQTAKDSIFEPAKGGEKLQIKKTVSFHLYISTAPCGDGALFDKSCSDRAMESTESRHYPVFENPKQGKLRTKVENGEGTIPVESSDIVPTWDGIRLGERLRTMSCSDKILRWNVLGLQGALLTHFLQPIYLKSVTLGYLFSQGHLTRAICCRVTRDGSAFEDGLRHPFIVNHPKVGRVSIYDSKRQSGKTKETSVNWCLADGYDLEILDGTRGTVDGPRNELSRVSKKNIFLLFKKLCSFRYRRDLLRLSYGEAKKAARDYETAKNYFKKGLKDMGYGNWISKPQEEKNFYLCPV

SEQ ID NO: 474 - protein, 1226 aa, Homo sapiens
MNPRQGYSLSGYYTHPFQGYEHRQLRYQQPGPGSSPSSFLLKQIEFLKGQLPEAPVIGKQTPSLPPSLPGLRPRFPVLLASSTRGRQVDIRGVPRGVHLGSQGLQRGFQHPSPRGRSLPQRGVDCLSSHFQELSIYQDQEQRILKFLEELGEGKATTAHDLSGKLGTPKKEINRVLYSLAKKGKLQKEAGTPPLWKIAVSTQAWNQHSGVVRPDGHSQGAPNSDPSLEPEDRNSTSVSEDLLEPFIAVSAQAWNQHSGVVRPDSHSQGSPNSDPGLEPEDSNSTSALEDPLEFLDMAEIKEKICDYLFNVSDSSALNLAKNIGLTKARDINAVLIDMERQGDVYRQGTTPPIWHLTDKKRERMQIKRNTNSVPETAPAAIPETRRNAEFLTCNIPTSNASNNMVTTEKVENGQEPVIKLENRQEARPEPARLKPPVHYNGPSKAGYVDFENGQWATDDIPDDLNSIRAAPGEFRAIMEMPSFYSHGLPRCSPYKKLTECQLKNPISGLLEYAQFASQTCEFNMIEQSGPPHEPRFKFQVVINGREFPPAEAGSKKVAKQDAAMKAMTILLEEAKAKDSGKSEESSHYSTEKESEKTAESQTPTPSATSFFSGKSPVTTLLECMHKLGNSCEFRLLSKEGPAHEPKFQYCVAVGAQTFPSVSAPSKKVAKQMAAEEAMKALHGEATNSMASDNQPEGMISESLDNLESMMPNKVRKIGELVRYLNTNPVGGLLEYARSHGFAAEFKLVDQSGPPHEPKFVYQAKVGGRWFPAVCAHSKKQGKQEAADAALRVLIGENEKAERMGFTEVTPVTGASLRRTMLLLSRSPEAQPKTLPLTGSTFHDQIAMLSHRCFNTLTNSFQPSLLGRKILAAIIMKKDSEDMGVVVSLGTGNRCVKGDSLSLKGETVNDCHAEIISRRGFIRFLYSELMKYNSQTAKDSIFEPAKGGEKLQIKKTVSFHLYISTAPCGDGALFDKSCSDRAMESTESRHYPVFENPKQGKLRTKVENGEGTIPVESSDIVPTWDGIRLGERLRTMSCSDKILRWNVLGLQGALLTHFLQPIYLKSVTLGYLFSQGHLTRAICCRVTRDGSAFEDGLRHPFIVNHPKVGRVSIYDSKRQSGKTKETSVNWCLADGYDLEILDGTRGTVDGPRNELSRVSKKNIFLLFKKLCSFRYRRDLLRLSYGEAKKAARDYETAKNYFKKGLKDMGYGNWISKPQEEKNFYLCPV

SEQ ID NO: 475 - protein, 886 aa, Homo sapiens
MAEIKEKICDYLFNVSDSSALNLAKNIGLTKARDINAVLIDMERQGDVYRQGTTPPIWHLTDKKRERMQIKRNTNSVPETAPAAIPETKRNAEFLTCNIPTSNASNNMVTTEKVENGQEPVIKLENRQEARPEPARLKPPVHYNGPSKAGYVDFENGQWATDDIPDDLNSIRAAPGEFRAIMEMPSFYSHGLPRCSPYKKLTECQLKNPISGLLEYAQFASQTCEFNMIEQSGPPHEPRFKFQVVINGREFPPAEAGSKKVAKQDAAMKAMTILLEEAKAKDSGKSEESSHYSTEKESEKTAESQTPTPSATSFFSGKSPVTTLLECMHKLGNSCEFRLLSKEGPAHEPKFQYCVAVGAQTFPSVSAPSKKVAKQMAAEEAMKALHGEATNSMASDNQVRKIGELVRYLNTNPVGGLLEYARSHGFAAEFKLVDQSGPPHEPKFVYQAKVGGRWFPAVCAHSKKQGKQEAADAALRVLIGENEKAERMGFTELPLTGSTFHDQIAMLSHRCFNTLTNSFQPSLLGRKILAAIIMKKDSEDMGVVVSLGTGNRCVKGDSLSLKGETVNDCHAEIISRRGFIRFLYSELMKYNSQTAKDSIFEPAKGGEKLQIKKTVSFHLYISTAPCGDGALFDKSCSDRAMESTESRHYPVFENPKQGKLRTKVENGEGTIPVESSDIVPTWDGIRLGERLRTMSCSDKILRWNVLGLQGALLTHFLQPIYLKSVTLGYLFSQGHLTRAICCRVTRDGSAFEDGLRHPFIVNHPKVGRVSIYDSKRQSGKTKETSVNWCLADGYDLEILDGTRGTVDGPRNELSRVSKKNIFLLFKKLCSFRYRRDLLRLSYGEAKKAARDYETAKNYFKKGLKDMGYGNWISKPQEEKNFYLCPV

SEQ ID NO: 476 - protein, 1200 aa, Homo sapiens
MNPRQGYSLSGYYTHPFQGYEHRQLRYQQPGPGSSPSSFLLKQIEFLKGQLPEAPVIGKQTPSLPPSLPGLRPRFPVLLASSTRGRQVDIRGVPRGVHLGSQGLQRGFQHPSPRGRSLPQRGVDCLSSHFQELSIYQDQEQRILKFLEELGEGKATTAHDLSGKLGTPKKEINRVLYSLAKKGKLQKEAGTPPLWKIAVSTQAWNQHSGVVRPDGHSQGAPNSDPSLEPEDRNSTSVSEDLLEPFIAVSAQAWNQHSGVVRPDSHSQGSPNSDPGLEPEDSNSTSALEDPLEFLDMAEIKEKICDYLFNVSDSSALNLAKNIGLTKARDINAVLIDMERQGDVYRQGTTPPIWHLTDKKRERMQIKRNTNSVPETAPAAIPETKRNAEFLTCNIPTSNASNNMVTTEKVENGQEPVIKLENRQEARPEPARLKPPVHYNGPSKAGYVDFENGQWATDDIPDDLNSIRAAPGEFRAIMEMPSFYSHGLPRCSPYKKLTECQLKNPISGLLEYAQFASQTCEFNMIEQSGPPHEPRFKFQVVINGREFPPAEAGSKKVAKQDAAMKAMTILLEEAKAKDSGKSEESSHYSTEKESEKTAESQTPTPSATSFFSGKSPVTTLLECMHKLGNSCEFRLLSKEGPAHEPKFQYCVAVGAQTFPSVSAPSKKVAKQMAAEEAMKALHGEATNSMASDNQPEGMISESLDNLESMMPNKVRKIGELVRYLNTNPVGGLLEYARSHGFAAEFKLVDQSGPPHEPKFVYQAKVGGRWFPAVCAHSKKQGKQEAADAALRVLIGENEKAERMGFTELPLTGSTFHDQIAMLSHRCFNTLTNSFQPSLLGRKILAAIIMKKDSEDMGVVVSLGTGNRCVKGDSLSLKGETVNDCHAEIISRRGFIRFLYSELMKYNSQTAKDSIFEPAKGGEKLQIKKTVSFHLYISTAPCGDGALFDKSCSDRAMESTESRHYPVFENPKQGKLRTKVENGEGTIPVESSDIVPTWDGIRLGERLRTMSCSDKILRWNVLGLQGALLTHFLQPIYLKSVTLGYLFSQGHLTRAICCRVTRDGSAFEDGLRHPFIVNHPKVGRVSIYDSKRQSGKTKETSVNWCLADGYDLEILDGTRGTVDGPRNELSRVSKKNIFLLFKKLCSFRYRRDLLRLSYGEAKKAARDYETAKNYFKKGLKDMGYGNWISKPQEEKNFYLCPV

SEQ ID NO: 477 - protein, 931 aa, Homo sapiens
MAEIKEKICDYLFNVSDSSALNLAKNIGLTKARDINAVLIDMERQGDVYRQGTTPPIWHLTDKKRERMQIKRNTNSVPETAPAAIPETKRNAEFLTCNIPTSNASNNMVTTEKVENGQEPVIKLENRQEARPEPARLKPPVHYNGPSKAGYVDFENGQWATDDIPDDLNSIRAAPGEFRAIMEMPSFYSHGLPRCSPYKKLTECQLKNPISGLLEYAQFASQTCEFNMIEQSGPPHEPRFKFQVVINGREFPPAEAGSKKVAKQDAAMKAMTILLEEAKAKDSGKSEESSHYSTEKESEKTAESQTPTPSATSFFSGKSPVTTLLECMHKLGNSCEFRLLSKEGPAHEPKFQYCVAVGAQTFPSVSAPSKKVAKQMAAEEAMKALHGEATNSMASDNQPEGMISESLDNLESMMPNKVRKIGELVRYLNTNPVGGLLEYARSHGFAAEFKLVDQSGPPHEPKFVYQAKVGGRWFPAVCAHSKKQGKQEAADAALRVLIGENEKAERMGFTEVTPVTGASLRRTMLLLSRSPEAQPKTLPLTGSTFHDQIAMLSHRCFNTLTNSFQPSLLGRKILAAIIMKKDSEDMGVVVSLGTGNRCVKGDSLSLKGETVNDCHAEIISRRGFIRFLYSELMKYNSQTAKDSIFEPAKGGEKLQIKKTVSFHLYISTAPCGDGALFDKSCSDRAMESTESRHYPVFENPKQGKLRTKVENGEGTIPVESSDIVPTWDGIRLGERLRTMSCSDKILRWNVLGLQGALLTHFLQPIYLKSVTLGYLFSQGHLTRAICCRVTRDGSAFEDGLRHPFIVNHPKVGRVSIYDSKRQSGKTKETSVNWCLADGYDLEILDGTRGTVDGPRNELSRVSKKNIFLLFKKLCSFRYRRDLLRLSYGEAKKAARDYETAKNYFKKGLKDMGYGNWISKPQEEKNFYLCPV

SEQ ID NO: 478 - protein, 886 aa, Homo sapiens; identical to SEQ ID NO: 475

SEQ ID NO: 479 - protein, 905 aa, Homo sapiens
MAEIKEKICDYLFNVSDSSALNLAKNIGLTKARDINAVLIDMERQGDVYRQGTTPPIWHLTDKKRERMQIKRNTNSVPETAPAAIPETKRNAEFLTCNIPTSNASNNMVTTEKVENGQEPVIKLENRQEARPEPARLKPPVHYNGPSKAGYVDFENGQWATDDIPDDLNSIRAAPGEFRAIMEMPSFYSHGLPRCSPYKKLTECQLKNPISGLLEYAQFASQTCEFNMIEQSGPPHEPRFKFQVVINGREFPPAEAGSKKVAKQDAAMKAMTILLEEAKAKDSGKSEESSHYSTEKESEKTAESQTPTPSATSFFSGKSPVTTLLECMHKLGNSCEFRLLSKEGPAHEPKFQYCVAVGAQTFPSVSAPSKKVAKQMAAEEAMKALHGEATNSMASDNQPEGMISESLDNLESMMPNKVRKIGELVRYLNTNPVGGLLEYARSHGFAAEFKLVDQSGPPHEPKFVYQAKVGGRWFPAVCAHSKKQGKQEAADAALRVLIGENEKAERMGFTELPLTGSTFHDQIAMLSHRCFNTLTNSFQPSLLGRKILAAIIMKKDSEDMGVVVSLGTGNRCVKGDSLSLKGETVNDCHAEIISRRGFIRFLYSELMKYNSQTAKDSIFEPAKGGEKLQIKKTVSFHLYISTAPCGDGALFDKSCSDRAMESTESRHYPVFENPKQGKLRTKVENGEGTIPVESSDIVPTWDGIRLGERLRTMSCSDKILRWNVLGLQGALLTHFLQPIYLKSVTLGYLFSQGHLTRAICCRVTRDGSAFEDGLRHPFIVNHPKVGRVSIYDSKRQSGKTKETSVNWCLADGYDLEILDGTRGTVDGPRNELSRVSKKNIFLLFKKLCSFRYRRDLLRLSYGEAKKAARDYETAKNYFKKGLKDMGYGNWISKPQEEKNFYLCPV

SEQ ID NO: 480 - protein, 1226 aa, Homo sapiens; identical to SEQ ID NO: 473

SEQ ID NO: 481 - protein, 931 aa, Homo sapiens; identical to SEQ ID NO: 477

SEQ ID NO: 482 - protein, 523 aa, Homo sapiens
MAGVSYAAPWWVSLLHRLPHFDLSWEATSSQFRPEDTDYQQALLLLGAAALACLALDLLFLLFYSFWLCCRRRKSEEHLDADCCCTAWCVIIATLVCSAGIAVGFYGNGETSDGIHRATYSLRHANRTVAGVQDRVWDTAVGLNHTAEPSLQTLERQLAGRPEPLRAVQRLQGLLETLLGYTAAIPFWRNTAVSLEVLAEQVDLYDWYRWLGYLGLLLLDVIICLLVLVGLIRSSKGILVGVCLLGVLALVISWGALGLELAVSVGSSDFCVDPDAYVTKMVEEYSVLSGDILQYYLACSPRAANPFQQKLSGSHKALVEMQDVVAELLRTVPWEQPATKDPLLRVQEVLNGTEVNLQHLTALVDCRSLHLDYVQALTGFCYDGVEGLIYLALFSFVTALMFSSIVCSVPHTWQQKRGPDEDGEEEAAPGPRQAHDSLYRVHMPSLYSCGSSYGSETSIPAAAHTVSNAPVTEYMSQNANFQNPRCENTPLIGRESPPPSYTSSMRAKYLATSQPRPDSSGSH

SEQ ID NO: 483 - protein, 523 aa, Homo sapiens; identical to SEQ ID NO: 482

SEQ ID NO: 484 - protein, 530 aa, Homo sapiens [sequence omitted]

SEQ ID NO: 485 - protein, 523 aa, Homo sapiens; identical to SEQ ID NO: 482

SEQ ID NO: 486 - protein, 940 aa, Homo sapiens
MNRIRKFFRGSGRVLAFIFVASVIWLLFDMAALRLSFSEINTRVIKEDIVRRERIGFRVQPDQGKIFYSSIKEMKPPLRGHGKGAWGKENVRKTEESVLKVEVDLDQTQRERKMQNALGRGKVVPLWHPAHLQTLPVTPNKQKTDGRGTKPEASSHQGTPKQTTAQGAPKTSFIAAKGTQVVKISVHMGRVSLKQEPRKSHSPSSDTSKLAAERDLNVTISLSTDRPKQRSQAVANERAHPASTAVPKSGEAMALNKTKTQSKEVNANKHKANTSLPFPKFTVNSNRLRKQSINETPLGSLSKDDGARGAHGKKLNFSESHLVIITKEEEQKADPKEVSNSKTKTIFPKVLGKSQSKHISRNRSEMSSSSLAPHRVPLSQTNHALTGGLEPAKINITAKAPSTEYNQSHIKALLPEDSGTHQVLRIDVTLSPRDPKAPGQFGRPVVVPHGKEKEAERRWKEGNFNVYLSDLIPVDRAIEDTRPAGCAEQLVHNNLPTTSVIMCFVDEVWSTLLRSVHSVINRSPPHLIKEILLVDDFSTKDYLKDNLDKYMSQFPKVRILRLKERHGLIRARLAGAQNATGDVLTFLDSHVECNVGWLEPLLERVYLSRKKVACPVIEVINDKDMSYMTVDNFQRGIFVWPMNFGWRTIPPDVIAKNRIKETDTIRCPVMAGGLFSIDKSYFFELGTYDPGLDVWGGENMELSFKVWMCGGEIEIIPCSRVGHIFRNDNPYSFPKDRMKTVERNLVRVAEVWLDEYKELFYGHGDHLIDQGLDVGNLTQQRELRKKLKCKSFKWYLENVFPDLRAPIVRASGVLINVALGKCISIENTTVILEDCDGSKELQQFNYTWLRLIKCGEWCIAPIPDKGAVRLHPCDNRNKGLKWLHKSTSVFHPELVNHIVFENNQQLLCLEGNFSQKILKVAACDPVKPYQKWKFEKYYEA

SEQ ID NO: 487 - protein, 940 aa, Homo sapiens; identical to SEQ ID NO: 486

SEQ ID NO: 488 - protein, 966 aa, Homo sapiens [sequence omitted]

SEQ ID NO: 489 - protein, 508 aa, Homo sapiens
MAARGRGLLLLTLSVLLAAGPSAAAAKLNIPKVLLPFTRATRVNFTLEASEGCYRWLSTRPEVASIEPLGLDEQQCSQKAVVQARLTQPARLTSIIFAEDITTGQVLRCDAIVDLIHDIQIVSTTRELYLEDSPLELKIQALDSEGNTFSTLAGLVFEWTIVKDSEADRFSDSHNALRILTFLESTYIPPSYISEMEKAAKQGDTILVSGMKTGSSKLKARIQEAVYKNVRPAEVRLLILENILLNPAYDVYLMVGTSIHYKVQKIRQGKITELSMPSDQYELQLQNSIPGPEGDPARPVAVLAQDTSMVTALQLGQSSLVLGHRSIRMQGASRLPNSTIYVVEPGYLGFTVHPGDRWVLETGRLYEITIEVFDKFSNKVYVSDNIRIETVLPAEFFEVLSSSQNGSYHRIRALKRGQTAIDAALTSVVDQDGGVHILQVPVWNQQEVEIHIPITLYPSILTFPWQPKTGAYQYTIRVRETPHLCVHSFGVFMGLWLFVHSITFSITL

SEQ ID NO: 490 - protein, 967 aa, Homo sapiens [sequence omitted]

SEQ ID NO: 491 - protein, 299 aa, Homo sapiens
MAEDKETKHGGHKNGRKGGLSGTSFFTWFMVIALLGVWTSVAVVWFDLVDYEEVLAKAKDFRYNLSEVLQGKLGIYDADGDGDFDVDDAKVLLGLKERSTSEPAVPPEEAEPHTEPEEQVPVEAEPQNIEDEAKEQIQSLLHEMVHAEHVEGEDLQQEDGPTGEPQQEDDEFLMATDVDDRFETLEPEVSHEETEHSYHVEETVSQDCNQDMEEMMSEQENPDSSEPVVEDERLHHDTDDVTYQVYEEQAVYEPLENEGIEITEVTAPPEDNPVEDSQVIVEEVSIFPVEEQQEVPPDT

SEQ ID NO: 492 - protein, 174 aa, Homo sapiens
MAEDKETKHGGHKNGRKGGLSGTSFFTWFMVIALLGVWTSVAVVWFDLVDYEEVLAKAKDFRYNLSEVLQGKLGIYDADGDGDFDVDDAKVLLGLTKDGSNENIDSLEEVLNILAEESSDWFYGFLSFLYDIMTPFEMLEEEEEESETADGVDGTSQNEGVQGKTCVILDLHNQ

SEQ ID NO: 493 - protein, 225 aa, Homo sapiens
MAEDKETKHGGHKNGRKGGLSGTSFFTWFMVIALLGVWTSVAVVWFDLVDYEEVLAKAKDFRYNLSEVLQGKLGIYDADGDGDFDVDDAKVLLEGPSGVAKRKTKAKVKELTKEELKKEKEKPESRKESKNEERKKGKKEDVRKDKKIADADLSRKESPKGKKDREKEKVDLEKSAKTKENRKKSTNMKDVSSKMASRDKDDRKESRSSTRYAHLTKGNTQKRNG

SEQ ID NO: 494 - protein, 102 aa, Homo sapiens [sequence omitted]

SEQ ID NO: 495 - protein, 299 aa, Homo sapiens; identical to SEQ ID NO: 491

SEQ ID NO: 496 - protein, 328 aa, Homo sapiens
MAQRKNAKSSGNSSSSGSGSGSTSAGSSSPGARRETKHGGHKNGRKGGLSGTSFFTWFMVIALLGVWTSVAVVWFDLVDYEEVLAKAKDFRYNLSEVLQGKLGIYDADGDGDFDVDDAKVLLGLKERSTSEPAVPPEEAEPHTEPEEQVPVEAEPQNIEDEAKEQIQSLLHEMVHAEHVEGEDLQQEDGPTGEPQQEDDEFLMATDVDDRFETLEPEVSHEETEHSYHVEETVSQDCNQDMEEMMSEQENPDSSEPVVEDERLHHDTDDVTYQVYEEQAVYEPLENEGIEITEVTAPPEDNPVEDSQVIVEEVSIFPVEEQQEVPPDT

SEQ ID NO: 497 - protein, 225 aa, Homo sapiens; identical to SEQ ID NO: 493

SEQ ID NO: 498 - protein, 1029 aa, Homo sapiens
MEQDTAAVAATVAAADATATIVVIEDEQPGPSTSQEEGAAAAATEATAATEKGEKKKEKADRAKRFEFLLKQTELFAHFIQPSAQKSPTSPLNMKLGRPRIKKDEKQSLISAGDYRHRRTEQEEDEELLSESRKTSNVCIRFEVSPSYVKGGPLRDYQIRGLNWLISLYENGVNGILADEMGLGKTLQTIALLGYLKHYRNIPGPHMVLVPKSTLHNWMNEFKRWVPSLRVICFVGDKDARAAFIRDEMMPGEWDVCVTSYEMVIKEKSVFKKFHWRYLVIDEAHRIKNEKSKLSEIVREFKSTNRLLLTGTPLQNNLHELWALLNFLLPDVFNSADDFDSWFDTKNCLGDQKLVERLHAVLKPFLLRRIKTDVEKSLPPKKEIKIYLGLSKMQREWYTKILMKDIDVLNSSGKMDKMRLLNILMQLRKCCNHPYLFDGAEPGPPYTTDEHIVSNSGKMVVLDKLLAKLKEQGSRVLIFSQMTRLLDILEDYCMWRGYEYCRLDGQTPHEEREEAIEAFNAPNSSKFIFMLSTRAGGLGINLASADVVILYDSDWNPQVDLQAMDRAHRIGQKKPVRVFRLITDNTVEERIVERAEIKLRLDSIVIQQGRLIDQQSNKLAKEEMLQMIRHGATHVFASKESELTDEDITTILERGEKKTAEMNERLQKMGESSLRNFRMDIEQSLYKFEGEDYREKQKLGMVEWIEPPKRERKANYAVDAYFREALRVSEPKIPKAPRPPKQPNVQDFQFFPPRLFELLEKEILYYRKTIGYKVPRNPDIPNPALAQREEQKKIDGAEPLTPEETEEKEKLLTQGFTNWTKRDFNQFIKANEKYGRDDIDNIAREVEGKSPEEVMEYSAVFWERCNELQDIEKIMAQIERGEARIQRRISIKKALDAKIARYKAPFHQLRIQYGTSKGKNYTEEEDRFLICMLHKMGFDRENVYEELRQCVRNAPQFRFDWFIKSRTAMEFQRRCNTLISLIEKENMEIEERERAEKKKRATKTPMSQKRKAESATESSGKKDVKKVKS

SEQ ID NO: 499 - protein, 1052 aa, Homo sapiens
MSSAAEPPPPPPPESAPSKPAASIASGGSNSSNKGGPEGVAAQAVASAASAGPADAEMEEIFDDASPGKQKEIQEPDPTYEEKMQTDRANRFEYLLKQTELFAHFIQPAAQKTPTSPLKMKPGRPRIKKDEKQNLLSVGDYRHRRTEQEEDEELLTESSKATNVCTRFEDSPSYVKWGKLRDYQVRGLNWLISLYENGINGILADEMGLGKTLQTISLLGYMKHYRNIPGPHMVLVPKSTLHNWMSEFKRWVPTLRSVCLIGDKEQRAAFVRDVLLPGEWDVCVTSYEMLIKEKSVFKKFNWRYLVIDEAHRIKNEKSKLSEIVREFKTTNRLLLTGTPLQNNLHELWSLLNFLLPDVFNSADDFDSWFDTNNCLGDQKLVERLHMVLRPFLLRRIKADVEKSLPPKKEVKIYVGLSKMQREWYTRILMKDIDILNSAGKMDKMRLLNILMQLRKCCNHPYLFDGAEPGPPYTTDMHLVTNSGKMVVLDKLLPKLKEQGSRVLIFSQMTRVLDILEDYCMWRNYEYCRLDGQTPHDERQDSINAYNEPNSTKFVFMLSTRAGGLGINLATADVVILYDSDWNPQVDLQAMDRAHRIGQTKTVRVFRFITDNTVEERIVERAEMKLRLDSIVIQQGRLVDQNLNKIGKDEMLQMIRHGATHVFASKESEITDEDIDGILERGAKKTAEMNEKLSKMGESSLRNFTMDTESSVYNFEGEDYREKQKIAFTEWIEPPKRERKANYAVDAYFREALRVSEPKAPKAPRPPKQPNVQDFQFFPPRLFELLEKEILFYRKTIGYKVPRNPELPNAAQAQKEEQLKIDEAESLNDEELEEKEKLLTQGFTNWNKRDFNQFIKANEKWGRDDIENIAREVEGKTPEEVIEYSAVFWERCNELQDIEKIMAQIERGEARIQRRISIKKALDTKIGRYKAPFHQLRISYGTNKGKNYTEEEDRFLICMLHKLGFDKENVYDELRQCIRNSPQFRFDWFLKSRTAMELQRRCNTLITLIERENMELEEKEKAEKKKRGPKPSTQKRKMDGAPDGRGRKKKLKL

SEQ ID NO: 500 - protein, 1054 aa, Homo sapiens
MEQDTAAVAATVAAADATATIVVIEDEQPGPSTSQEEGAAAAATEATAATEKGEKKKEKNVSSFQLKLAAKAPKSEKEMDPEYEEKMKADRAKRFEFLLKQTELFAHFIQPSAQKSPTSPLNMKLGRPRIKKDEKQSLISAGDYRHRRTEQEEDEELLSESRKTSNVCIRFEVSPSYVKGGPLRDYQIRGLNWLISLYENGVNGILADEMGLGKTLQTIALLGYLKHYRNIPGPHMVLVPKSTLHNWMNEFKRWVPSLRVICFVGDKDARAAFIRDEMMPGEWDVCVTSYEMVIKEKSVFKKFHWRYLVIDEAHRIKNEKSKLSEIVREFKSTNRLLLTGTPLQNNLHELWALLNFLLPDVFNSADDFDSWFDTKNCLGDQKLVERLHAVLKPFLLRRIKTDVEKSLPPKKEIKIYLGLSKMQREWYTKILMKDIDVLNSSGKMDKMRLLNILMQLRKCCNHPYLFDGAEPGPPYTTDEHIVSNSGKMVVLDKLLAKLKEQGSRVLIFSQMTRLLDILEDYCMWRGYEYCRLDGQTPHEEREDKFLEVEFLGQREAIEAFNAPNSSKFIFMLSTRAGGLGINLASADVVILYDSDWNPQVDLQAMDRAHRIGQKKPVRVFRLITDNTVEERIVERAEIKLRLDSIVIQQGRLIDQQSNKLAKEEMLQMIRHGATHVFASKESELTDEDITTILERGEKKTAEMNERLQKMGESSLRNFRMDIEQSLYKFEGEDYREKQKLGMVEWIEPPKRERKANYAVDAYFREALRVSEPKIPKAPRPPKQPNVQDFQFFPPRLFELLEKEILYYRKTIGYKVPRNPDIPNPALAQREEQKKIDGAEPLTPEETEEKEKLLTQGFTNWTKRDFNQFIKANEKYGRDDIDNIAREVEGKSPEEVMEYSAVFWERCNELQDIEKIMAQIERGEARIQRRISIKKALDAKIARYKAPFHQLRIQYGTSKGKNYTEEEDRFLICMLHKMGFDRENVYEELRQCVRNAPQFRFDWFIKSRTAMEFQRRCNTLISLIEKENMEIEERERAEKKKRATKTPMVKFSAFS

SEQ ID NO: 501 - protein, 1052 aa, Homo sapiens; identical to SEQ ID NO: 499

SEQ ID NO: 502 - protein, 1052 aa, Homo sapiens
MSSAAEPPPPPPPESAPSKPAASIASGGSNSSNKGGPEGVAAQAVASAVSAGPADAEMEEIFDDASPGKQKEIQEPDPTYEEKMQTDRANRFEYLLKQTELFAHFIQPAAQKTPTSPLKMKPGRPRIKKDEKQNLLSVGDYRHRRTEQEEDEELLTESSKATNVCTRFEDSPSYVKWGKLRDYQVRGLNWLISLYENGINGILADEMGLGKTLQTISLLGYMKHYRNIPGPHMVLVPKSTLHNWMSEFKRWVPTLRSVCLIGDKEQRAAFVRDVLLPGEWDVCVTSYEMLIKEKSVFKKFNWRYLVIDEAHRIKNEKSKLSEIVREFKTTNRLLLTGTPLQNNLHELWSLLNFLLPDVFNSADDFDSWFDTNNCLGDQKLVERLHMVLRPFLLRRIKADVEKSLPPKKEVKIYVGLSKMQREWYTRILMKDIDILNSAGKMDKMRLLNILMQLRKCCNHPYLFDGAEPGPPYTTDMHLVTNSGKMVVLDKLLPKLKEQGSRVLIFSQMTRVLDILEDYCMWRNYEYCRLDGQTPHDERQDSINAYNEPNSTKFVFMLSTRAGGLGINLATADVVILYDSDWNPQVDLQAMDRAHRIGQTKTVRVFRFITDNTVEERIVERAEMKLRLDSIVIQQGRLVDQNLNKIGKDEMLQMIRHGATHVFASKESEITDEDIDGILERGAKKTAEMNEKLSKMGESSLRNFTMDTESSVYNFEGEDYREKQKIAFTEWIEPPKRERKANYAVDAYFREALRVSEPKAPKAPRPPKQPNVQDFQFFPPRLFELLEKEILFYRKTIGYKVPRNPELPNAAQAQKEEQLKIDEAESLNDEELEEKEKLLTQGFTNWNKRDFNQFIKANEKWGRDDIENIAREVEGKTPEEVIEYSAVFWERCNELQDIEKIMAQIERGEARIQRRISIKKALDTKIGRYKAPFHQLRISYGTNKGKNYTEEEDRFLICMLHKLGFDKENVYDELRQCIRNSPQFRFDWFLKSRTAMELQRRCNTLITLIERENMELEEKEKAEKKKRGPKPSTQKRKMDGAPDGRGRKKKLKL

SEQ ID NO: 503 - protein, 1054 aa, Homo sapiens; identical to SEQ ID NO: 500

SEQ ID NO: 504 - protein, 945 aa, Homo sapiens
MDPEYEEKMKADRAKRFEFLLKQTELFAHFIQPSAQKSPTSPLNMKLGRPRIKKDEKQSLISAGDYRHRRTEQEEDEELLSESRKTSNVCIRFEVSPSYVKGGPLRDYQIRGLNWLISLYENGVNGILADEMGLGKTLQTIALLGYLKHYRNIPGPHMVLVPKSTLHNWMNEFKRWVPSLRVICFVGDKDARAAFIRDEMMPGEWDVCVTSYEMVIKEKSVFKKFHWRYLVIDEAHRIKNEKSKLSEIVREFKSTNRLLLTGTPLQNNLHELWALLNFLLPDVFNSADDFDSWFDTKNCLGDQKLVERLHAVLKPFLLRRIKTDVEKSLPPKKEIKIYLGLSKMQREWYTKILMKDIDVLNSSGKMDKMRLLNILMQLRKCCNHPYLFDGAEPGPPYTTDEHIVSNSGKMVVLDKLLAKLKEQGSRVLIFSQMTRLLDILEDYCMWRGYEYCRLDGQTPHEEREEAIEAFNAPNSSKFIFMLSTRAGGLGINLASADVVILYDSDWNPQVDLQAMDRAHRIGQKKPVRVFRLITDNTVEERIVERAEIKLRLDSIVIQQGRLIDQQSNKLAKEEMLQMIRHGATHVFASKESELTDEDITTILERGEKKTAEMNERLQKMGESSLRNFRMDIEQSLYKFEGEDYREKQKLGMVEWIEPPKRERKANYAVDAYFREALRVSEPKIPKAPRPPKQPNVQDFQFFPPRLFELLEKEILYYRKTIGYKVPRNPDIPNPALAQREEQKKIDGAEPLTPEETEEKEKLLTQGFTNWTKRDFNQFIKANEKYGRDDIDNIAREVEGKSPEEVMEYSAVFWERCNELQDIEKIMAQIERGEARIQRRISIKKALDAKIARYKAPFHQLRIQYGTSKGKNYTEEEDRFLICMLHKMGFDRENVYEELRQCVRNAPQFRFDWFIKSRTAMEFQRRCNTLISLIEKENMEIEERER

SEQ ID NO: 505 - protein, 976 aa, Homo sapiens [sequence omitted]

SEQ ID NO: 506 - protein, 1033 aa, Homo sapiens
MEQDTAAVAATVAAADATATIVVIEDEQPGPSTSQEEGAAAAATEATAATEKGEKKKEKNVSSFQLKLAAKAPKSEKEMDPEYEEKMKADRAKRFEFLLKQTELFAHFIQPSAQKSPTSPLNMKLGRPRIKKDEKQSLISAGDYRHRRTEQEEDEELLSESRKTSNVCIRFEVSPSYVKGGPLRDYQIRGLNWLISLYENGVNGILADEIPGPHMVLVPKSTLHNWMNEFKRWVPSLRVICFVGDKDARAAFIRDEMMPGEWDVCVTSYEMVIKEKSVFKKFHWRYLVIDEAHRIKNEKSKLSEIVREFKSTNRLLLTGTPLQNNLHELWALLNFLLPDVFNSADDFDSWFDTKNCLGDQKLVERLHAVLKPFLLRRIKTDVEKSLPPKKEIKIYLGLSKMQREWYTKILMKDIDVLNSSGKMDKMRLLNILMQLRKCCNHPYLFDGAEPGPPYTTDEHIVSNSGKMVVLDKLLAKLKEQGSRVLIFSQMTRLLDILEDYCMWRGYEYCRLDGQTPHEEREDKFLEVEFLGQREAIEAFNAPNSSKFIFMLSTRAGGLGINLASADVVILYDSDWNPQVDLQAMDRAHRIGQKKPVRVFRLITDNTVEERIVERAEIKLRLDSIVIQQGRLIDQQSNKLAKEEMLQMIRHGATHVFASKESELTDEDITTILERGEKKTAEMNERLQKMGESSLRNFRMDIEQSLYKFEGEDYREKQKLGMVEWIEPPKRERKANYAVDAYFREALRVSEPKIPKAPRPPKQPNVQDFQFFPPRLFELLEKEILYYRKTIGYKVPRNPDIPNPALAQREEQKKIDGAEPLTPEETEEKEKLLTQGFTNWTKRDFNQFIKANEKYGRDDIDNIAREVEGKSPEEVMEYSAVFWERCNELQDIEKIMAQIERGEARIQRRISIKKALDAKIARYKAPFHQLRIQYGTSKGKNYTEEEDRFLICMLHKMGFDRENVYEELRQCVRNAPQFRFDWFIKSRTAMEFQRRCNTLISLIEKENMEIEERERAEKKKRATKTPMVKFSAFS

SEQ ID NO: 507 - protein, 1070 aa, Homo sapiens
MEQDTAAVAATVAAADATATIVVIEDEQPGPSTSQEEGAAAAATEATAATEKGEKKKEKNVSSFQLKLAAKAPKSEKEMDPEYEEKMKADRAKRFEFLLKQTELFAHFIQPSAQKSPTSPLNMKLGRPRIKKDEKQSLISAGDYRHRRTEQEEDEELLSESRKTSNVCIRFEVSPSYVKGGPLRDYQIRGLNWLISLYENGVNGILADEMGLGKTLQTIALLGYLKHYRNIPGPHMVLVPKSTLHNWMNEFKRWVPSLRVICFVGDKDARAAFIRDEMMPGEWDVCVTSYEMVIKEKSVFKKFHWRYLVIDEAHRIKNEKSKLSEIVREFKSTNRLLLTGTPLQNNLHELWALLNFLLPDVFNSADDFDSWFDTKNCLGDQKLVERLHAVLKPFLLRRIKTDVEKSLPPKKEIKIYLGLSKMQREWYTKILMKDIDVLNSSGKMDKMRLLNILMQLRKCCNHPYLFDGAEPGPPYTTDEHIVSNSGKMVVLDKLLAKLKEQGSRVLIFSQMTRLLDILEDYCMWRGYEYCRLDGQTPHEEREDKFLEVEFLGQREAIEAFNAPNSSKFIFMLSTRAGGLGINLASADVVILYDSDWNPQVDLQAMDRAHRIGQKKPVRVFRLITDNTVEERIVERAEIKLRLDSIVIQQGRLIDQQSNKLAKEEMLQMIRHGATHVFASKESELTDEDITTILERGEKKTAEMNERLQKMGESSLRNFRMDIEQSLYKFEGEDYREKQKLGMVEWIEPPKRERKANYAVDAYFREALRVSEPKIPKAPRPPKQPNVQDFQFFPPRLFELLEKEILYYRKTIGYKVPRNPDIPNPALAQREEQKKIDGAEPLTPEETEEKEKLLTQGFTNWTKRDFNQFIKANEKYGRDDIDNIAREVEGKSPEEVMEYSAVFWERCNELQDIEKIMAQIERGEARIQRRISIKKALDAKIARYKAPFHQLRIQYGTSKGKNYTEEEDRFLICMLHKMGFDRENVYEELRQCVRNAPQFRFDWFIKSRTAMEFQRRCNTLISLIEKENMEIEERERAEKKKRATKTPMSQKRKAESATESSGKKDVKKVKS

SEQ ID NO: 508 - protein, 2048 aa, Homo sapiens
MLRVIVESASNIPKTKFGKPDPIVSVIFKDEKKKTKKVDNELNPVWNEILEFDLRGIPLDFSSSLGIIVKDFETIGQNKLIGTATVALKDLTGDQSRSLPYKLISLLNEKGQDTGATIDLVIGYDPPSAPHPNDLSGPSVPGMGGDGEEDEGDEDRLDNAVRGPGPKGPVGTVSEAQLARRLTKVKNSRRMLSNKPQDFQIRVRVIEGRQLSGNNIRPVVKVHVCGQTHRTRIKRGNNPFFDELFFYNVNMTPSELMDEIISIRVYNSHSLRADCLMGEFKIDVGFVYDEPGHAVMRKWLLLNDPEDTSSGSKGYMKVSMFVLGTGDEPPPERRDRDNDSDDVESNLLLPAGIALRWVTFLLKIYRAEDIPQMDDAFSQTVKEIFGGNADKKNLVDPFVEVSFAGKKVCTNIIEKNANPEWNQVVNLQIKFPSVCEKIKLTIYDWDRLTKNDVVGTTYLHLSKIAASGGEVEVNTGETEVGFVPTFGPCYLNLYGSPREYTGFPDPYDELNTGKGEGVAYRGRILVELATFLEKTPPDKKLEPISNDDLLVVEKYQRRRKYSLSAVFHSATMLQDVGEAIQFEVSIGNYGNKFDTTCKPLASTTQYSRAVFDGNYYYYLPWAHTKPVVTLTSYWEDISHRLDAVNTLLAMAERLQTNIEALKSGIQGKIPANQLAELWLKLIDEVIEDTRYTLPLTEGKANVTVLDTQIRKLRSRSLSQIHEAAVRMRSEATDVKSTLAEIEDWLDKLMQLTEEPQNSMPDIIIWMIRGEKRLAYARIPAHQVLYSTSGENASGKYCGKTQTIFLKYPQEKNNGPKVPVELRVNIWLGLSAVEKKFNSFAEGTFTVFAEMYENQALMFGKWGTSGLVGRHKFSDVTGKIKLKREFFLPPKGWEWEGEWIVDPERSLLTEADAGHTEFTDEVYQNESRYPGGDWKPAEDTYTDANGDKAASPSELTCPPGWEWEDDAWSYDINRAVDEKGWEYGITIPPDHKPKSWVAAEKMYHTHRRRRLVRKRKKDLTQTASSTARAMEELQDQEGWEYASLIGWKFHWKQRSSDTFRRRRWRRKMAPSETHGAAAIFKLEGALGADTTEDGDEKSLEKQKHSATTVFGANTPIVSCNFDRVYIYHLRCYVYQARNLLALDKDSFSDPYAHICFLHRSKTTEIIHSTLNPTWDQTIIFDEVEIYGEPQTVLQNPPKVIMELFDNDQVGKDEFLGRSIFSPVVKLNSEMDITPKLLWHPVMNGDKACGDVLVTAELILRGKDGSNLPILPPQRAPNLYMVPQGIRPVVQLTAIEILAWGLRNMKNFQMASITSPSLVVECGGERVESVVIKNLKKTPNFPSSVLFMKVFLPKEELYMPPLVIKVIDHRQFGRKPVVGQCTIERLDRFRCDPYAGKEDIVPQLKASLLSAPPCRDIVIEMEDTKPLLASKLTEKEEEIVDWWSKFYASSGEHEKCGQYIQKGYSKLKIYNCELENVAEFEGLTDFSDTFKLYRGKSDENEDPSVVGEFKGSFRIYPLPDDPSVPAPPRQFRELPDSVPQECTVRIYIVRGLELQPQDNNGLCDPYIKITLGKKVIEDRDHYIPNTLNPVFGRMYELSCYLPQEKDLKISVYDYDTFTRDEKVGETIIDLENRFLSRFGSHCGIPEEYCVSGVNTWRDQLRPTQLLQNVARFKGFPQPILSEDGSRIRYGGRDYSLDEFEANKILHQHLGAPEERLALHILRTQGLVPEHVETRTLHSTFQPNISQGKLQMWVDVFPKSLGPPGPPFNITPRKAKKYYLRVIIWNTKDVILDEKSITGEEMSDIYVKGWIPGNEENKQKTDVHYRSLDGEGNFNWRFVFPFDYLPAEQLCIVAKKEHFWSIDQTEFRIPPRLIIQIWDNDKFSLDDYLGFLELDLRHTIIPAKSPEKCRLDMIPDLKAMNPLKAKTASLFEQKSMKGWWPCYAEKDGARVMAGKVEMTLEILNEKEADERPAGKGRDEPNMNPKLDLPNRPETSFLWFTNPCKTMKFIVWRRFKWVIIGLLFLLILLLFVAVLLYSLPNYLSMKIVKPNV

SEQ ID NO: 509 - protein, 1574 aa, Homo sapiens [sequence omitted]

SEQ ID NO: 510 - protein, 2044 aa, Homo sapiens
MLRVIVESASNIPKTKFGKPDPIVSVIFKDEKKKTKKVDNELNPVWNEILEFDLRGIPLDFSSSLGIIVKDFETIGQNKLIGTATVALKDLTGDQSRSLPYKLISLLNEKGQDTGATIDLVIGYDPPSAPHPNDLSGPSVPGMGGDGEEDEGDEDRLDNAVRGPGPKGPVGTVSEAQLARRLTKVKNSRRMLSNKPQDFQIRVRVIEGRQLSGNNIRPVVKVHVCGQTHRTRIKRGNNPFFDELFFYNVNMTPSELMDEIISIRVYNSHSLRADCLMGEFKIDVGFVYDEPGHAVMRKWLLLNDPEDTSSGSKGYMKVSMFVLGTGDEPPPERRDRDNDSDDVESNLLLPAGIALRWVTFLLKIYRAEDIPQMDDAFSQTVKEIFGGNADKKNLVDPFVEVSFAGKKVCTNIIEKNANPEWNQVVNLQIKFPSVCEKIKLTIYDWDRLTKNDVVGTTYLHLSKIAASGGEVEVNTGETEVGFVPTFGPCYLNLYGSPREYTGFPDPYDELNTGKGEGVAYRGRILVELATFLEKTPPDKKLEPISNDDLLVVEKYQRRRKYSLSAVFHSATMLQDVGEAIQFEVSIGNYGNKFDTTCKPLASTTQYSRAVFDGNYYYYLPWAHTKPVVTLTSYWEDISHRLDAVNTLLAMAERLQTNIEALKSGIQGKIPANQLAELWLKLIDEVIEDTRYTLPLTEGKANVTVLDTQIRKLRSRSLSQIHEAAVRMRSEATDVKSTLAEIEDWLDKLMQLTEEPQNSMPDIIIWMIRGEKRLAYARIPAHQVLYSTSGENASGKYCGKTQTIFLKYPQEKNNGPKVPVELRVNIWLGLSAVEKKFNSFAEGTFTVFAEMYENQALMFGKWGTSGLVGRHKFSDVTGKIKLKREFFLPPKGWEWEGEWIVDPERSLLTEADAGHTEFTDEVYQNESRYPGGDWKPAEDTYTDANGDKAASPSELTCPPGWEWEDDAWSYDINRAVDEKGWEYGITIPPDHKPKSWVAAEKMYHTHRRRRLVRKRKKDLTQTASSTARAMEELQDQEGWEYASLIGWKFHWKQRSSDTFRRRRWRRKMAPSETHGAAAIFKLEGALGADTTEDGDEKSLEKQKHSATTVFGANTPIVSCNFDRVYIYHLRCYVYQARNLLALDKDSFSDPYAHICFLHRSKTTEIIHSTLNPTWDQTIIFDEVEIYGEPQTVLQNPPKVIMELFDNDQVGKDEFLGRSIFSPVVKLNSEMDITPKLLWHPVMNGDKACGDVLVTAELILRGKDGSNLPILPPQRAPNLYMVPQGIRPVVQLTAIEILAWGLRNMKNFQMASITSPSLVVECGGERVESVVIKNLKKTPNFPSSVLFMKVFLPKEELYMPPLVIKVIDHRQFGRKPVVGQCTIERLDRFRCDPYAGKEDIVPQLKASLLSAPPCRDIVIEMEDTKPLLASKEEEIVDWWSKFYASSGEHEKCGQYIQKGYSKLKIYNCELENVAEFEGLTDFSDTFKLYRGKSDENEDPSVVGEFKGSFRIYPLPDDPSVPAPPRQFRELPDSVPQECTVRIYIVRGLELQPQDNNGLCDPYIKITLGKKVIEDRDHYIPNTLNPVFGRMYELSCYLPQEKDLKISVYDYDTFTRDEKVGETIIDLENRFLSRFGSHCGIPEEYCVSGVNTWRDQLRPTQLLQNVARFKGFPQPILSEDGSRIRYGGRDYSLDEFEANKILHQHLGAPEERLALHILRTQGLVPEHVETRTLHSTFQPNISQGKLQMWVDVFPKSLGPPGPPFNITPRKAKKYYLRVIIWNTKDVILDEKSITGEEMSDIYVKGWIPGNEENKQKTDVHYRSLDGEGNFNWRFVFPFDYLPAEQLCIVAKKEHFWSIDQTEFRIPPRLIIQIWDNDKFSLDDYLGFLELDLRHTIIPAKSPEKCRLDMIPDLKAMNPLKAKTASLFEQKSMKGWWPCYAEKDGARVMAGKVEMTLEILNEKEADERPAGKGRDEPNMNPKLDLPNRPETSFLWFTNPCKTMKFIVWRRFKWVIIGLLFLLILLLFVAVLLYSLPNYLSMKIVKPNV

SEQ ID NO: 511 - protein, 2057 aa, Homo sapiens
MLRVIVESASNIPKTKFGKPDPIVSVIFKDEKKKTKKVDNELNPVWNEILEFDLRGIPLDFSSSLGIIVKDFETIGQNKLIGTATVALKDLTGDQSRSLPYKLISLLNEKGQDTGATIDLVIGYDPPSAPHPNDLSGPSVPGMGGDGEEDEGDEDRLDNAVRGPGPKGPVGTVSEAQLARRLTKVKNSRRMLSNKPQDFQIRVRVIEGRQLSGNNIRPVVKVHVCGQTHRTRIKRGNNPFFDELFFYNVNMTPSELMDEIISIRVYNSHSLRADCLMGEFKIDVGFVYDEPGHAVMRKWLLLNDPEDTSSGSKGYMKVSMFVLGTGDEPPPERRDRDNDSDDVESNLLLPAGIALRWVTFLLKIYRAEDIPQMDDAFSQTVKEIFGGNADKKNLVDPFVEVSFAGKKVCTNIIEKNANPEWNQVVNLQIKFPSVCEKIKLTIYDWDRLTKNDVVGTTYLHLSKIAASGGEVEDFSSSGTGAASYTVNTGETEVGFVPTFGPCYLNLYGSPREYTGFPDPYDELNTGKGEGVAYRGRILVELATFLEKTPPDKKLEPISNDDLLVVEKYQRRRKYSLSAVFHSATMLQDVGEAIQFEVSIGNYGNKFDTTCKPLASTTQYSRAVFDGNYYYYLPWAHTKPVVTLTSYWEDISHRLDAVNTLLAMAERLQTNIEALKSGIQGKIPANQLAELWLKLIDEVIEDTRYTLPLTEGKANVTVLDTQIRKLRSRSLSQIHEAAVRMRSEATDVKSTLAEIEDWLDKLMQLTEEPQNSMPDIIIWMIRGEKRLAYARIPAHQVLYSTSGENASGKYCGKTQTIFLKYPQEKNNGPKVPVELRVNIWLGLSAVEKKFNSFAEGTFTVFAEMYENQALMFGKWGTSGLVGRHKFSDVTGKIKLKREFFLPPKGWEWEGEWIVDPERSLLTEADAGHTEFTDEVYQNESRYPGGDWKPAEDTYTDANGDKAASPSELTCPPGWEWEDDAWSYDINRAVDEKGWEYGITIPPDHKPKSWVAAEKMYHTHRRRRLVRKRKKDLTQTASSTARAMEELQDQEGWEYASLIGWKFHWKQRSSDTFRRRRWRRKMAPSETHGAAAIFKLEGALGADTTEDGDEKSLEKQKHSATTVFGANTPIVSCNFDRVYIYHLRCYVYQARNLLALDKDSFSDPYAHICFLHRSKTTEIIHSTLNPTWDQTIIFDEVEIYGEPQTVLQNPPKVIMELFDNDQVGKDEFLGRSIFSPVVKLNSEMDITPKLLWHPVMNGDKACGDVLVTAELILRGKDGSNLPILPPQRAPNLYMVPQGIRPVVQLTAIEILAWGLRNMKNFQMASITSPSLVVECGGERVESVVIKNLKKTPNFPSSVLFMKVFLPKEELYMPPLVIKVIDHRQFGRKPVVGQCTIERLDRFRCDPYAGKEDIVPQLKASLLSAPPCRDIVIEMEDTKPLLASKEEEIVDWWSKFYASSGEHEKCGQYIQKGYSKLKIYNCELENVAEFEGLTDFSDTFKLYRGKSDENEDPSVVGEFKGSFRIYPLPDDPSVPAPPRQFRELPDSVPQECTVRIYIVRGLELQPQDNNGLCDPYIKITLGKKVIEDRDHYIPNTLNPVFGRMYELSCYLPQEKDLKISVYDYDTFTRDEKVGETIIDLENRFLSRFGSHCGIPEEYCVSGVNTWRDQLRPTQLLQNVARFKGFPQPILSEDGSRIRYGGRDYSLDEFEANKILHQHLGAPEERLALHILRTQGLVPEHVETRTLHSTFQPNISQGKLQMWVDVFPKSLGPPGPPFNITPRKAKKYYLRVIIWNTKDVILDEKSITGEEMSDIYVKGWIPGNEENKQKTDVHYRSLDGEGNFNWRFVFPFDYLPAEQLCIVAKKEHFWSIDQTEFRIPPRLIIQIWDNDKFSLDDYLGFLELDLRHTIIPAKSPEKCRLDMIPDLKAMNPLKAKTASLFEQKSMKGWWPCYAEKDGARVMAGKVEMTLEILNEKEADERPAGKGRDEPNMNPKLDLPNRPETSFLWFTNPCKTMKFIVWRRFKWVIIGLLFLLILLLFVAVLLYSLPNYLSMKIVKPNV

SEQ ID NO: 512 - protein, 2061 aa, Homo sapiens
MLRVIVESASNIPKTKFGKPDPIVSVIFKDEKKKTKKVDNELNPVWNEILEFDLRGIPLDFSSSLGIIVKDFETIGQNKLIGTATVALKDLTGDQSRSLPYKLISLLNEKGQDTGATIDLVIGYDPPSAPHPNDLSGPSVPGMGGDGEEDEGDEDRLDNAVRGPGPKGPVGTVSEAQLARRLTKVKNSRRMLSNKPQDFQIRVRVIEGRQLSGNNIRPVVKVHVCGQTHRTRIKRGNNPFFDELFFYNVNMTPSELMDEIISIRVYNSHSLRADCLMGEFKIDVGFVYDEPGHAVMRKWLLLNDPEDTSSGSKGYMKVSMFVLGTGDEPPPERRDRDNDSDDVESNLLLPAGIALRWVTFLLKIYRAEDIPQMDDAFSQTVKEIFGGNADKKNLVDPFVEVSFAGKKVCTNIIEKNANPEWNQVVNLQIKFPSVCEKIKLTIYDWDRLTKNDVVGTTYLHLSKIAASGGEVEDFSSSGTGAASYTVNTGETEVGFVPTFGPCYLNLYGSPREYTGFPDPYDELNTGKGEGVAYRGRILVELATFLEKTPPDKKLEPISNDDLLVVEKYQRRRKYSLSAVFHSATMLQDVGEAIQFEVSIGNYGNKFDTTCKPLASTTQYSRAVFDGNYYYYLPWAHTKPVVTLTSYWEDISHRLDAVNTLLAMAERLQTNIEALKSGIQGKIPANQLAELWLKLIDEVIEDTRYTLPLTEGKANVTVLDTQIRKLRSRSLSQIHEAAVRMRSEATDVKSTLAEIEDWLDKLMQLTEEPQNSMPDIIIWMIRGEKRLAYARIPAHQVLYSTSGENASGKYCGKTQTIFLKYPQEKNNGPKVPVELRVNIWLGLSAVEKKFNSFAEGTFTVFAEMYENQALMFGKWGTSGLVGRHKFSDVTGKIKLKREFFLPPKGWEWEGEWIVDPERSLLTEADAGHTEFTDEVYQNESRYPGGDWKPAEDTYTDANGDKAASPSELTCPPGWEWEDDAWSYDINRAVDEKGWEYGITIPPDHKPKSWVAAEKMYHTHRRRRLVRKRKKDLTQTASSTARAMEELQDQEGWEYASLIGWKFHWKQRSSDTFRRRRWRRKMAPSETHGAAAIFKLEGALGADTTEDGDEKSLEKQKHSATTVFGANTPIVSCNFDRVYIYHLRCYVYQARNLLALDKDSFSDPYAHICFLHRSKTTEIIHSTLNPTWDQTIIFDEVEIYGEPQTVLQNPPKVIMELFDNDQVGKDEFLGRSIFSPVVKLNSEMDITPKLLWHPVMNGDKACGDVLVTAELILRGKDGSNLPILPPQRAPNLYMVPQGIRPVVQLTAIEILAWGLRNMKNFQMASITSPSLVVECGGERVESVVIKNLKKTPNFPSSVLFMKVFLPKEELYMPPLVIKVIDHRQFGRKPVVGQCTIERLDRFRCDPYAGKEDIVPQLKASLLSAPPCRDIVIEMEDTKPLLASKLTEKEEEIVDWWSKFYASSGEHEKCGQYIQKGYSKLKIYNCELENVAEFEGLTDFSDTFKLYRGKSDENEDPSVVGEFKGSFRIYPLPDDPSVPAPPRQFRELPDSVPQECTVRIYIVRGLELQPQDNNGLCDPYIKITLGKKVIEDRDHYIPNTLNPVFGRMYELSCYLPQEKDLKISVYDYDTFTRDEKVGETIIDLENRFLSRFGSHCGIPEEYCVSGVNTWRDQLRPTQLLQNVARFKGFPQPILSEDGSRIRYGGRDYSLDEFEANKILHQHLGAPEERLALHILRTQGLVPEHVETRTLHSTFQPNISQGKLQMWVDVFPKSLGPPGPPFNITPRKAKKYYLRVIIWNTKDVILDEKSITGEEMSDIYVKGWIPGNEENKQKTDVHYRSLDGEGNFNWRFVFPFDYLPAEQLCIVAKKEHFWSIDQTEFRIPPRLIIQIWDNDKFSLDDYLGFLELDLRHTIIPAKSPEKCRLDMIPDLKAMNPLKAKTASLFEQKSMKGWWPCYAEKDGARVMAGKVEMTLEILNEKEADERPAGKGRDEPNMNPKLDLPNRPETSFLWFTNPCKTMKFIVWRRFKWVIIGLLFLLILLLFVAVLLYSLPNYLSMKIVKPNV

SEQ ID NO: 513 - protein, 351 aa, Homo sapiens [sequence omitted]

SEQ ID NO: 514 - protein, 66 aa, Homo sapiens
TPAGLTPSPPVDVIHTVGPIAYGEPSASQAAELRSCYLSSLDLLLEHRLRSVVRDGPRGRAGGGAQ

SEQ ID NO: 515 - protein, 325 aa, Homo sapiens
MSLQSRLSGRLAQLRAAGQLLVPPRPRPGHLAGATRTRSSTCGPPAFLGVFGRRARTSAGVGAWGAAAVGRTAGVRTWAPLAMAAKVDLSTSTDWKEAKSFLKGLSDKQREEHYFCKDFVRLKKIPTWKEMAKGVAVKVEEPRYKKDKQLNEKISLLRSDITKLEVDAIVNAANSSLLGGGGVDGCIHRAAGPLLTDECRTLQSCKTGKAKITGGYRLPAKYVIHTVGPIAYGEPSASQAAELRSCYLSSLDLLLEHRLRSVAFPCISTGVFGYPCEAAAEIVLATLREWLEQHKDKVDRLIICVFLEKDEDIYRSRLPHYFPVA

SEQ ID NO: 516 - protein, 325 aa, Homo sapiens; identical to SEQ ID NO: 515

SEQ ID NO: 517 - protein, 748 aa, Homo sapiens
MVLLRVLILLLSWAAGMGGQYGNPLNKYIRHYEGLSYNVDSLHQKHQRAKRAVSHEDQFLRLDFHAHGRHFNLRMKRDTSLFSDEFKVETSNKVLDYDTSHIYTGHIYGEEGSFSHGSVIDGRFEGFIQTRGGTFYVEPAERYIKDRTLPFHSVIYHEDDINYPHKYGPQGGCADHSVFERMRKYQMTGVEEVTQIPQEEHAANGPELLRKKRTTSAEKNTCQLYIQTDHLFFKYYGTREAVIAQISSHVKAIDTIYQTTDFSGIRNISFMVKRIRINTTADEKDPTNPFRFPNIGVEKFLELNSEQNHDDYCLAYVFTDRDFDDGVLGLAWVGAPSGSSGGICEKSKLYSDGKKKSLNTGIITVQNYGSHVPPKVSHITFAHEVGHNFGSPHDSGTECTPGESKNLGQKENGNYIMYARATSGDKLNNNKFSLCSIRNISQVLEKKRNNCFVESGQPICGNGMVEQGEECDCGYSDQCKDECCFDANQPEGRKCKLKPGKQCSPSQGPCCTAQCAFKSKSEKCRDDSDCAREGICNGFTALCPASDPKPNFTDCNRHTQVCINGQCAGSICEKYGLEECTCASSDGKDDKELCHVCCMKKMDPSTCASTGSVQWSRHFSGRTITLQPGSPCNDFRGYCDVFMRCRLVDADGPLARLKKAIFSPELYENIAEWIVAHWWAVLLMGIALIMLMAGFIKICSVHTPSSNPKLPPPKPLPGTLKRRRPPQPIQQPQRQRPRESYQMGHMRR

SEQ ID NO: 518 - protein, 567 aa, Homo sapiens
MRKYQMTGVEEVTQIPQEEHAANGPELLRKKRTTSAEKNTCQLYIQTDHLFFKYYGTREAVIAQISSHVKAIDTIYQTTDFSGIRNISFMVKRIRINTTADEKDPTNPFRFPNIGVEKFLELNSEQNHDDYCLAYVFTDRDFDDGVLGLAWVGAPSGSSGGICEKSKLYSDGKKKSLNTGIITVQNYGSHVPPKVSHITFAHEVGHNFGSPHDSGTECTPGESKNLGQKENGNYIMYARATSGDKLNNNKFSLCSIRNISQVLEKKRNNCFVESGQPICGNGMVEQGEECDCGYSDQCKDECCFDANQPEGRKCKLKPGKQCSPSQGPCCTAQCAFKSKSEKCRDDSDCAREGICNGFTALCPASDPKPNFTDCNRHTQVCINGQCAGSICEKYGLEECTCASSDGKDDKELCHVCCMKKMDPSTCASTGSVQWSRHFSGRTITLQPGSPCNDFRGYCDVFMRCRLVDADGPLARLKKAIFSPELYENIAEWIVAHWWAVLLMGIALIMLMAGFIKICSVHTPSSNPKLPPPKPLPGTLKRRRPPQPIQQPQRQRPRESYQMGHMRR

SEQ ID NO: 519 - protein, 748 aa, Homo sapiens; identical to SEQ ID NO: 517

SEQ ID NO: 520 - protein, 748 aa, Homo sapiens; identical to SEQ ID NO: 517

SEQ ID NO: 521 - protein, 1233 aa, Homo sapiens
MLTKFETKSARVKGLSFHPKRPWILTSLHNGVIQLWDYRMCTLIDKFDEHDGPVRGIDFHKQQPLFVSGGDDYKIKVWNYKLRRCLFTLLGHLDYIRTTFFHHEYPWILSASDDQTIRVWNWQSRTCVCVLTGHNHYVMCAQFHPTEDLVVSASLDQTVRVWDISGLRKKNLSPGAVESDVRGITGVDLFGTTDAVVKHVLEGHDRGVNWAAFHPTMPLIVSGADDRQVKIWRMNESKAWEVDTCRGHYNNVSCAVFHPRQELILSNSEDKSIRVWDMSKRTGVQTFRRDHDRFWVLAAHPNLNLFAAGHDGGMIVFKLERERPAYAVHGNMLHYVKDRFLRQLDFNSSKDVAVMQLRSGSKFPVFNMSYNPAENAVLLCTRASNLENSTYDLYTIPKDADSQNPDAPEGKRSSGLTAVWVARNRFAVLDRMHSLLIKNLKNEITKKVQVPNCDEIFYAGTGNLLLRDADSITLFDVQQKRTLASVKISKVKYVIWSADMSHVALLAKHEHSCPLPLTAIVICNRKLDALCNIHENIRVKSGAWDESGVFIYTTSNHIKYAVTTGDHGIIRTLDLPIYVTRVKGNNVYCLDRECRPRVLTIDPTEFKFKLALINRKYDEVLHMVRNAKLVGQSIIAYLQKKGYPEVALHFVKDEKTRFSLALECGNIEIALEAAKALDDKNCWEKLGEVALLQGNHQIVEMCYQRTKNFDKLSFLYLITGNLEKLRKMMKIAEIRKDMSGHYQNALYLGDVSERVRILKNCGQKSLAYLTAATHGLDEEAESLKETFDPEKETIPDIDPNAKLLQPPAPIMPLDTNWPLLTVSKGFFEGTIASKGKGGALAADIDIDTVGTEGWGEDAELQLDEDGFVEATEGLGDDALGKGQEEGGGWDVEEDLELPPELDISPGAAGGAEDGFFVPPTKGTSPTQIWCNNSQLPVDHILAGSFETAMRLLHDQVGVIQFGPYKQLFLQTYARGRTTYQALPCLPSMYGYPNRNWKDAGLKNGVPAVGLKLNDLIQRLQLCYQLTTVGKFEEAVEKFRSILLSVPLLVVDNKQEIAEAQQLITICREYIVGLSVETERKKLPKETLEQQKRICEMAAYFTHSNLQPVHMILVLRTALNLFFKLKNFKTAATFARRLLELGPKPEVAQQTRKILSACEKNPTDAYQLNYDMHNPFDICAASYRPIYRGKPVEKCPLSGACYSPEFKGQICRVTTVTEIGKDVIGLRISPLQFR

SEQ ID NO: 522 - protein, 843 aa, Homo sapiens
MAKPLTDSEKRKQISVRGLAGLGDVAEVRKSFNRHLHFTLVKDRNVATPRDYFFALAHTVRDHLVGRWIRTQQHYYERDPKRIYYLSLEFYMGRTLQNTMVNLGLQNACDEAIYQLGLDLEELEEIEEDAGLGNGGLGRLAACFLDSMATLGLAAYGYGIRYEFGIFNQKIVNGWQVEEADDWLRYGNPWEKARPEYMLPVHFYGRVEHTPDGVKWLDTQVVLAMPYDTPVPGYKNNTVNTMRLWSAKAPNDFKLQDFNVGDYIEAVLDRNLAENISRVLYPNDNFFEGKELRLKQEYFVVAATLQDIIRRFKSSKFGCRDPVRTCFETFPDKVAIQLNDTHPALSIPELMRILVDVEKVDWDKAWEITKKTCAYTNHTVLPEALERWPVSMFEKLLPRHLEIIYAINQRHLDHVAALFPGDVDRLRRMSVIEEGDCKRINMAHLCVIGSHAVNGVARIHSEIVKQSVFKDFYELEPEKFQNKTNGITPRRWLLLCNPGLADTIVEKIGEEFLTDLSQLKKLLPLVSDEVFIRDVAKVKQENKLKFSAFLEKEYKVKINPSSMFDVHVKRIHEYKRQLLNCLHVVTLYNRIKRDPAKAFVPRTVMIGGKAAPGYHMAKLIIKLVTSIGDVVNHDPVVGDRLKVIFLENYRVSLAEKVIPAADLSQQISTAGTEASGTGNMKFMLNGALTIGTMDGANVEMAEEAGAENLFIFGLRVEDVEALDRKGYNAREYYDHLPELKQAVDQISSGFFSPKEPDCFKDIVNMLMHHDRFKVFADYEAYMQCQAQVDQLYRNPKEWTKKVIRNIACSGKFSSDRTITEYAREIWGVEPSDLQIPPPNIPRD

SEQ ID NO: 523 - protein, 862 aa, Homo sapiens
MAKPLTDSEKRKQISVRGLAGLGDVAEVRKSFNRHLHFTLVKDRNVATPRDYFFALAHTVRDHLVGRWIRTQQHYYERDPKRIYYLSLEFYMGRTLQNTMVNLGLQNACDEAIYQLGLDLEELEEIEEDAGLGNGGLGRLAACFLDSMATLGLAAYGYGIRYEFGIFNQKIVNGWQVEEADDWLRYGNPWEKARPEYMLPVHFYGRVEHTPDGVKWLDTQVVLAMPYDTPVPGYKNNTVNTMRLWSAKAPNDFKLQDFNVGDYIEAVLDRNLAENISRVLYPNDNFFEGKELRLKQEYFVVAATLQDIIRRFKSSKFGCRDPVRTCFETFPDKVAIQLNDTHPALSIPELMRILVDVEKVDWDKAWEITKKTCAYTNHTVLPEALERWPVSMFEKLLPRHLEIIYAINQRHLDHVAALFPGDVDRLRRMSVIEEGDCKRINMAHLCVIGSHAVNGVARIHSEIVKQSVFKDFYELEPEKFQNKTNGITPRRWLLLCNPGLADTIVEKIGEEFLTDLSQLKKLLPLVSDEVFIRDVAKVKQENKLKFSAFLEKEYKVKINPSSMFDVHVKRIHEYKRQLLNCLHVVTLYNRIKRDPAKAFVPRTVMIGGKAAPGYHMAKLIIKLVTSIGDVVNHDPVVGDRLKVIFLENYRVSLAEKVIPAADLSQQISTAGTEASGTGNMKFMLNGALTIGTMDGANVEMAEEAGAENLFIFGLRVEDVEALDRKGYNAREYYDHLPELKQAVDQISSGFFSPKEPDCFKDIVNMLMHHDRFKVFADYEAYMQCQAQVDQLYRNPKEWTKKVIRNIACSGKFSSDRTITEYAREIWGSWPALQLQHLPHPEWESGGATCWAPPELCTHLAMY

SEQ ID NO: 524 - protein, 843 aa, Homo sapiens; identical to SEQ ID NO: 522

SEQ ID NO: 525 - protein, 842 aa, Homo sapiens
AKPLTDSEKRKQISVRGLAGLGDVAEVRKSFNRHLHFTLVKDRNVATPRDYFFALAHTVRDHLVGRWIRTQQHYYERDPKRIYYLSLEFYMGRTLQNTMVNLGLQNACDEAIYQLGLDLEELEEIEEDAGLGNGGLGRLAACFLDSMATLGLAAYGYGIRYEFGIFNQKIVNGWQVEEADDWLRYGNPWEKARPEYMLPVHFYGRVEHTPDGVKWLDTQVVLAMPYDTPVPGYKNNTVNTMRLWSAKAPNDFKLQDFNVGDYIEAVLDRNLAENISRVLYPNDNFFEGKELRLKQEYFVVAATLQDIIRRFKSSKFGCRDPVRTCFETFPDKVAIQLNDTHPALSIPELMRILVDVEKVDWDKAWEITKKTCAYTNHTVLPEALERWPVSMFEKLLPRHLEIIYAINQRHLDHVAALFPGDVDRLRRMSVIEEGDCKRINMAHLCVIGSHAVNGVARIHSEIVKQSVFKDFYELEPEKFQNKTNGITPRRWLLLCNPGLADTIVEKIGEEFLTDLSQLKKLLPLVSDEVFIRDVAKVKQENKLKFSAFLEKEYKVKINPSSMFDVHVKRIHEYKRQLLNCLHVVTLYNRIKRDPAKAFVPRTVMIGGKAAPGYHMAKLIIKLVTSIGDVVNHDPVVGDRLKVIFLENYRVSLAEKVIPAADLSQQISTAGTEASGTGNMKFMLNGALTIGTMDGANVEMAEEAGAENLFIFGLRVEDVEALDRKGYNAREYYDHLPELKQAVDQISSGFFSPKEPDCFKDIVNMLMHHDRFKVFADYEAYMQCQAQVDQLYRNPKEWTKKVIRNIACSGKFSSDRTITEYAREIWGVEPSDLQIPPPNIPRD

SEQ ID NO: 526 - protein, 843 aa, Homo sapiens; identical to SEQ ID NO: 522

SEQ ID NO: 527 - protein, 362 aa, Homo sapiens
MLVMAPRTVLLLLSAALALTETWAGSHSMRYFYTAVSRPGRGEPRFISVGYVDDTQFVRFDSDAASPREEPRAPWIEQEGPEYWDRNTQICKTNTQTDRESLRNLRGYYNQSEAGSHTLQWMYGCDVGPDGRLLRGYNQFAYDGKDYIALNEDLSSWTAADTAAQITQRKWEAAREAEQLRAYLEGTCVEWLRRHLENGKETLQRADPPKTHVTHHPISDHEATLRCWALGFYPAEITLTWQRDGEDQTQDTELVETRPAGDRTFQKWAAVVVPSGEEQRYTCHVQHEGLPKPLTLRWEPSSQSTVPIVGIVAGLAVLAVVVIGAVVAAVMCRRKSSGGKGGSYSQAASSDSAQGSDVSLTA

SEQ ID NO: 528 - protein, 365 aa, Homo sapiens [sequence omitted]

SEQ ID NO: 529 - protein, 362 aa, Homo sapiens [sequence omitted]

SEQ ID NO: 530 - protein, 362 aa, Homo sapiens [sequence omitted]

SEQ ID NO: 531 - protein, 366 aa, Homo sapiens [sequence omitted]

SEQ ID NO: 532 - protein, 362 aa, Homo sapiens [sequence omitted]

SEQ ID NO: 533 - protein, 323 aa, Homo sapiens [sequence omitted]

SEQ ID NO: 534 - protein, 372 aa, Homo sapiens [sequence omitted]

SEQ ID NO: 535 - protein, 366 aa, Homo sapiens
MRVMAPRTLILLLSGALALTETWAGSHSMRYFSTSVSWPGRGEPRFIAVGYVDDTQFVRFDSDAASPRGEPREPWVEQEGPEYWDRETQKYKRQAQADRVNLRKLRGYYNQSEDGSHTLQRMFGCDLGPDGRLLRGYNQFAYDGKDYIALNEDLRSWTAADTAAQITQRKWEAAREAEQRRAYLEGTCVEWLRRYLENGKETLQRAEHPKTHVTHHPVSDHEATLRCWALGFYPAEITLTWQWDGEDQTQDTELVETRPAGDGTFQKWAAVVVPSGEEQRYTCHVQHEGLPEPLTLRWKPSSQPTIPIVGIVAGLAVLAVLAVLGAMVAVVMCRRKSSGGKGGSCSQAASSNSAQGSDESLIACKA

SEQ ID NO: 536 - protein, 362 aa, Homo sapiens [sequence omitted]

SEQ ID NO: 537 - protein, 362 aa, Homo sapiens
MRVTAPRTLLLLLWGAVALTETWAGSHSMRYFHTSVSRPGRGEPRFISVGYVDGTQFVRFDSDAASPRTEPRAPWIEQEGPEYWDRNTQISKTNTQTYRESLRNLRGYYNQSEAGSHTLQRMYGCDVGPDGRLLRGHDQSAYDGKDYIALNEDLSSWTAADTAAQITQRKWEAARVAEQLRAYLEGTCVEWLRRHLENGKETLQRADPPKTHVTHHPISDHEATLRCWALGFYPAEITLTWQRDGEDQTQDTELVETRPAGDRTFQKWAAVVVPSGEEQRYTCHVQHEGLPKPLTLRWEPSSQSTIPIVGIVAGLAVLAVVVIGAVVATVMCRRKSSGGKGGSYSQAASSDSAQGSDVSLTA

SEQ ID NO: 538 - protein, 362 aa, Homo sapiens [sequence omitted]

SEQ ID NO: 539 - protein, 222 aa, Homo sapiens [sequence omitted]

SEQ ID NO: 540 - protein, 287 aa, Homo sapiens [sequence omitted]

SEQ ID NO: 541 - protein, 365 aa, Homo sapiens
MAVMAPRTLLLLLLGALALTQTWAGSHSMRYFFTSVSRPGRGEPRFIAVGYVDDTQFVRFDSDAASQRMEPRAPWIEQEGPEYWDQETRNVKAHSQTDRESLRIALRYYNQSEAGSHTIQMMYGCDVGPDGRLLRGYQQDAYDGKDYIALNEDLRSWTAADMAAQITQRKWEAARVAEQLRAYLEGTCVEWLRRYLENGKETLQRTDAPKTHMTHHAVSDHEATLRCWALSFYPAEITLTWQRDGEDQTQDTELVETRPAGDGTFQKWASVVVPSGQEQRYTCHVQHEGLPKPLTLRWEPSSQPTIPIVGIIAGLVLFGAMFAGAVVAAVRWRRKSSDRKGGSYSQAASSDSAQGSDMSLTACKV

SEQ ID NO: 542 - protein, 243 aa, Homo sapiens [sequence omitted]

SEQ ID NO: 543 - protein, 366 aa, Homo sapiens [sequence omitted]

SEQ ID NO: 544 - protein, 345 aa, Homo sapiens [sequence omitted]

SEQ ID NO: 545 - protein, 366 aa, Homo sapiens [sequence omitted]

SEQ ID NO: 546 - protein, 366 aa, Homo sapiens
MRVMAPRTLILLLSGALALTETWACSHSMRYFYTAVSRPGRGEPRFIAVGYVDDTQFVQFDSDAASPRGEPRAPWVEQEGPEYWDRETQKYKRQAQTDRVNLRKLRGYYNQSEAGSHTLQRMYGCDLGPDGRLLRGYNQFAYDGKDYIALNEDLRSWTAADKAAQITQRKWEAAREAEQRRAYLEGTCVEWLRRYLENGKKTLQRAEHPKTHVTHHPVSDHEATLRCWALGFYPAEITLTWQRDGEDQTQDTELVETRPAGDGTFQKWAAVVVPSGEEQRYTCHVQHEGLPEPLTLRWGPSSQPTIPIVGIVAGLAVLAVLAVLGAVMAVVMCRRKSSGGKGGSCSQAASSNSAQGSDESLIACKA

SEQ ID NO: 547 - protein, 365 aa, Homo sapiens [sequence omitted]

SEQ ID NO: 548 - protein, 362 aa, Homo sapiens [sequence omitted]

SEQ ID NO: 549 - protein, 389 aa, Homo sapiens [sequence omitted]

SEQ ID NO: 550 - protein, 362 aa, Homo sapiens
MLVMAPRTVLLLLSAALALTETWAGSHSMRYFDTAMSRPGRGEPRFISVGYVDDTQFVRFDSDAASPREEPRAPWIEQEGPEYWDRNTQIFKTNTQTDRESLRNLRGYYNQSEAGSHTLQSMYGCDVGPDGRLLRGHNQYAYDGKDYIALNEDLRSWTAADTAAQITQRKWEAARVAEQDRAYLEGTCVEWLRRYLENGKDTLERADPPKTHVTHHPISDHEATLRCWALGFYPAEITLTWQRDGEDQTQDTELVETRPAGDRTFQKWAAVVVPSGEEQRYTCHVQHEGLPKPLTLRWEPSSQSTVPIVGIVAGLAVLAVVVIGAVVAAVMCRRKSSGGKGGSYSQAACSDSAQGSDVSLTA

SEQ ID NO: 551 - protein, 365 aa, Homo sapiens [sequence omitted]

SEQ ID NO: 552 - protein, 366 aa, Homo sapiens
MRVMAPRTLILLLSGALALTETWACSHSMRYFDTAVSRPGRGEPRFISVGYVDDTQFVRFDSDAASPRGEPRAPWVEQEGPEYWDRETQKYKRQAQADRVNLRKLRGYYNQSEDGSHTLQWMYGCDLGPDGRLLRGYDQSAYDGKDYIALNEDLRSWTAADTAAQITQRKWEAAREAEQWRAYLEGTCVEWLRRYLENGKETLQRAEHPKTHVTHHPVSDHEATLRCWALGFYPAEITLTWQRDGEDQTQDTELVETRPAGDGTFQKWAAVVVPSGEEQRYTCHVQHEGLPEPLTLRWEPSSQPTIPIVGIVAGLAVLAVLAVLGAVMAVVMCRRKSSGGKGGSCSQAASSNSAQGSDESLIACKA

SEQ ID NO: 553 - protein, 362 aa, Homo sapiens [sequence omitted]

SEQ ID NO: 554 - protein, 326 aa, Homo sapiens [sequence omitted]

SEQ ID NO: 555 - protein, 362 aa, Homo sapiens [sequence omitted]

SEQ ID NO: 556 - protein, 366 aa, Homo sapiens
MRVMAPRALLLLLSGGLALTETWACSHSMRYFDTAVSRPGRGEPRFISVGYVDDTQFVRFDSDAASPRGEPRAPWVEQEGPEYWDRETQNYKRQAQADRVSLRNLRGYYNQSEDGSHTLQRMYGCDLGPDGRLLRGYDQSAYDGKDYIALNEDLRSWTAADTAAQITQRKLEAARAAEQLRAYLEGTCVEWLRRYLENGKETLQRAEPPKTHVTHHPLSDHEATLRCWALGFYPAEITLTWQRDGEDQTQDTELVETRPAGDGTFQKWAAVVVPSGQEQRYTCHMQHEGLQEPLTLSWEPSSQPTIPIMGIVAGLAVLVVLAVLGAVVTAMMCRRKSSGGKGGSCSQAACSNSAQGSDESLITCKA

SEQ ID NO: 557 - protein, 362 aa, Homo sapiens
MLVMAPRTVLLLLSAALALTETWAGSHSMRYFYTSVSRPGRGEPRFISVGYVDDTQFVRFDSDAASPREEPRAPWIEQEGPEYWDRNTQIYKAQAQTDRESLRNLRGYYNQSEAGSHTLQSMYGCDVGPDGRLLRGHNQYAYDGKDYIALNEDLRSWTAADTAAQITQRKWEAARVAEQDRAYLEGTCVEWLRRYLENGKDTLERADPPKTHVTHHPISDHEATLRCWALGFYPAEITLTWQRDGEDQTQDTELVETRPAGDRTFQKWAAVVVPSGEEQRYTCHVQHEGLPKPLTLRWEPSSQSTVPIVGIVAGLAVLAVVVIGAVVAAVMCRRKSSGGKGGSYSQAACSDSAQGSDVSLTA

SEQ ID NO: 558 - protein, 326 aa, Homo sapiens [sequence omitted]

SEQ ID NO: 559 - protein, 365 aa, Homo sapiens [sequence omitted]

SEQ ID NO: 560 - protein, 365 aa, Homo sapiens [sequence omitted]

SEQ ID NO: 561 - protein, 366 aa, Homo sapiens
MRVMAPRTLILLLSGALALTETWACSHSMRYFSTSVSRPGRGEPRFIAVGYVDDTQFVRFDSDAASPRGEPRAPWVEQEGPEYWDRETQKYKRQAQTDRVSLRNLRGYYNQSEAGSHTLQWMFGCDLGPDGRLLRGYDQSAYDGKDYIALNEDLRSWTAADTAAQITQRKWEAAREAEQRRAYLEGTCVEWLRRYLENGKESLQRAEHPKTHVTHHPVSDHEATLRCWALGFYPAEITLTWQWDGEDQTQDTELVETRPAGDGTFQKWAAVMVPSGEEQRYTCHVQHEGLPEPLTLRWEPSSQPTIPIVGIVAGLAVLAVLAVLGAVVAVVMCRRKSSGGKGGSCSQAASSNSAQGSDESLIACKA

SEQ ID NO: 562 - protein, 366 aa, Homo sapiens [sequence omitted]

SEQ ID NO: 563 - protein, 366 aa, Homo sapiens
MRVMAPRTLILLLSGALALTETWACSHSMRYFYTAVSRPGRGEPRFIAVGYVDDTQFVRFDSDAASPRGEPRAPWVEQEGPEYWDRETQKYKRQAQADRVSLRNLRGYYNQSEAGSHTLQRMYGCDLGPDGRLLRGYDQSAYDGKDYIALNEDLRSWTAADTAAQITQRKWEAAREAEQWRAYLEGTCVEWLRRYLENGKETLQRAEHPKTHVTHHPVSDHEATLRCWALGFYPAEITLTWQRDGEDQTQDTELVETRPAGDGTFQKWAAVVVPSGEEQRYTCHVQHEGLPEPLTLRWEPSSQPTIPIVGIVAGLAVLAVLAVLGAVMAVVMCRRKSSGGKGGSCSQAASSNSAQGSDESLIACKA

SEQ ID NO: 564 - protein, 366 aa, Homo sapiens
MRVMAPRTLILLLSGALALTETWACSHSMKYFFTSVSRPGRGEPRFISVGYVDDTQFVRFDSDAASPRGEPRAPWVEQEGPEYWDRETQKYKRQAQTDRVSLRNLRGYYNQSEAGSHTLQWMCGCDLGPDGRLLRGYDQYAYDGKDYIALNEDLRSWTAADTAAQITQRKWEAAREAEQRRAYLEGTCVEWLRRYLENGKETLQRAEHPKTHVTHHPVSDHEATLRCWALGFYPAEITLTWQWDGEDQTQDTELVETRPAGDGTFQKWAAVMVPSGEEQRYTCHVQHEGLPEPLTLRWEPSSQPTIPIVGIVAGLAVLAVLAVLGAVVAVVMCRRKSSGGKGGSCSQAASSNSAQGSDESLIACKA

SEQ ID NO: 565 - protein, 273 aa, Homo sapiens
SHSMRYFYTSVSRPGRGEPRFIAVGYVDDTQFVRFDSDAASQRMEPRAPWIEQEGPEYWDRNTRNVKAQSQTDRVDLGTLRGYYNQSEAGSHTVQRMYGCDVGSDWRFLRGYHQYAYDGKDYIALKEDLRSWTAADMAAQTTKHKWEAAHVAEQLRAYLEGTCVEWLRRYLENGKETLQRTDAPKTHMTHHAVSDHEATLRCWALSFYPAEITLTWQRDGEDQTQDTELVETRPAGDGTFQKWAAVVVPSGQEQRYTCHVQHEGLPKPLTLRW

SEQ ID NO: 566 - protein, 362 aa, Homo sapiens [sequence omitted]

SEQ ID NO: 567 - protein, 368 aa, Homo sapiens [sequence omitted]

SEQ ID NO: 568 - protein, 374 aa, Homo sapiens [sequence omitted]

SEQ ID NO: 569 - protein, 366 aa, Homo sapiens [sequence omitted]

SEQ ID NO: 570 - protein, 366 aa, Homo sapiens [sequence omitted]

SEQ ID NO: 571 - protein, 366 aa, Homo sapiens [sequence omitted]

SEQ ID NO: 572 - protein, 275 aa, Homo sapiens
VKAQSQTHRVDLGTLRGYYNQSEAVSHTVQRMYGCDVGSDGRFLRGYHQVAYDGKDYIALKEDLRSWTAADMAAQTTKHKWEAAHVAEQLRAYLEGTCVEWLRRYLENGKETLQRTDAPKTHMTHHAVSDHEATLRCWALSFYPAEITLTWQRDGEDQTQDTELVETRPAGDGTFQKWAAVVVPSGEEQRYTCHVQHEGLPKPLTLRWEPSSQPTIPIVGIIAGLVLLGAVITGAVVAAVMWRRKSSDRKGGSYSQAASSDSAQGSDVSLTACKV

SEQ ID NO: 573 - protein, 362 aa, Homo sapiens [sequence omitted]

SEQ ID NO: 574 - protein, 365 aa, Homo sapiens [sequence omitted]

SEQ ID NO: 575 - protein, 366 aa, Homo sapiens [sequence omitted]

SEQ ID NO: 576 - protein, 365 aa, Homo sapiens [sequence omitted]

SEQ ID NO: 577 - protein, 365 aa, Homo sapiens [sequence omitted]

SEQ ID NO: 578 - protein, 365 aa, Homo sapiens
MAVMAPRTLLLLLSGALALTHTWAGSHSMRYFSTSVSRPGSGEPRFIAVGYVDDTQFVRFDSDAASQRMEPRAPWIEQERPEYWDQETRNVKAQSQTDRVDLGTLRGYYNQSEAGSHTIQIMYGCDVGSDGRFLRGYEQHAYDGKDYIALNEDLRSWTAADMAAQITQRKWEAARWAEQLRAYLEGTCVEWLRRYLENGKETLQRTDPPKTHMTHHPISDHEATLRCWALGFYPAEITLTWQRDGEDQTQDTELVETRPAGDGTFQKWAAVVVPSGEEQRYTCHVQHEGLPKPLTLRWELSSQPTIPIVGIIAGLVLLGAVITGAVVAAVMWRRKSSDRKGGSYTQAASSDSAQGSDVSLTACKV

SEQ ID NO: 579 - protein, 288 aa, Homo sapiens [sequence omitted]

SEQ ID NO: 580 - protein, 366 aa, Homo sapiens [sequence omitted]

SEQ ID NO: 581 - protein, 362 aa, Homo sapiens [sequence omitted]

SEQ ID NO: 582 - protein, 105 aa, Homo sapiens
MAMSICHRGTGIALSAGVSLFGMSALLLPGNFESYLELVKSLCLGPALIHTAKFALVFPLMYHTWNGIRHLMWDLGKGLKIPQLYQSGVVVLVLTVLSSMGLAAM

SEQ ID NO: 583 - protein, 135 aa, Homo sapiens
MAALLLRHVGRHCLRAHFSPQLCIRNWSLPMAMSICHRGTGIALSAGVSLFGMSALLLPGNFESYLELVKSLCLGPALIHTAKFALVFPLMYHTWNGIRHLMWDLGKGLKIPQLYQSGVVVLVLTVLSSMGLAAM

SEQ ID NO: 584 - protein, 132 aa, Homo sapiens
MAALLLRHVGRHCLRAHFSPQLCIRNAVPLGTTGKQEMERFWNKNTGLNRPVSPHVTIYSWSLPMAMAICHHDTGTALRAGASLFGMSALLLPGNFESYLELVKSLCLGPALIHTAKFALVFPLMYHTWNGV

SEQ ID NO: 585 - protein, 169 aa, Homo sapiens
MAALLLRHVGRHCLRAHFSPQLCIRNAVPLGTTAKEEMERFWNKNIGSNRPLSPHITIYSWSLPMAMSICHRGTGIALSAGVSLFGMSALLLPGNFESYLELVKSLCLGPALIHTAKFALVFPLMYHTWNGIRHLMWDLGKGLKIPQLYQSGVVVLVLTVLSSMGLAAM

SEQ ID NO: 586 - protein, 105 aa, Homo sapiens; identical to SEQ ID NO: 582

SEQ ID NO: 587 - protein, 156 aa, Homo sapiens
LSCLSLLSSRNYSAVPLGTTAKEEMERFWNKNIGSNRPLSPHITIYSWSLPMAMSICHRGTGIALSAGVSLFGMSALLLPGNFESYLELVKSLCLGPALIHTAKFALVFPLMYHTWNGIRHLMWDLGKGLKIPQLYQSGVVVLVLTVLSSMGLAAM

SEQ ID NO: 588 - protein, 169 aa, Homo sapiens; identical to SEQ ID NO: 585

SEQ ID NO: 589 - protein, 150 aa, Homo sapiens
MAALLLSAVPLGTTAKEEMERFWNKNIGSNRPLSPHITIYSWSLPMAMSICHRGTGIALSAGVSLFGMSALLLPGNFESYLELVKSLCLGPALIHTAKFALVFPLMYHTWNGIRHLMWDLGKGLKIPQLYQSGVVVLVLTVLSSMGLAAM

SEQ ID NO: 590 - protein, 135 aa, Homo sapiens [sequence omitted]

SEQ ID NO: 591 - protein, 189 aa, Homo sapiens [sequence omitted]

SEQ ID NO: 592 - protein, 64 aa, Homo sapiens
MAMSICHRGTGIALSAGVSLFGMSALLLPGNFESYLELVKSLCLGPALIHTAKFALVFPLMYHT

SEQ ID NO: 593 - protein, 720 aa, Homo sapiens; identical to SEQ ID NO: 458

SEQ ID NO: 594 - protein, 466 aa, Homo sapiens
  misc_feature (38)..(38): Xaa can be any naturally occurring amino acid
VNCETSCVQQPPCFPLKIPPNDPRIKNQADCIPFFRSXPACPGSNITIRNQINALTSFVDASMVYGSEEPLARNLRNMSNQLGLLAVNQRFQDNGRALLPFDNLHDDPCLLTNRSARIPCFLAGDTRSSEMPELTSMHTLLLREHNRLATELKSLNPRWDGERLYQEARKIVGAMVQIITYRDYLPLVLGPTAMRKYLPTYRSYNDSVDPRIANVFTNAFRYGHTLIQPFMFRLDNRYQPMEPNPRVPLSRVFFASWRVVLEGGIDPILRGLMATPAKLNRQNQIAVDEIRERLFEQVMRIGLDLPALNMQRSRDHGLPGYNAWRRFCGLPQPETVGQLGTVLRNLKLARKLMEQYGTPNNIDIWMGGVSEPLKRKGRVGPLLACIIGTQFRKLRDGDRFWWENEGVFSMQQRQALAQISLPRIICDNTGITTVSKNNIFMSNSYPRDFVNCSTLPALNLASWREA

SEQ ID NO: 595 - protein, 466 aa, Homo sapiens
VNCETSCVQQPPCFPLKIPPNDPRIKNQADCIPFFRSCPACPGSNITIRNQINALTSFVDASMVYGSEEPLARNLRNMSNQLGLLAVNQRFQDNGRALLPFDNLHDDPCLLTNRSARIPCFLAGDTRSSEMPELTSMHTLLLREHNRLATELKSLNPRWDGERLYQEARKIVGAMVQIITYRDYLPLVLGPTAMRKYLPTYRSYNDSVDPRIANVFTNAFRYGHTLIQPFMFRLDNRYQPMEPNPRVPLSRVFFASWRVVLEGGIDPILRGLMATPAKLNRQNQIAVDEIRERLFEQVMRIGLDLPALNMQRSRDHGLPGYNAWRRFCGLPQPETVGQLGTVLRNLKLARKLMEQYGTPNNIDIWMGGVSEPLKRKGRVGPLLACIIGTQFRKLRDGDRFWWENEGVFSMQQRQALAQISLPRIICDNTGITTVSKNNIFMSNSYPRDFVNCSTLPALNLASWREA

SEQ ID NO: 596 - protein, 199 aa, Homo sapiens
MANRGPAYGLSREVQQKIEKQYDADLEQILIQWITTQCRKDVGRPQPGRENFQNWLKDGTVLCELINALYPEGQAPVKKIQASTMAFKQMEQISQFLQAAERYGINTTDIFQTVDLWEGKNMACVQRTLMNLGGLAVARDDGLFSGDPNWFPKKSKENPRNFSDNQLQEGKNVIGLQMGTNRGASQAGMTGYGMPRQIL

SEQ ID NO: 597 - protein, 199 aa, Homo sapiens; identical to SEQ ID NO: 596

SEQ ID NO: 598 - protein, 179 aa, Homo sapiens
MANRGPAYGLSREVQQKIEKQYDADLEQILIQWITTQCRKDVGRPQPGRENFQNWLKDGTVLCELINALYPEGQAPVKKIQASTMAFKQMEQISQFLQAAERYGINTTDIFQTVDLWEGGTGRGAGSCHPGGQRLGWALLTRQKGLFSGSLQRKRGVFVFHGALGHIGGWNGEGYGNEQ

SEQ ID NO: 599 - protein, 194 aa, Homo sapiens
MANRGPAYGLSREVQQKIEKQYDADLEQILIQWITTQCRKDVGRPQPGRENFQNWLKDGTVLCELINALYPEGQAPVKKIQASTMAFKQMEQISQFLQAAERYGINTTDIFQTVDLWEGKNMACVQRTLMNLGGLAVARDDGLFSGDPNWFPKKSKENPRNFSDNQLQEGKNVIGLQMGTNRGASQAGMTGYGM

SEQ ID NO: 600 - protein, 171 aa, Homo sapiens
MCVLCRKQEASALNLLQRARGSRAGTSSPQPPPPIGMANRGPAYGLSREVQQKIEKQYDADLEQILIQWITTQCRKDVGRPQPGRENFQNWLKDGTVLCELINALYPEGQAPVKKIQASTMAFKQMEQISQFLQAAERYGINTTDIFQTVDLWEGKNMACVQRTLMNLGGL

SEQ ID NO: 601 - protein, 220 aa, Homo sapiens
MSAFSLALALVSSPQPPPPIGMANRGPAYGLSREVQQKIEKQYDADLEQILIQWITTQCRKDVGRPQPGRENFQNWLKDGTVLCELINALYPEGQAPVKKIQASTMAFKQMEQISQFLQAAERYGINTTDIFQTVDLWEGKNMACVQRTLMNLGGLAVARDDGLFSGDPNWFPKKSKENPRNFSDNQLQEGKNVIGLQMGTNRGASQAGMTGYGMPRQIL

SEQ ID NO: 602 - protein, 271 aa, Homo sapiens
MEALPLLAATTPDHGRHRRLLLLPLLLFLLPAGAVQGWETEERPRTREEECHFYAGGQVYPGEASRVSVADHSLHLSKAKISKPAPYWEGTAVIDGEFKELKLTDYRGKYLVFFFYPLDFTFVCPTEIIAFGDRLEEFRSINTEVVACSVDSQFTHLAWINTPRRQGGLGPIRIPLLSDLTHQISKDYGVYLEDSGHTLRGLFIIDDKGILRQITLNDLPVGRSVDETLRLVQAFQYTDKHGEVCPAGWKPGSETIIPDPAGKLKYFDKLN

SEQ ID NO: 603 - protein, 271 aa, Homo sapiens; identical to SEQ ID NO: 602

SEQ ID NO: 604 - protein, 129 aa, Homo sapiens
REGFVCQTETQVCQAVARLSQRFPKAEFAEVSKLVTDLTKVHTECCHGDLLECADDRADLAKYICENQDSISSKLKECCEKPLLEKSHCIAELKVRMFAKTMLRQRMSSWACFCMNMQEGILITLSCCC

SEQ ID NO: 605 - protein, 283 aa, Homo sapiens
MCIPPSYADLGKAARDIFNKGFGFGLVKLDVKTKSCSGVEFSTSGSSNTDTGKVTGTLETKYKWCEYGLTFTEKWNTDNTLGTEIAIEDQICQGLKLTFDTTFSPNTGKKSGKIKSSYKRECINLGCDVDFDFAGPAIHGSAVFGYEGWLAGYQMTFDSAKSKLTRNNFAVGYRTGDFQLHTNVNDGTEFGGSIYQKVCEDLDTSVNLAWTSGTNCTRFGIAAKYQLDPTASISAKVNNSSLIGVGYTQTLRPGVKLTLSALVDGKSINAGGHKVGLALELEA

SEQ ID NO: 606 - protein, 321 aa, Homo sapiens [sequence omitted]

SEQ ID NO: 607 - protein, 1152 aa, Homo sapiens
MGITEYNNQCRAIVMRYSAEWKSTVSRLGRWIDFDNDYKTLYPQFMESVWWVFKQLYDKGLVYRGVKVMPFSTACNTPLSNFESHQNYKDVQDPSVFVTFPLEEDETVSLVAWTTTPWTLPSNLAVCVNPEMQYVKIKDVARGRLLILMEARLSALYKLESDYEILERFPGAYLKGKKYRPLFDYFLKCKENGAFTVLVDNYVKEEEGTGVVHQAPYFGAEDYRVCMDFNIIRKDSLPVCPVDASGCFTTEVTDFAGQYVKDADKSIIRTLKEQGRLLVATTFTHSYPFCWRSDTPLIYKAVPSWFVRVENMVDQLLRNNDLCYWVPELVREKRFGNWLKDARDWTISRNRYWGTPIPLWVSDDFEEVVCIGSVAELEELSGAKISDLHRESVDHLTIPSRCGKGSLHRISEVFDCWFESGSMPYAQVHYPFENKREFEDAFPADFIAEGIDQTRGWFYTLLVLATALFGQPPFKNVIVNGLVLASDGQKMSKRKKNYPDPVSIIQKYGADALRLYLINSPVVRAENLRFKEEGVRDVLKDVLLPWYNAYRFLIQNVLRLQKEEEIEFLYNENTVRESPNITDRWILSFMQSLIGFFETEMAAYRLYTVVPRLVKFVDILTNWYVRMNRRRLKGENGMEDCVMALETLFSVLLSLCRLMAPYTPFLTELMYQNLKVLIDPVSVQDKDTLSIHYLMLPRVREELIDKKTESAVSQMQSVIELGRVIRDRKTIPIKYPLKEIVVIHQDPEALKDIKSLEKYIIEELNVRKVTLSTDKNKYGIRLRAEPDHMVLGKRLKGAFKAVMTSIKQLSSEELEQFQKTGTIVVEGHELHDEDIRLMYTFDQATGGTAQFEAHSDAQALVLLDVTPDQSMVDEGMAREVINRIQKLRKKCNLVPTDEITVYYKAKSEGTYLNSVIESHTEFIFTTIKAPLKPYPVSPSDKVLIQEKTQLKGSELEITLTRGSSLPGPACAYVNLNICANGSEQGGVLLLENPKGDNRLDLLKLKSVVTSIFGVKNTELAVFHDETEIQNQTDLLSLSGKTLCVTAGSAPSLINSSSTLLCQYINLQLLNAKPQECLMGTVGTLLLENPLGQNGLTHQGLLYEAAKVFGLRSRKLKLFLNETQTQEITEDIPVKTLNMKTVYVSVLPTTADF

SEQ ID NO: 608 - protein, 1055 aa, Homo sapiens
MESVWWVFKQLYDKGLVYRGVKVMPFSTACNTPLSNFESHQNYKDVQDPSVFVTFPLEEDETVSLVAWTTTPWTLPSNLAVCVNPEMQYVKIKDVARGRLLILMEARLSALYKLESDYEILERFPGAYLKGKKYRPLFDYFLKCKENGAFTVLVDNYVKEEEGTGVVHQAPYFGAEDYRVCMDFNIIRKDSLPVCPVDASGCFTTEVTDFAGQYVKDADKSIIRTLKEQGRLLVATTFTHSYPFCWRSDTPLIYKAVPSWFVRVENMVDQLLRNNDLCYWVPELVREKRFGNWLKDARDWTISRNRYWGTPIPLWVSDDFEEVVCIGSVAELEELSGAKISDLHRESVDHLTIPSRCGKGSLHRISEVFDCWFESGSMPYAQVHYPFENKREFEDAFPADFIAEGIDQTRGWFYTLLVLATALFGQPPFKNVIVNGLVLASDGQKMSKRKKNYPDPVSIIQKYGADALRLYLINSPVVRAENLRFKEEGVRDVLKDVLLPWYNAYRFLIQNVLRLQKEEEIEFLYNENTVRESPNITDRWILSFMQSLIGFFETEMAAYRLYTVVPRLVKFVDILTNWYVRMNRRRLKGENGMEDCVMALETLFSVLLSLCRLMAPYTPFLTELMYQNLKVLIDPVSVQDKDTLSIHYLMLPRVREELIDKKTESAVSQMQSVIELGRVIRDRKTIPIKYPLKEIVVIHQDPEALKDIKSLEKYIIEELNVRKVTLSTDKNKYGIRLRAEPDHMVLGKRLKGAFKAVMTSIKQLSSEELEQFQKTGTIVVEGHELHDEDIRLMYTFDQATGGTAQFEAHSDAQALVLLDVTPDQSMVDEGMAREVINRIQKLRKKCNLVPTDEITVYYKAKSEGTYLNSVIESHTEFIFTTIKAPLKPYPVSPSDKVLIQEKTQLKGSELEITLTRGSSLPGPACAYVNLNICANGSEQGGVLLLENPKGSAPSLINSSSTLLCQYINLQLLNAKPQECLMGTVGTLLLENPLGQNGLTHQGLLYEAAKVFGLRSRKLKLFLNETQTQEITEDIPVKTLNMKTVYVSVLPTTADF

SEQ ID NO: 609 - protein, 446 aa, Homo sapiens [sequence omitted]

SEQ ID NO: 610 - protein, 655 aa, Homo sapiens
MQAARMAASLGRQLLRLGGGSSRLTALLGQPRPGPARRPYAGGAAQLALDKSDSHPSDALTRKKPAKAESKSFAVGMFKGQLTTDQVFPYPSVLNEEQTQFLKELVEPVSRFFEEVNDPAKNDALEMVEETTWQGLKELGAFGLQVPSELGGVGLCNTQYARLVEIVGMHDLGVGITLGAHQSIGFKGILLFGTKAQKEKYLPKLASGETVAAFCLTEPSSGSDAASIRTSAVPSPCGKYYTLNGSKLWISNGGLADIFTVFAKTPVTDPATGAVKEKITAFVVERGFGGITHGPPEKKMGIKASNTAEVFFDGVRVPSENVLGEVGSGFKVAMHILNNGRFGMAAALAGTMRGIIAKAVDHATNRTQFGEKIHNFGLIQEKLARMVMLQYVTESMAYMVSANMDQGATDFQIEAAISKIFGSEAAWKVTDECIQIMGGMGFMKEPGVERVLRDLRIFRIFEGTNDILRLFVALQGCMDKGKELSGLGSALKNPFGNAGLLLGEAGKQLRRRAGLGSGLSLSGLVHPELSRSGELAVRALEQFATVVEAKLIKHKKGIVNEQFLLQRLADGAIDLYAMVVVLSRASRSLSEGHPTAQHEKMLCDTWCIEAAARIREGMAALQSDPWQQELYRNFKSISKALVERGGVVTSNPLGF

SEQ ID NO: 611 - protein, 579 aa, Homo sapiens
MFKGQLTTDQVFPYPSVLNEEQTQFLKELVEPVSRFFEEVNDPAKNDALEMVEETTWQGLKELGAFGLQVPSELGGVGLCNTQYARLVEIVGMHDLGVGITLGAHQSIGFKGILLFGTKAQKEKYLPKLASGETVAAFCLTEPSSGSDAASIRTSAVPSPCGKYYTLNGSKLWISNGGLADIFTVFAKTPVTDPATGAVKEKITAFVVERGFGGITHGPPEKKMGIKASNTAEVFFDGVRVPSENVLGEVGSGFKVAMHILNNGRFGMAAALAGTMRGIIAKAVDHATNRTQFGEKIHNFGLIQEKLARMVMLQYVTESMAYMVSANMDQGATDFQIEAAISKIFGSEAAWKVTDECIQIMGGMGFMKEPGVERVLRDLRIFRIFEGTNDILRLFVALQGCMDKGKELSGLGSALKNPFGNAGLLLGEAGKQLRRRAGLGSGLSLSGLVHPELSRSGELAVRALEQFATVVEAKLIKHKKGIVNEQFLLQRLADGAIDLYAMVVVLSRASRSLSEGHPTAQHEKMLCDTWCIEAAARIREGMAALQSDPWQQELYRNFKSISKALVERGGVVTSNPLGF

SEQ ID NO: 612 - protein, 532 aa, Homo sapiens
MAPSSPRPALPALLVLLGALFPGPGNAQTSVSPSKVILPRGGSVLVTCSTSCDQPKLLGIETPLPKKELLLPGNNRKVYELSNVQEDSQPMCYSNCPDGQSTAKTFLTVYWTPERVELAPLPSWQPVGKNLTLRCQVEGGAPRANLTVVLLRGEKELKREPAVGEPAEVTTTVLVRRDHHGANFSCRTELDLRPQGLELFENTSAPYQLQTFVLPATPPQLVSPRVLEVDTQGTVVCSLDGLFPVSEAQVHLALGDQRLNPTVTYGNDSFSAKASVSVTAEDEGTQRLTCAVILGNQSQETLQTVTIYSFPAPNVILTKPEVSEGTEVTVKCEAHPRAKVTLNGVPAQPLGPRAQLLLKATPEDNGRSFSCSATLEVAGQLIHKNQTRELRVLYGPRLDERDCPGNWTWPENSQQTPMCQAWGNPLPELKCLKDGTFPLPIGESVTVTRDLEGTYLCRARSTQGEVTREVTVNVLSPRYEIVIITVVAAAVIMGTAGLSTYLYNRQRKIKKYRLQQAQKGTPMKPNTQATPP

SEQ ID NO: 613 - protein, 532 aa, Homo sapiens
MAPSSPRPALPALLVLLGALFPGPGNAQTSVSPSKVILPRGGSVLVTCSTSCDQPKLLGIETPLPKKELLLPGNNRKVYELSNVQEDSQPMCYSNCPDGQSTAKTFLTVYWTPERVELAPLPSWQPVGKNLTLRCQVEGGAPRANLTVVLLRGEKELKREPAVGEPAEVTTTVLVRRDHHGANFSCRTELDLRPQGLELFENTSAPYQLQTFVLPATPPQLVSPRVLEVDTQGTVVCSLDGLFPVSEAQVHLALGDQRLNPTVTYGNDSFSAKASVSVTAEDEGTQRLTCAVILGNQSQETLQTVTIYSFPAPNVILTKPEVSEGTEVTVKCEAHPRAKVTLNGVPAQPLGPRAQLLLKATPEDNGRSFSCSATLEVAGQLIHKNQTRELRVLYGPRLDERDCPGNWTWPENSQQTPMCQAWGNPLPELKCLKDGTFPLPIGESVTVTRDLEGTYLCRARSTQGEVTRKVTVNVLSPRYEIVIITVVAAAVIMGTAGLSTYLYNRQRKIKKYRLQQAQKGTPMKPNTQATPP

SEQ ID NO: 614 - protein, 536 aa, Homo sapiens [sequence omitted]

SEQ ID NO: 615 - protein, 536 aa, Homo sapiens
MEFSSPSREECPKPLSRVSIMAGSLTGLLLLQAVSWASGARPCIPKSFGYSSVVCVCNATYCDSFDPPTFPALGTFSRYESTRSGRRMELSMGPIQANHTGTGLLLTLQPEQKFQKVKGFGGAMTDAAALNILALSPPAQNLLLKSYFSEEGIGYNIIRVPMASCDFSIRTYTYADTPDDFQLHNFSLPEEDTKLKIPLIHRALQLAQRPVSLLASPWTSPTWLKTNGAVNGKGSLKGQPGDIYHQTWARYFVKFLDAYAEHKLQFWAVTAENEPSAGLLSGYPFQCLGFTPEHQRDFIARDLGPTLANSTHHNVRLLMLDDQRLLLPHWAKVVLTDPEAAKYVHGIAVHWYLDFLAPAKATLGETHRLFPNTMLFASEACVGSKFWEQSVRLGSWDRGMQYSHSIITNLLYHVVGWTDWNLALNPEGGPNWVRNFVDSPIIVDITKDTFYKQPMFYHLGHFSKFIPEGSQRVGLVASQKNDLDAVALMHPDGSAVVVVLNRSSKDVPLTIKDPAVGFLETISPGYSIHTYLWRRQ

SEQ ID NO: 616 - protein, 536 aa, Homo sapiens [sequence omitted]

SEQ ID NO: 617 - protein, 536 aa, Homo sapiens [sequence omitted]

SEQ ID NO: 618 - protein, 536 aa, Homo sapiens [sequence omitted]

SEQ ID NO: 619 - protein, 358 aa, Homo sapiens
MAPQNLSTFCLLLLYLIGAVIAGRDFYKILGVPRSASIKDIKKAYRKLALQLHPDRNPDDPQAQEKFQDLGAAYEVLSDSEKRKQYDTYGEEGLKDGHQSSHGDIFSHFFGDFGFMFGGTPRQQDRNIPRGSDIIVDLEVTLEEVYAGNFVEVVRNKPVARQAPGKRKCNCRQEMRTTQLGPGRFQMTQEVVCDECPNVKLVNEERTLEVEIEPGVRDGMEYPFIGEGEPHVDGEPGDLRFRIKVVKHPIFERRGDDLYTNVTISLVESLVGFEMDITHLDGHKVHISRDKITRPGAKLWKKGEGLPNFDNNNIKGSLIITFDVDFPKEQLTEEAREGIKQLLKQGSVQKVYNGLQGY

SEQ ID NO: 620 - protein, 358 aa, Homo sapiens; identical to SEQ ID NO: 619

SEQ ID NO: 621 - protein, 362 aa, Homo sapiens [sequence omitted]

SEQ ID NO: 622 - protein, 338 aa, Homo sapiens
GSHSMRYFHTSVSRPGRGEPRFITVGYVDDTLFVRFDSDAASPREEPRAPWIEQEGPEYWDRETQICKAKAQTDREDLRTLLRYYNQSEAGSHTLQSMYGCDVGPDGRLLRGHNQYAYDGKDYIALNEDLRSWTAADTAAQITQRKWEAARVAEQLRAYLEGECVEWLRRYLENGKETLQRADPPKTHVTHHPISDHEATLRCWALGFYPAEITLTWQRDGEDQTQDTELVETRPAGDRTFQKWAAVVVPSGEEQRYTCHVQHEGLPKPLTLRWEPSSQSTVPIVGIVAGLAVLAVVVIGAVVAAVMCRRKSSGGKGGSYSQAACSDSAQGSDVSLTA

SEQ ID NO: 623 - protein, 362 aa, Homo sapiens [sequence omitted]

SEQ ID NO: 624 - protein, 362 aa, Homo sapiens [sequence omitted]

SEQ ID NO: 625 - protein, 359 aa, Homo sapiens
TAPRTLLLLLWGAVALTETWAGSHSMRYFYTAMSRPGRGEPRFITVGYVDDTLFVRFDSDATSPRKEPRAPWIEQEGPEYWDRETQISKTNTQTYRENLRTAARYYNQSEAGSHIIQRMYGCDVGPDGRLLRGYDQDAYDGKDYIALNEDLSSWTAADTAAQITQRKWEAARVAEQDRAYLEGLCVESLRRYLENGKETLQRADPPKTHVTHHPISDHEATLRCWSLGFYPAEITLTWQRDGEDQTQDTELVETRPAGDRTFQKWAAVVVPSGEEQRYTCHVQHEGLPKPLTLRWEPSSQSTVPIVGIVAGLAVLAVVVIGAVVAAVMCRRKSSGGKGGSYSQAACSDSAQGSDVSLTA

SEQ ID NO: 626 - protein, 362 aa, Homo sapiens [sequence omitted]

SEQ ID NO: 627 - protein, 362 aa, Homo sapiens [sequence omitted]

SEQ ID NO: 628 - protein, 365 aa, Homo sapiens [sequence omitted]

SEQ ID NO: 629 - protein, 362 aa, Homo sapiens [sequence omitted]

SEQ ID NO: 630 - protein, 362 aa, Homo sapiens [sequence omitted]

SEQ ID NO: 631 - protein, 362 aa, Homo sapiens [sequence omitted]

SEQ ID NO: 632 - protein, 362 aa, Homo sapiens [sequence omitted]

SEQ ID NO: 633 - protein, 365 aa, Homo sapiens
MAVMGPRTLVLLLSGALALTQTWAGSHSMRYFSTSVSRPGRGEPRFIAVGYVDDTQFVRFDSDAASQRMEPRAPWIEQEGPEYWDEETGKVKAHSQTDRENLRIALRYYNQSEAGSHTLQMMFGCDVGSDGRFLRGYHQYAYDGKDYIALKEDLRSWTAADMAAQITKRKWEAAHVAEQQRAYLEGTCVDGLRRYLENGKETLQRADPPKTHMTHHPISDHEATLRCWALGFYPAEITLTWQRDGEDQTQDTELVETRPAGDGTFQKWAAVVVPSGEEQRYTCHVQHEGLPKPLTLRWEPSSQPTVPIVGIIAGLVLLGAVITGAVVAAVMWRRNSSDRKGGSYSQAASSDSAQGSDVSLTACKV

SEQ ID NO: 634 - protein, 365 aa, Homo sapiens
MAVMAPRTLVLLLSGALALTQTWAGSHSMRYFYTSVSRPGRGEPRFIAVGYVDDTQFVRFDSDAASQRMEPRAPWIEQEGPEYWDRNTRNVKAHSQTDRANLGTLRGYYNQSEDGSHTIQRMYGCDVGPDGRFLRGYQQDAYDGKDYIALNEDLRSWTAADMAAQITQRKWETAHEAEQWRAYLEGRCVEWLRRYLENGKETLQRTDAPKTHMTHHAVSDHEATLRCWALSFYPAEITLTWQRDGEDQTQDTELVETRPAGDGTFQKWASVVVPSGQEQRYTCHVQHEGLPKPLTLRWEPSSQPTIPIVGIIAGLVLFGAVIAGAVVAAVMWRRKSSDRKGGSYSQAASSDSAQGSDMSLTACKV

SEQ ID NO: 635 - protein, 365 aa, Homo sapiens [sequence omitted]

SEQ ID NO: 636 - protein, 365 aa, Homo sapiens [sequence omitted]

SEQ ID NO: 637 - protein, 362 aa, Homo sapiens [sequence omitted]

SEQ ID NO: 638 - protein, 362 aa, Homo sapiens [sequence omitted]

SEQ ID NO: 639 - protein, 362 aa, Homo sapiens
MRVTAPRTLLLLLWGAVALTETWAGSHSMRYFYTAMSRPGRGEPRFITVGYVDDTLFVRFDSDATSPRKEPRAPWIEQEGPEYWDRETQISKTNTQTYRENLRTALRYYNQSEAGSHIIQRMYGCDVGPDGRLLRGYDQDAYDGKDYIALNEDLSSWTAADTAAQITQRKWEAARVAEQLRAYLEGLCVESLRRYLENGKETLQRADPPKTHVTHHPISDHEVTLRCWALGFYPAEITLTWQRDGEDQTQDTELVETRPAGDRTFQKWAAVVVPSGEEQRYTCHVQHEGLPKPLTLRWEPSSQSTVPIVGIVAGLAVLAVVVIGAVVAAVMCRRKSSGGKGGSYSQAACSDSAQGSDVSLTA

SEQ ID NO: 640 - protein, 362 aa, Homo sapiens [sequence omitted]

SEQ ID NO: 641 - protein, 362 aa, Homo sapiens [sequence omitted]

SEQ ID NO: 642 - protein, 362 aa, Homo sapiens [sequence omitted]

SEQ ID NO: 643 - protein, 362 aa, Homo sapiens
MRVTAPRTVLLLLSGALALTETWAGSHSMRYFYTAMSRPGRGEPRFIAVGYVDDTQFVRFDSDAASPRMAPRAPWIEQEGPEYWDRETQKYKRQAQTDRVSLRNLRGYYNQSEAGSHTLQRMYGCDVGPDGRLLRGHDQSAYDGKDYIALNEDLSSWTAADTAAQITQRKWEAAREAEQWRAYLEGLCVEWLRRYLENGKETLQRADPPKTHVTHHPISDHEATLRCWALGFYPAEITLTWQRDGEDQTQDTELVETRPAGDRTFQKWAAVVVPSGEEQRYTCHVQHEGLPKPLTLRWEPSSQSTIPIVGIVAGLAVLAVVVIGAVVATVMCRRKSSGGKGGSYSQAASSDSAQGSDVSLTA

SEQ ID NO: 644 - protein, 362 aa, Homo sapiens [sequence omitted]

SEQ ID NO: 645 - protein, 362 aa, Homo sapiens
MRVTAPRTLLLLLWGAVALTETWAGSHSMRYFYTAMSRPGRGEPRFITVGYVDDTQFVRFDSDATSPRMAPRAPWIEQEGPEYWDRETQISKTNTQTYRENLRTALRYYNQSEAGSHTWQTMYGCDLGPDGRLLRGHNQLAYDGKDYIALNEDLSSWTAADTAAQITQLKWEAARVAEQLRAYLEGECVEWLRRYLENGKETLQRADPPKTHVTHHPISDHEATLRCWALGFYPAEITLTWQRDGEDQTQDTELVETRPAGDRTFQKWAAVVVPSGEEQRYTCHVQHEGLPKPLTLRWEPSSQSTVPIVGIVAGLAVLAVVVIGAVVAAVMCRRKSSGGKGGSYSQAACSDSAQGSDVSLTA

SEQ ID NO: 646 - protein, 362 aa, Homo sapiens [sequence omitted]

SEQ ID NO: 647 - protein, 365 aa, Homo sapiens
MAVMAPRTLLLLLSGALALTQTWAGSHSMRYFFTSVSRPGRGEPRFIAVGYVDDTQFVRFDSDAASQRMEPRAPWIEQEGPEYWDQETRNVKAQSQTDRVDLGTLRGYYNQSEAGSHTIQIMYGCDVGSDGRFLRGYRQDAYDGKDYIALNEDLRSWTAADMAAQITKRKWEAAHEAEQLRAYLDGTCVEWLRRYLENGKETLQRTDPPKTHMTHHPISDHEATLRCWALGFYPAEITLTWQRDGEDQTQDTELVETRPAGDGTFQKWAAVVVPSGEEQRYTCHVQHEGLPKPLTLRWELSSQPTIPIVGIIAGLVLLGAVITGAVVAAVMWRRKSSDRKGGSYTQAASSDSAQGSDVSLTACKV

SEQ ID NO: 648 - protein, 362 aa, Homo sapiens [sequence omitted]

SEQ ID NO: 649 - protein, 362 aa, Homo sapiens [sequence omitted]

SEQ ID NO: 650 - protein, 365 aa, Homo sapiens
MAVMAPRTLLLLLSGALALTQTWAGSHSMRYFFTSVSRPGRGEPRFIAVGYVDDTQFVRFDSDAASQKMEPRAPWIEQEGPEYWDQETRNMKAHSQTDRANLGTLRGYYNQSEDGSHTIQIMYGCDVGPDGRFLRGYRQDAYDGKDYIALNEDLRSWTAADMAAQITKRKWEAVHAAEQRRVYLEGRCVDGLRRYLENGKETLQRTDPPKTHMTHHPISDHEATLRCWALGFYPAEITLTWQRDGEDQTQDTELVETRPAGDGTFQKWAAVVVPSGEEQRYTCHVQHEGLPKPLTLRWELSSQPTIPIVGIIAGLVLLGAVITGAVVAAVMWRRKSSDRKGGSYTQAASSDSAQGSDVSLTACKV

SEQ ID NO: 651 - protein, 362 aa, Homo sapiens [sequence omitted]

SEQ ID NO: 652 - protein, 365 aa, Homo sapiens
MAVMAPRTLLLLLSGALALTQTWAGSHSMRYFYTSVSRPGRGEPRFIAVGYVDDTQFVRFDSDAASQRMEPRAPWIEQEGPEYWDQETRNVKAQSQTDRVDLGTLRGYYNQSEDGSHTIQIMYGCDVGPDGRFLRGYRQDAYDGKDYIALNEDLRSWTAADMAAQITKRKWEAAHAAEQQRAYLEGRCVEWLRRYLENGKETLQRTDPPKTHMTHHPISDHEATLRCWALGFYPAEITLTWQRDGEDQTQDTELVETRPAGDGTFQKWAAVVVPSGEEQRYTCHVQHEGLPKPLTLRWELSSQPTIPIVGIIAGLVLLGAVITGAVVAAVMWRRKSSDRKGGSYTQAASSDSAQGSDVSLTACKV

SEQ ID NO: 653 - protein, 362 aa, Homo sapiens [sequence omitted]

SEQ ID NO: 654 - protein, 362 aa, Homo sapiens [sequence omitted]

SEQ ID NO: 655 - protein, 365 aa, Homo sapiens
MAVMAPRTLVLLLSGALALTQTWAGSHSMRYFYTSVSRPGRGEPRFIAVGYVDDTQFVRFDSDAASQRMEPRAPWIEQEGPEYWDRNTRNVKAHSQTDRESLRIALRYYNQSEDGSHTIQRMYGCDVGPDGRFLRGYQQDAYDGKDYIALNEDLRSWTAADMAAQITQRKWETAHEAEQWRAYLEGRCVEWLRRYLENGKETLQRTDAPKTHMTHHAVSDHEATLRCWALSFYPAEITLTWQRDGEDQTQDTELVETRPAGDGTFQKWASVVVPSGQEQRYTCHVQHEGLPKPLTLRWEPSSQPTIPIVGIIAGLVLFGAVIAGAVVAAVMWRRKSSDRKGGSYSQAASSDSAQGSDMSLTACKV

SEQ ID NO: 656 - protein, 365 aa, Homo sapiens
MAVMAPRTLLLLLSGALALTQTWAGSHSMRYFFTSVSRPGRGEPRFIAVGYVDDTQFVRFDSDAASQKMEPRAPWIEQEGPEYWDQETRNMKAHSQTDRANLGTLRGYYNQSEDGSHTIQIMYGCDVGPDGRFLRGYRQDAYDGKDYIALNEDLRSWTAADMAAQITKRKWEAVHAAEQRRVYLEGTCVEWLRRYLENGKETLQRTDPPKTHMTHHPISDHEATLRCWALGFYPAEITLTWQRDGEDQTQDTELVETRPAGDGTFQKWAAVVVPSGEEQRYTCHVQHEGLPKPLTLRWELSSQPTIPIVGIIAGLVLLGAVITGAVVAAVMWRRKSSDRKGGSYTQAASSDSAQGSDVSLTACKV

SEQ ID NO: 657 - protein, 362 aa, Homo sapiens
MLVMAPRTVLLLLSAALALTETWAGSHSMRYFYTSVSRPGRGEPRFISVGYVDDTQFVRFDSDAASPREEPRAPWIEQEGPEYWDRNTQIYKAQAQTDRESLRNLRGYYNQSEAGSHTLQSMYGCDVGPDGRLLRGHDQYAYDGKDYIALNEDLRSWTAADTAAQITQRKWEAAREAEQRRAYLEGECVEWLRRYLENGKDKLERADPPKTHVTHHPISDHEATLRCWALGFYPAEITLTWQRDGEDQTQDTELVETRPAGDRTFQKWAAVVVPSGEEQRYTCHVQHEGLPKPLTLRWEPSSQSTVPIVGIVAGLAVLAVVVIGAVVAAVMCRRKSSGGKGGSYSQAACSDSAQGSDVSLTA

SEQ ID NO: 658 - protein, 362 aa, Homo sapiens [sequence omitted]

SEQ ID NO: 659 - protein, 362 aa, Homo sapiens
MRVTAPRTVLLLLSGALALTETWAGSHSMRYFYTAMSRPGRGEPRFIAVGYVDDTQFVRFDSDAASPRMAPRAPWIEQEGPEYWDRETQISKTNTQTYRESLRNLRGYYNQSEAGSHTLQRMYGCDVGPDGRLLRGHDQSAYDGKDYIALNEDLSSWTAADTAAQITQRKWEAAREAEQWRAYLEGLCVEWLRRYLENGKETLQRADPPKTHVTHHPISDHEATLRCWALGFYPAEITLTWQRDGEDQTQDTELVETRPAGDRTFQKWAAVVVPSGEEQRYTCHVQHEGLPKPLTLRWEPSSQSTIPIVGIVAGLAVLAVVVIGAVVATVMCRRKSSGGKGGSYSQAASSDSAQGSDVSLTA

SEQ ID NO: 660 - protein, 362 aa, Homo sapiens [sequence omitted]

SEQ ID NO: 661 - protein, 362 aa, Homo sapiens [sequence omitted]

SEQ ID NO: 662 - protein, 362 aa, Homo sapiens [sequence omitted]

SEQ ID NO: 663 - protein, 362 aa, Homo sapiens
MRVTAPRTLLLLLWGAVALTETWAGSHSMRYFYTAMSRPGRGEPRFITVGYVDDTLFVRFDSDATSPRKEPRAPWIEQEGPEYWDRETQISKTNTQTYRENLRTALRYYNQSEAGSHIIQRMYGCDVGPDGRLLRGYDQDAYDGKDYIALNEDLSSWTAADTAAQITQRKWEAARVAEQDRAYLEGLCVESLRRYLENGKETLQRADPPKTHVTHHPISDHEVTLRCWALGFYPAEITLTWQRDGEDQTQDTELVETRPAGDRTFQKWAAVVVPSGEEQRYTCHVQHEGLPKPLTLRWEPSSQSTVPIVGIVAGLAVLAVVVIGAVVAAVMCRRKSSGGKGGSYSQAACSDSAQGSDVSLTA

SEQ ID NO: 664 - protein, 362 aa, Homo sapiens [sequence omitted]

SEQ ID NO: 665 - protein, 362 aa, Homo sapiens [sequence omitted]

SEQ ID NO: 666 - protein, 362 aa, Homo sapiens [sequence omitted]

SEQ ID NO: 667 - protein, 365 aa, Homo sapiens [sequence omitted]

SEQ ID NO: 668 - protein, 370 aa, Homo sapiens
MARGDQAVMAPRTLLLLLSGALALTQTWAGSHSMRYFFTSVSRPGRGEPRFIAVGYVDDTQFVRFDSDAASQRMEPRAPWIEQEGPEYWDQETRNVKAQSQTDRVDLGTLRGYYNQSEAGSHTIQIMYGCDVGSDGRFLRGYRQDAYDGKDYIALNEDLRSWTAADMAAQITKRKWEAAHEAEQLRAYLDGTCVEWLRRYLENGKETLQRTDPPKTHMTHHPISDHEATLRCWALGFYPAEITLTWQRDGEDQTQDTELVETRPAGDGTFQKWAAVVVPSGEEQRYTCHVQHEGLPKPLTLRWELSSQPTIPIVGIIAGLVLLGAVITGAVVAAVMWRRKSSDRKGGSYTQAASSDSAQGSDVSLTACKV

SEQ ID NO: 669 - protein, 362 aa, Homo sapiens [sequence omitted]

SEQ ID NO: 670 - protein, 362 aa, Homo sapiens [sequence omitted]

SEQ ID NO: 671 - protein, 496 aa, Homo sapiens [sequence omitted]

SEQ ID NO: 672 - protein, 854 aa, Homo sapiens [sequence omitted]

SEQ ID NO: 673 - protein, 908 aa, Homo sapiens [sequence omitted]

SEQ ID NO: 674 - protein, 851 aa, Homo sapiens
MLVERLGEKDTSLYRPALEELRRQIRSSTTSMTSVPKPLKFLRPHYGKLKEIYENMAPGENKRFAADIISVLAMTMSGERECLKYRLVGSQEELASWGHEYVRHLAGEVAKEWQELDDAEKVQREPLLTLVKEIVPYNMAHNAEHEACDLLMEIEQVDMLEKDIDENAYAKVCLYLTSCVNYVPEPENSALLRCALGVFRKFSRFPEALRLALMLNDMELVEDIFTSCKDVVVQKQMAFMLGRHGVFLELSEDVEEYEDLTEIMSNVQLNSNFLALARELDIMEPKVPDDIYKTHLENNRFGGSGSQVDSARMNLASSFVNGFVNAAFGQDKLLTDDGNKWLYKNKDHGMLSAAASLGMILLWDVDGGLTQIDKYLYSSEDYIKSGALLACGIVNSGVRNECDPALALLSDYVLHNSNTMRLGSIFGLGLAYAGSNREDVLTLLLPVMGDSKSSMEVAGVTALACGMIAVGSCNGDVTSTILQTIMEKSETELKDTYARWLPLGLGLNHLGKGEAIEAILAALEVVSEPFRSFANTLVDVCAYAGSGNVLKVQQLLHICSEHFDSKEKEEDKDKKEKKDKDKKEAPADMGAHQGVAVLGIALIAMGEEIGAEMALRTFGHLLRYGEPTLRRAVPLALALISVSNPRLNILDTLSKFSHDADPEVSYNSIFAMGMVGSGTNNARLAAMLRQLAQYHAKDPNNLFMVRLAQGLTHLGKGTLTLCPYHSDRQLMSQVAVAGLLTVLVSFLDVRNIILGKSHYVLYGLVAAMQPRMLVTFDEELRPLPVSVRVGQAVDVVGQAGKPKTITGFQTHTTPVLLAHGERAELATEEFLPVTPILEGFVILRKNPNYDL

SEQ ID NO: 675 - protein, 908 aa, Homo sapiens
MEEGGRDKAPVQPQQSPAAAPGGTDEKPSGKERRDAGDKDKEQELSEEDKQLQDELEMLVERLGEKDTSLYRPALEELRRQIRSSTTSMTSVPKPLKFLRPHYGKLKEIYENMAPGENKRFAADIISVLAMTMSGERECLKYRLVGSQEELASWGHEYVRHLAGEVAKEWQELDDAEKVQREPLLTLVKEIVPYNMAHNAEHEACDLLMEIEQVDMLEKDIDENAYAKVCLYLTSCVNYVPEPENSALLRCALGVFRKFSRFPEALRLALMLNDMELVEDIFTSCKDVVVQKQMAFMLGRHGVFLELSEDVEEYEDLTEIMSNVQLNSNFLALARELDIMEPKVPDDIYKTHLENNRFGGSGSQVDSARMNLASSFVNGFVNAAFGQDKLLTDDGNKWLYKNKDHGMLSAAASLGMILLWDVDGGLTQIDKYLYSSEDYIKSGALLACGIVNSGVRNECDPALALLSDYVLHNSNTMRLGSIFGLGLAYAGSNREDVLTLLLPVMGDSKSSMEVAGVTALACGMIAVGSCNGDVTSTILQTIMEKSETELKDTYARWLPLGLGLNHLGKGEAIEAILAALEVVSEPFRSFANTLVDVCAYAGSGNVLKVQQLLHICSEHFDSKEKEEDKDKKEKKDKDKKEAPADMGAHQGVAVLGIALIAMGEEIGAEMALRTFGHLLRYGEPTLRRAVPLALALISVSNPRLNILDTLSKFSHDADPEVSYNSIFAMGMVGSGTNNARLAAMLRQLAQYHAKDPNNLFMVRLAQGLTHLGKGTLTLCPYHSDRQLMSQVAVAGLLTVLVSFLDVRNIILGKSHYVLYGLVAAMQPRMLVTFDEELRPLPVSVRVGQAVDVVGQAGKPKTITGFQTHTTPVLLAHGERAELATEEFLPVTPILEGFVILRKNPNYDL

SEQ ID NO: 676 - protein, 908 aa, Homo sapiens; identical to SEQ ID NO: 675

SEQ ID NO: 677 - protein, 689 aa, Homo sapiens
MDFNLILESLCRGNSVERKIYIPLNKTAPCVRLLNATHQIGCQSSISGDTGVIHVVEKEEDLQWVLTDGPNPPYMVLLESKHFTRDLMEKLKGRTSRIAGLAVSLTKPSPASGFSPSVQCPNDGFGVYSNSYGPEFAHCREIQWNSLGNGLAYEDFSFPIFLLEDENETKVIKQCYQDHNLSQNGSAPTFPLCAMQLFSHMHAVISTATCMRRSSIQSTFSINPEIVCDPLSDYNVWSMLKPINTTGTLKPDDRVVVAATRLDSRSFFWNVAPGAESAVASFVTQLAAAEALQKAPDVTTLPRNVMFVFFQGETFDYIGSSRMVYDMEKGKFPVQLENVDSFVELGQVALRTSLELWMHTDPVSQKNESVRNQVEDLLATLEKSGAGVPAVILRRPNQSQPLPPSSLQRFLRARNISGVVLADHSGAFHNKYYQSIYDTAENINVSYPEWLSPEEDLNFVTDTAKALADVATVLGRALYELAGGTNFSDTVQADPQTVTRLLYGFLIKANNSWFQSILRQDLRSYLGDGPLQHYIAVSSPTNTTYVVQYALANLTGTVVNLTREQCQDPSKVPSENKDLYEYSWVQGPLHSNETDRLPRCVRSTARLARALSPAFELSQWSSTEYSTWTESRWKDIRARIFLIASKELELITLTVGFGILIFSLIVTYCINAKADVLFIAPREPGAVSY

SEQ ID NO: 678 - protein, 709 aa, Homo sapiens
MATAGGGSGADPGSRGLLRLLSFCVLLAGLCRGNSVERKIYIPLNKTAPCVRLLNATHQIGCQSSISGDTGVIHVVEKEEDLQWVLTDGPNPPYMVLLESKHFTRDLMEKLKGRTSRIAGLAVSLTKPSPASGFSPSVQCPNDGFGVYSNSYGPEFAHCREIQWNSLGNGLAYEDFSFPIFLLEDENETKVIKQCYQDHNLSQNGSAPTFPLCAMQLFSHMHAVISTATCMRRSSIQSTFSINPEIVCDPLSDYNVWSMLKPINTTGTLKPDDRVVVAATRLDSRSFFWNVAPGAESAVASFVTQLAAAEALQKAPDVTTLPRNVMFVFFQGETFDYIGSSRMVYDMEKGKFPVQLENVDSFVELGQVALRTSLELWMHTDPVSQKNESVRNQVEDLLATLEKSGAGVPAVILRRPNQSQPLPPSSLQRFLRARNISGVVLADHSGAFHNKYYQSIYDTAENINVSYPEWLSPEEDLNFVTDTAKALADVATVLGRALYELAGGTNFSDTVQADPQTVTRLLYGFLIKANNSWFQSILRQDLRSYLGDGPLQHYIAVSSPTNTTYVVQYALANLTGTVVNLTREQCQDPSKVPSENKDLYEYSWVQGPLHSNETDRLPRCVRSTARLARALSPAFELSQWSSTEYSTWTESRWKDIRARIFLIASKELELITLTVGFGILIFSLIVTYCINAKADVLFIAPREPGAVSY

SEQ ID NO: 679 - protein, 879 aa, Homo sapiens
MGRLASRPLLLALLSLALCRGRVVRVPTATLVRVVGTELVIPCNVSDYDGPSEQNFDWSFSSLGSSFVELASTWEVGFPAQLYQERLQRGEILLRRTANDAVELHIKNVQPSDQGHYKCSTPSTDATVQGNYEDTVQVKVLADSLHVGPSARPPPSLSLREGEPFELRCTAASASPLHTHLALLWEVHRGPARRSVLALTHEGRFHPGLGYEQRYHSGDVRLDTVGSDAYRLSVSRALSADQGSYRCIVSEWIAEQGNWQEIQEKAVEVATVVIQPSVLRAAVPKNVSVAEGKELDLTCNITTDRADDVRPEVTWSFSRMPDSTLPGSRVLARLDRDSLVHSSPHVALSHVDARSYHLLVRDVSKENSGYYYCHVSLWAPGHNRSWHKVAEAVSSPAGVGVTWLEPDYQVYLNASKVPGFADDPTELACRVVDTKSGEANVRFTVSWYYRMNRRSDNVVTSELLAVMDGDWTLKYGERSKQRAQDGDFIFSKEHTDTFNFRIQRTTEEDRGNYYCVVSAWTKQRNNSWVKSKDVFSKPVNIFWALEDSVLVVKARQPKPFFAAGNTFEMTCKVSSKNIKSPRYSVLIMAEKPVGDLSSPNETKYIISLDQDSVVKLENWTDASRVDGVVLEKVQEDEFRYRMYQTQVSDAGLYRCMVTAWSPVRGSLWREAATSLSNPIEIDFQTSGPIFNASVHSDTPSVIRGDLIKLFCIITVEGAALDPDDMAFDVSWFAVHSFGLDKAPVLLSSLDRKGIVTTSRRDWKSDLSLERVSVLEFLLQVHGSEDQDFGNYYCSVTPWVKSPTGSWQKEAEIHSKPVFITVKMDVLNAFKYPLLIGVGLSTVIGLLSCLIGYCSSHWCCKKEVQETRRERRRLMSMEMD

SEQ ID NO: 680 - protein, 560 aa, Homo sapiens
MPDSTLPGSRVLARLDRDSLVHSSPHVALSHVDARSYHLLVRDVSKENSGYYYCHVSLWAPGHNRSWHKVAEAVSSPAGVGVTWLEPDYQVYLNASKVPGFADDPTELACRVVDTKSGEANVRFTVSWYYRMNRRSDNVVTSELLAVMDGDWTLKYGERSKQRAQDGDFIFSKEHTDTFNFRIQRTTEEDRGNYYCVVSAWTKQRNNSWVKSKDVFSKPVNIFWALEDSVLVVKARQPKPFFAAGNTFEMTCKVSSKNIKSPRYSVLIMAEKPVGDLSSPNETKYIISLDQDSVVKLENWTDASRVDGVVLEKVQEDEFRYRMYQTQVSDAGLYRCMVTAWSPVRGSLWREAATSLSNPIEIDFQTSGPIFNASVHSDTPSVIRGDLIKLFCIITVEGAALDPDDMAFDVSWFAVHSFGLDKAPVLLSSLDRKGIVTTSRRDWKSDLSLERVSVLEFLLQVHGSEDQDFGNYYCSVTPWVKSPTGSWQKEAEIHSKPVFITVKMDVLNAFKYPLLIGIGLSTVIGLLSCLIGYCSSHWCCKKEVQETRRERRRLMSMEMD

SEQ ID NO: 681 - protein, 560 aa, Homo sapiens; identical to SEQ ID NO: 680

SEQ ID NO: 682 - protein, 172 aa, Homo sapiens [sequence omitted]

SEQ ID NO: 683 - protein, 158 aa, Homo sapiens [sequence omitted]

SEQ ID NO: 684 - protein, 158 aa, Homo sapiens [sequence omitted]

SEQ ID NO: 685 - protein, 745 aa, Homo sapiens
MEVMNLMEQPIKVTEWQQTYTYDSGIHSGANTCVPSVSSKGIMEEDEACGRQYTLKKTTTYTQGVPPSQGDLEYQMSTTARAKRVREAMCPGVSGEDSSLLLATQVEGQATNLQRLAEPSQLLKSAIVHLINYQDDAELATRALPELTKLLNDEDPVVVTKAAMIVNQLSKKEASRRALMGSPQLVAAVVRTMQNTSDLDTARCTTSILHNLSHHREGLLAIFKSGGIPALVRMLSSPVESVLFYAITTLHNLLLYQEGAKMAVRLADGLQKMVPLLNKNNPKFLAITTDCLQLLAYGNQESKLIILANGGPQALVQIMRNYSYEKLLWTTSRVLKVLSVCPSNKPAIVEAGGMQALGKHLTSNSPRLVQNCLWTLRNLSDVATKQEGLESVLKILVNQLSVDDVNVLTCATGTLSNLTCNNSKNKTLVTQNSGVEALIHAILRAGDKDDITEPAVCALRHLTSRHPEAEMAQNSVRLNYGIPAIVKLLNQPNQWPLVKATIGLIRNLALCPANHAPLQEAAVIPRLVQLLVKAHQDAQRHVAAGTQQPYTDGVRMEEIVEGCTGALHILARDPMNRMEIFRLNTIPLFVQLLYSSVENIQRVAAGVLCELAQDKEAADAIDAEGASAPLMELLHSRNEGTATYAAAVLFRISEDKNPDYRKRVSVELTNSLFKHDPAAWEAAQSMIPINEPYGDDLDATYRPMYSSDVPLDPLEMHMDMDGDYPIDTYSDGLRPPYPTADHMLA

SEQ ID NO: 686 - protein, 745 aa, Homo sapiens; identical to SEQ ID NO: 685

SEQ ID NO: 687 - protein, 745 aa, Homo sapiens; identical to SEQ ID NO: 685

SEQ ID NO: 688 - protein, 743 aa, Homo sapiens
EVMNLMEQPIKVTEWQQTYTYDSGIHSGANTCVPSVSSKGIMEEDEACGRQYTLKKTTTYTQGVPPSQGDLEYQMSTTARAKRVREAMCPGVSGEGQLALLATQVEGQATNLQRLAEPSQLLKSAIVHLINYQDDAELVTRALPELTKLLNDEDPVVVTKAAMIVNQLSKKEASRRALMGSPQLVAAVVRTMQNTSDLDTARCTTSILHNLSHHREGLLAIFKSGGIPALVRMLSSPVESVLFYAITTLHNLLLYQEGAKMACAGRRAQKMVPLLNKNNPKFLAITTDCLQLLAYGNQESKLIILANGGPQALVQIMRNYSYEKLLWTTSRVLKVLSVCPSNKPAIVEAGGMQALGKHLTSNSPRLVQNCLWTLRNLSDVATKQEGLESVLKILVNQLSVDDVNVLTCATGTLSNLTCNNSKNKTLVTQNSGVEALIHAILRAGDKDDITEPAVCALRHLTSRHPEAEMAQNSVRLNYGIPAIVKLLNQPNQWPLVKATIGLIRNLALCPANHAPLQEAAVIPRLVQLLVKAHQDAQRHVAAGTQQPYTDGVRMEEIVEGCTGALHILARDPMNRMEIFRLNTIPLFVQLLYSSVENIQRVAAGVLCELAQDKEAADAIDAEGASAPLMELLHSRNEGTATYAAAVLFRISEDKNPDYRKRVSVELTNSLFKHDPAAWEAAQSMIPINEPYGDDMDATYRPMYSSDVPLDPLEMHMDMDGDYPIDTYSDGLRPPYPTADHMLA

SEQ ID NO: 689 - protein, 745 aa, Homo sapiens
MEVMNLMEQPIKVTEWQQTYTYDSGIHSGANTCVPSVSSKGIMEEDEACGRQYTLKKTTTYTQGVPPSQGDLEYQMSTTARAKRVREAMCPGVSGEDSSLLLATQVEGQATNLQRLAEPSQLLKSAIVHLINYQDDAELATRALPELTKLLNDEDPVVVTKAAMIVNQLSKKEASRRALMGSPQLVAAVVRTMQNTSDLDTARCTTSILHNLSHHREGLLAIFKSGGIPALVRMLSSPVESVLFYAITTLHNLLLYQEGAKMAVRLADGLQKMVPLLNKNNPKFLAITTDCLQLLAYGNQESKLIILANGGPQALVQIMRNYSYEKLLWTTSRVLKVLSVCPSNKPAIVEAGGMQALGKHLTSNSPRLVQNCLWTLRNLSDVATKQEGLESVLKILVNQLSVDDVNVLTCATGTLSNLTCNNSKNKTLVTQNSGVEALIHAILRAGDKDDITEPAVCALRHLTSRHPEAEMAQNSVRLNYGIPAIVKLLNQPNQWPLVKATIGLIRNLALCPANHAPLQEAAVIPRLVQLLVKAHQDAQRHVAAGTQQPYTDGVRMEEIVEGCTGALHILARDPMNRMEIFRLNTIPLFVQLLYSSVENIQRVAAGVLCELAQDKEAADAIDAEGASAPLMELLHSRNEGTATYAAAVLFRISEDKNPDYRKRVSVELTNSLFKHDPAAWEAAQSMIPINEPYGDDMDATYRPMYSSDVPLDPLEMHMDMDGDYPIDTYSDGLRPPYPTADHMLA

SEQ ID NO: 690 - protein, 745 aa, Homo sapiens; identical to SEQ ID NO: 685

SEQ ID NO: 691 - protein, 191 aa, Homo sapiens
MLLADQGQSWKEEVVTVETWQEGSLKASCLYGQLPKFQDGDLTLYQSNTILRHLGRTLGLYGKDQQEAALVDMVNDGVEDLRCKYISLIYTNYEAGKDDYVKALPGQLKPFETLLSQNQGGKTFIVGDQISFADYNLLDLLLIHEVLAPGCLDAFPLLSAYVGRLSARPKLKAFLASPEYVNLPINGNGKQ

SEQ ID NO: 692 - protein, 210 aa, Homo sapiens
MPPYTVVYFPVRGRCAALRMLLADQGQSWKEEVVTVETWQEGSLKASCLYGQLPKFQDGDLTLYQSNTILRHLGRTLGLYGKDQQEAALVDMVNDGVEDLRCKYISLIYTNYEAGKDDYVKALPGQLKPFETLLSQNQGGKTFIVGDQISFADYNLLDLLLIHEVLAPGCLDAFPLLSAYVGRLSARPKLKAFLASPEYVNLPINGNGKQ

SEQ ID NO: 693 - protein, 173 aa, Homo sapiens
MPPYTVVYFPVRGRCAALRMLLADQGQSWKEEVVTVETWQEGSLKASCLYGQLPKFQDGDLTLYQSNTILRHLGRTLGLYGKDQQEAALVDMVNDGVEDLRCKYISLIYTNYAGKDDYVKALPGQLKPFETLLSQNQGGKTFIVGDQISFADYNLLDLLLIHEVLAPGCLDAF

SEQ ID NO: 694 - protein, 209 aa, Homo sapiens
PPYTVVYFPVRGRCAALRMLLADQGQSWKEEVVTVETWQEGSLKASCLYGQLPKFQDGDLTLYQSNTILRHLGRTLGLYGKDQQEAALVDMVNDGVEDLRCKYISLIYTNYEAGKDDYVKALPGQLKPFETLLSQNQGGKTFIVGDQISFADYNLLDLLLIHEVLAPGCLDAFPLLSAYVGRLSARPKLKAFLASPEYVNLPINGNGKQ

SEQ ID NO: 695 - protein, 2147 aa, Homo sapiens
MPVTEKDLAEDAPWKKIQQNTFTRWCNEHLKCVNKRIGNLQTDLSDGLRLIALLEVLSQKRMYRKYHQRPTFRQMQLENVSVALEFLDRESIKLVSIDSKAIVDGNLKLILGLVWTLILHYSISMPVWEDEGDDDAKKQTPKQRLLGWIQNKIPYLPITNFNQNWQDGKALGALVDSCAPGLCPDWESWDPQKPVDNAREAMQQADDWLGVPQVITPEEIIHPDVDEHSVMTYLSQFPKAKLKPGAPLKPKLNPKKARAYGRGIEPTGNMVKQPAKFTVDTISAGQGDVMVFVEDPEGNKEEAQVTPDSDKNKTYSVEYLPKVTGLHKVTVLFAGQHISKSPFEVSVDKAQGDASKVTAKGPGLEAVGNIANKPTYFDIYTAGAGVGDIGVEVEDPQGKNTVELLVEDKGNQVYRCVYKPMQPGPHVVKIFFAGDTIPKSPFVVQVGEACNPNACRASGRGLQPKGVRIRETTDFKVDTKAAGSGELGVTMKGPKGLEELVKQKDFLDGVYAFEYYPSTPGRYSIAITWGGHHIPKSPFEVQVGPEAGMQKVRAWGPGLHGGIVGRSADFVVESIGSEVGSLGFAIEGPSQAKIEYNDQNDGSCDVKYWPKEPGEYAVHIMCDDEDIKDSPYMAFIHPATGGYNPDLVRAYGPGLEKSGCIVNNLAEFTVDPKDAGKAPLKIFAQDGEGQRIDIQMKNRMDGTYACSYTPVKAIKHTIAVVWGGVNIPHSPYRVNIGQGSHPQKVKVFGPGVERSGLKANEPTHFTVDCTEAGEGDVSVGIKCDARVLSEDEEDVDFDIIHNANDTFTVKYVPPAAGRYTIKVLFASQEIPASPFRVKVDPSHDASKVKAEGPGLSKAGVENGKPTHFTVYTKGAGKAPLNVQFNSPLPGDAVKDLDIIDNYDYSHTVKYTPTQQGNMQVLVTYGGDPIPKSPFTVGVAAPLDLSKIKLNGLENRVEVGKDQEFTVDTRGAGGQGKLDVTILSPSRKVVPCLVTPVTGRENSTAKFIPREEGLYAVDVTYDGHPVPGSPYTVEASLPPDPSKVKAHGPGLEGGLVGKPAEFTIDTKGAGTGGLGLTVEGPCEAKIECSDNGDGTCSVSYLPTKPGEYFVNILFEEVHIPGSPFKADIEMPFDPSKVVASGPGLEHGKVGEAGLLSVDCSEAGPGALGLEAVSDSGTKAEVSIQNNKDGTYAVTYVPLTAGMYTLTMKYGGELVPHFPARVKVEPAVDTSRIKVFGPGIEGKDVFREATTDFTVDSRPLTQVGGDHIKAHIANPSGASTECFVTDNADGTYQVEYTPFEKGLHVVEVTYDDVPIPNSPFKVAVTEGCQPSRVQAQGPGLKEAFTNKPNVFTVVTRGAGIGGLGITVEGPSESKINCRDNKDGSCSAEYIPFAPGDYDVNITYGGAHIPGSPFRVPVKDVVDPSKVKIAGPGLGSGVRARVLQSFTVDSSKAGLAPLEVRVLGPRADDTDSQSWRSPLKALSEFFKGDPKGLVEPVNVVDNGDGTHTVTYTPSQEGPYMVSVKYADEEIPRSPFKVKVLPTYDASKVTASGPGLSSYGVPASLPVDFAIDARDAGEGLLAVQITDQEGKPKRAIVHDNKDGTYAVTYIPDKTGRYMIGVTYGGDDIPLSPYRIRATQTGDASKCLATGPGIASTVKTGEEVGFVVDAKTAGKGKVTCTVLTPDGTEAEADVIENEDGTYDIFYTAAKPGTYVIYVRFGGVDIPNSPFTVMVTEEAYVPVSDMNGLGFKPFDLVIPFAVRKGEITGEVHMPSGKTATPEIVDNKDGTVTVRYAPTEVGLHEMHIKYMGSHIPESPLQFYVNYPNSGSVSAYGPGLVYGVANKTATFTIVTEDAGEGGLDLAIEGPSKAEISCIDNKDGTCTVTYLPTLPGDYSILVKYNDKHIPGSPFTAKITDDSRRCSQVKLGSAADFLLDISETDLSSLTASIKAPSGRDEPCLLKRLPNNHIGISFIPREVGEHLVSIKKNGNHVANSPVSIMVVQSEIGDARRAKVYGRGLSEGRTFEMSDFIVDTRDAGYGGISLAVEGPSKVDIQTEDLEDGTCKVSYFPTVPGVYIVSTKFADEHVPGSPFTVKISGEGRVKESITRTSRAPSVATVGSICDLNLKIPGVRVMNCSAQILWGWRVQFHTGSR

SEQ ID NO: 696 - protein, 2468 aa, Homo sapiens [sequence omitted]

SEQ ID NO: 697 - protein, 2602 aa, Homo sapiens
MPVTEKDLAEDAPWKKIQQNTFTRWCNEHLKCVNKRIGNLQTDLSDGLRLIALLEVLSQKRMYRKYHQRPTFRQMQLENVSVALEFLDRESIKLVSIDSKAIVDGNLKLILGLVWTLILHYSISMPVWEDEGDDDAKKQTPKQRLLGWIQNKIPYLPITNFNQNWQDGKALGALVDSCAPGLCPDWESWDPQKPVDNAREAMQQADDWLGVPQVITPEEIIHPDVDEHSVMTYLSQFPKAKLKPGAPLKPKLNPKKARAYGRGIEPTGNMVKQPAKFTVDTISAGQGDVMVFVEDPEGNKEEAQVTPDSDKNKTYSVEYLPKVTGLHKVTVLFAGQHISKSPFEVSVDKAQGDASKVTAKGPGLEAVGNIANKPTYFDIYTAGAGVGDIGVEVEDPQGKNTVELLVEDKGNQVYRCVYKPMQPGPHVVKIFFAGDTIPKSPFVVQVGEACNPNACRASGRGLQPKGVRIRETTDFKVDTKAAGSGELGVTMKGPKGLEELVKQKDFLDGVYAFEYYPSTPGRYSIAITWGGHHIPKSPFEVQVGPEAGMQKVRAWGPGLHGGIVGRSADFVVESIGSEVGSLGFAIEGPSQAKIEYNDQNDGSCDVKYWPKEPGEYAVHIMCDDEDIKDSPYMAFIHPATGGYNPDLVRAYGPGLEKSGCIVNNLAEFTVDPKDAGKAPLKIFAQDGEGQRIDIQMKNRMDGTYACSYTPVKAIKHTIAVVWGGVNIPHSPYRVNIGQGSHPQKVKVFGPGVERSGLKANEPTHFTVDCTEAGEGDVSVGIKCDARVLSEDEEDVDFDIIHNANDTFTVKYVPPAAGRYTIKVLFASQEIPASPFRVKVDPSHDASKVKAEGPGLSKAGVENGKPTHFTVYTKGAGKAPLNVQFNSPLPGDAVKDLDIIDNYDYSHTVKYTPTQQGNMQVLVTYGGDPIPKSPFTVGVAAPLDLSKIKLNGLENRVEVGKDQEFTVDTRGAGGQGKLDVTILSPSRKVVPCLVTPVTGRENSTAKFIPREEGLYAVDVTYDGHPVPGSPYTVEASLPPDPSKVKAHGPGLEGGLVGKPAEFTIDTKGAGTGGLGLTVEGPCEAKIECSDNGDGTCSVSYLPTKPGEYFVNILFEEVHIPGSPFKADIEMPFDPSKVVASGPGLEHGKVGEAGLLSVNCSEAGPGALGLEAVSDSGTKAEVSIQNNKDGTYAVTYVPLTAGMYTLTMKYGGELVPHFPARVKVEPAVDTSRIKVFGPGIEGKDVFREATTDFTVDSRPLTQVGGDHIKAHIANPSGASTECFVTDNADGTYQVEYTPFEKGLHVVEVTYDDVPIPNSPFKVAVTEGCQPSRVQAQGPGLKEAFTNKPNVFTVVTRGAGIGGLGITVEGPSESKINCRDNKDGSCSAEYIPFAPGDYDVNITYGGAHIPGSPFRVPVKDVVDPSKVKIAGPGLGSGVRARVLQSFTVDSSKAGLAPLEVRVLGPRGLVEPVNMVDNGDGTHTVTYTPSQEGPYMVSVKYADEEIPRSPFKVKVLPTYDASKVTASGPGLSSYGVPASLPVDFAIDARDAGEGLLAVQITDQEGKPKRAIVHDNKDGTYAVTYIPDKTGRYMIGVTYGGDDIPLSPYRIRATQTGDASKCLATGPGIASTVKTGEEVGFVVDAKTAGKGKVTCTVLTPDGTEAEADVIENEDGTYDIFYTAAKPGTYVIYVRFGGVDIPNSPFTVMATDGEVTAVEEAPVNACPPGFRPWVTEEAYVPVSDMNGLGFKPFDLVIPFAVRKGEITGEVHMPSGKTATPEIVDNKDGTVTVRYAPTEVGLHEMHIKYMGSHIPESPLQFYVNYPNSGSVSAYGPGLVYGVANKTATFTIVTEDAGEGGLDLAIEGPSKAEISCIDNKDGTCTVTYLPTLPGDYSILVKYNDKHIPGSPFTAKITDDSRRCSQVKLGSAADFLLDISETDLSSLTASIKAPSGRDEPCLLKRLPNNHIGISFIPREVGEHLVSIKKNGNHVANSPVSIMVVQSEIGDARRAKVYGRGLSEGRTFEMSDFIVDTRDAGYGGISLAVEGPSKVDIQTEDLEDGTCKVSYFPTVPGVYIVSTKFADEHVPGSPFTVKISGEGRVKESITRTSRAPSVATVGSICDLNLKIPEINSSDMSAHVTSPSGRVTEAEIVPMGKNSHCVRFVPQEMGVHTVSVKYRGQHVTGSPFQFTVGPLGEGGAHKVRAGGPGLERGEAGVPAEFSIWTREAGAGGLSIAVEGPSKAEITFDDHKNGSCGVSYIAQEPGNYEVSIKFNDEHIPESPYLVPVIAPSDDARRLTVMSLQESGLKVNQPASFAIRLNGAKGKIDAKVHSPSGAVEECHVSELEPDKYAVRFIPHENGVHTIDVKFNGSHVVGSPFKVRVGEPGQAGNPALVSAYGTGLEGGTTGIQSEFFINTTRAGPGTLSVTIEGPSKVKMDCQETPEGYKVMYTPMAPGNYLISVKYGGPNHIVGSPFKAKVTGQRLVSPGSANETSSILVESVTRSSTETCYSAIPKASSDASKVTSKGAGLSKAFVGQKSSFLVDCSKAGSNMLLIGVHGPTTPCEEVSMKHVGNQQYNVTYVVKERGDYVLAVKWGEEHIPGSPFHVTVP

SEQ ID NO: 698 - protein, 2534 aa, Homo sapiens [sequence omitted]

SEQ ID NO: 699 - protein, 2622 aa, Homo sapiens [sequence omitted]

SEQ ID NO: 700 - protein, 2598 aa, Homo sapiens [sequence omitted]

SEQ ID NO: 701 - protein, 2622 aa, Homo sapiens [sequence omitted]

SEQ ID NO: 702 - protein, 414 aa, Homo sapiens
MSKKISGGSVVEMQGDEMTRIIWELIKEKLIFPYVELDLHSYDLGIENRDATNDQVTKDAAEAIKKHNVGVKCATITPDEKRVEEFKLKQMWKSPNGTIRNILGGTVFREAIICKNIPRLVSGWVKPIIIGRHAYGDQYRATDFVVPGPGKVEITYTPSDGTQKVTYLVHNFEEGGGVAMGMYNQDKSIEDFAHSSFQMALSKGWPLYLSTKNTILKKYDGRFKDIFQEIYDKQYKSQFEAQKIWYEHRLIDDMVAQAMKSEGGFIWACKNYDGDVQSDSVAQGYGSLGMMTSVLVCPDGKTVEAEAAHGTVTRHYRMYQKGQETSTNPIASIFAWTRGLAHRAKLDNNKELAFFANALEEVSIETIEAGFMTKDLAACIKGLPNVQRSDYLNTFEFMDKLGENLKIKLAQAKL

SEQ ID NO: 703 - protein, 414 aa, Homo sapiens; identical to SEQ ID NO: 702

SEQ ID NO: 704 - protein, 414 aa, Homo sapiens; identical to SEQ ID NO: 702

SEQ ID NO: 705 - protein, 414 aa, Homo sapiens; identical to SEQ ID NO: 702

SEQ ID NO: 706 - protein, 286 aa, Homo sapiens
MSKKISGGSVVEMQGDEMTRIIWELIKEKLIFPYVELDLHSYDLGIENRDATNDQVTKDAAEAIKKHNVGVKCATITPDEKRVEEFKLKQMWKSPNGTIRNILGGTVFREAIICKNIPRLVSGWVKPIIIGRHAYGDQYRATDFVVPGPGKVEITYTPSDGTQKVTYLVHNFEEGGGVAMGMYNQDKSIEDFAHSSFQMALSKGWPLYLSTKNTILKKYDGRFKDIFQEIYDQRAGLSRWQDSRSRGCPRDCNPSLPHVPERTGDVHQSHCFHFCLDQRVSPQSKA

SEQ ID NO: 707 - protein, 590 aa, Homo sapiens
MRKKQLKTEAAPHCELKSYSKNSATQVSTMVLGPEQKMSDDSVSGDHGESASLGNINPAYSNPSLSQSPGDSEEYFATYFNEKISIPEEEYSCFSFRKLWAFTGPGFLMSIAYLDPGNIESDLQSGAVAGFKLLWILLLATLVGLLLQRLAARLGVVTGLHLAEVCHRQYPKVPRVILWLMVELAIIGSDMQEVIGSAIAINLLSVGRIPLWGGVLITIADTFVFLFLDKYGLRKLEAFFGFLITIMALTFGYEYVTVKPSQSQVLKGMFVPSCSGCRTPQIEQAVGIVGAVIMPHNMYLHSALVKSRQVNRNNKQEVREANKYFFIESCIALFVSFIINVFVVSVFAEAFFGKTNEQVVEVCTNTSSPHAGLFPKDNSTLAVDIYKGGVVLGCYFGPAALYIWAVGILAAGQSSTMTGTYSGQFVMEGFLNLKWSRFARVVLTRSIAIIPTLLVAVFQDVEHLTGMNDFLNVLQSLQLPFALIPILTFTSLRPVMSDFANGLGWRIAGGILVLIICSINMYFVVVYVRDLGHVALYVVAAVVSVAYLGFVFYLGWQCLIALGMSFLDCGHTVSISKGLLTEEATRGYVK

SEQ ID NO: 708 - protein, 568 aa, Homo sapiens
MVLGPEQKMSDDSVSGDHGESASLGNINPAYSNPSLSQSPGDSEEYFATYFNEKISIPEEEYSCFSFRKLWAFTGPGFLMSIAYLDPGNIESDLQSGAVAGFKLLWILLLATLVGLLLQRLAARLGVVTGLHLAEVCHRQYPKVPRVILWLMVELAIIGSDMQEVIGSAIAINLLSVGRIPLWGGVLITIADTFVFLFLDKYGLRKLEAFFGFLITIMALTFGYEYVTVKPSQSQVLKGMFVPSCSGCRTPQIEQAVGIVGAVIMPHNMYLHSALVKSRQVNRNNKQEVREANKYFFIESCIALFVSFIINVFVVSVFAEAFFGKTNEQVVEVCTNTSSPHAGLFPKDNSTLAVDIYKGGVVLGCYFGPAALYIWAVGILAAGQSSTMTGTYSGQFVMEGFLNLKWSRFARVVLTRSIAIIPTLLVAVFQDVEHLTGMNDFLNVLQSLQLPFALIPILTFTSLRPVMSDFANGLGWRIAGGILVLIICSINMYFVVVYVRDLGHVALYVVAAVVSVAYLGFVFYLGWQCLIALGMSFLDCGHTCHLGLTAQPELYLLNTMDADSLVSR

SEQ ID NO: 709 - protein, 410 aa, Homo sapiens
MVELAIIGSDMQEVIGSAIAINLLSVGRIPLWGGVLITIADTFVFLFLDKYGLRKLEAFFGFLITIMALTFGYEYVTVKPSQSQVLKGMFVPSCSGCRTPQIEQAVGIVGAVIMPHNMYLHSALVKSRQVNRNNKQEVREANKYFFIESCIALFVSFIINVFVVSVFAEAFFGKTNEQVVEVCTNTSSPHAGLFPKDNSTLAVDIYKGGVVLGCYFGPAALYIWAVGILAAGQSSTMTGTYSGQFVMEGFLNLKWSRFARVVLTRSIAIIPTLLVAVFQDVEHLTGMNDFLNVLQSLQLPFALIPILTFTSLRPVMSDFANGLGWRIAGGILVLIICSINMYFVVVYVRDLGHVALYVVAAVVSVAYLGFVFYLGWQCLIALGMSFLDCGHTVSISKGLLTEEATRGYVK

SEQ ID NO: 710 - protein, 1179 aa, Homo sapiens
MAACGRVRRMFRLSAALHLLLLFAAGAEKLPGHGVHSQGQGPGANFVSFVGQAGGGGPAGQQLPQLLQSSQLQQQQQQQQQQQQLQPPQPPFPAGGPPARRGGAGAGGGWKLAEEESCREDVTRVCPKHTWSNNLAVLECLQDVREPENEISSDCNHLLWNYKLNLTTDPKFESVAREVCKSTITEIKECADEPVGKGYMVSCLVDHRGNITEYQCHQYITKMTAIIFSDYRLICGFMDDCKNDINILKCGSIRLGEKDAHSQGEVVSCLEKGLVKEAEEREPKIQVSELCKKAILRVAELSSDDFHLDRHLYFACRDDRERFCENTQAGEGRVYKCLFNHKFEESMSEKCREALTTRQKLIAQDYKVSYSLAKSCKSDLKKYRCNVENLPRSREARLSYLLMCLESAVHRGRQVSSECQGEMLDYRRMLMEDFSLSPEIILSCRGEIEHHCSGLHRKGRTLHCLMKVVRGEKGNLGMNCQQALQTLIQETDPGADYRIDRALNEACESVIQTACKHIRSGDPMILSCLMEHLYTEKMVEDCEHRLLELQYFISRDWKLDPVLYRKCQGDASRLCHTHGWNETSEFMPQGAVFSCLYRHAYRTEEQGRRLSRECRAEVQRILHQRAMDVKLDPALQDKCLIDLGKWCSEKTETGQELECLQDHLDDLVVECRDIVGNLTELESEDIQIEALLMRACEPIIQNFCHDVADNQIDSGDLMECLIQNKHQKDMNEKCAIGVTHFQLVQMKDFRFSYKFKMACKEDVLKLCPNIKKKVDVVICLSTTVRNDTLQEAKEHRVSLKCRRQLRVEELEMTEDIRLEPDLYEACKSDIKNFCSAVQYGNAQIIECLKENKKQLSTRCHQKVFKLQETEMMDPELDYTLMRVCKQMIKRFCPEADSKTMLQCLKQNKNSELMDPKCKQMITKRQITQNTDYRLNPMLRKACKADIPKFCHGILTKAKDDSELEGQVISCLKLRYADQRLSSDCEDQIRIIIQESALDYRLDPQLQLHCSDEISSLCAEEAAAQEQTGQVEECLKVNLLKIKTELCKKEVLNMLKESKADIFVDPVLHTACALDIKHHCAAITPGRGRQMSCLMEALEDKRVRLQPECKKRLNDRIEMWSYAAKVAPADGFSDLAMQVMTSPSKNYILSVISGSICILFLIGLMCGRITKRVTRELKDR

SEQ ID NO: 711 - protein, 1203 aa, Homo sapiens
MAACGRVRRMFRLSAALHLLLLFAAGAEKLPGQGVHSQGQGPGANFVSFVGQAGGGGPAGQQLPQLPQSSQLQQQQQQQQQQQQPQPPQPPFPAGGPPARRGGAGAGGGWKLAEEESCREDVTRVCPKHTWSNNLAVLECLQDVREPENEISSDCNHLLWNYKLNLTTDPKFESVAREVCKSTITEIKECADEPVGKGYMVSCLVDHRGNITEYQCHQYITKMTAIIFSDYRLICGFMDDCKNDINILKCGSIRLGEKDAHSQGEVVSCLEKGLVKEAEEREPKIQVSELCKKAILRVAELSSDDFHLDRHLYFACRDDRERFCENTQAGEGRVYKCLFNHKFEESMSEKCREALTTRQKLIAQDYKVSYSLAKSCKSDLKKYRCNVENLPRSREARLSYLLMCLESAVHRGRQVSSECQGEMLDYRRMLMEDFSLSPEIILSCRGEIEHHCSGLHRKGRTLHCLMKVVRGEKGNLGMNCQQALQTLIQETDPGADYRIDRALNEACESVIQTACKHIRSGDPMILSCLMEHLYTEKMVEDCEHRLLELQYFISRDWKLDPVLYRKCQGDASRLCHTHGWNETSEFMPQGAVFSCLYRHAYRTEEQGRRLSRECRAEVQRILHQRAMDVKLDPALQDKCLIDLGKWCSEKTETGQELECLQDHLDDLVVECRDIVGNLTELESEDIQIEALLMRACEPIIQNFCHDVADNQIDSGDLMECLIQNKHQKDMNEKCAIGVTHFQLVQMKDFRFSYKFKMACKEDVLKLCPNIKKKVDVVICLSTTVRNDTLQEAKEHRVSLKCRRQLRVEELEMTEDIRLEPDLYEACKSDIKNFCSAVQYGNAQIIECLKENKKQLSTRCHQKVFKLQETEMMDPELDYTLMRVCKQMIKRFCPEADSKTMLQCLKQNKNSELMDPKCKQMITKRQITQNTDYRLNPMLRKACKADIPKFCHGILTKAKDDSELEGQVISCLKLRYADQRLSSDCEDQIRIIIQESALDYRLDPQLQLHCSDEISSLCAEEAAAQEQTGQVEECLKVNLLKIKTELCKKEVLNMLKESKADIFVDPVLHTACALDIKHHCAAITPGRGRQMSCLMEALEDKRVRLQPECKKRLNDRIEMWSYAAKVAPADGFSDLAMQVMTSPSKNYILSVISGSICILFLIGLMCGRITKRVTRELKDRLQYRSETMAYKGLVWSQDVTGSPA

SEQ ID NO: 712 - protein, 1179 aa, Homo sapiens
MAACGRVRRMFRLSAALHLLLLFAAGAEKLPGQGVHSQGQGPGANFVSFVGQAGGGGPAGQQLPQLPQSSQLQQQQQQQQQQQQPQPPQPPFPAGGPPARRGGAGAGGGWKLAEEESCREDVTRVCPKHTWSNNLAVLECLQDVREPENEISSDCNHLLWNYKLNLTTDPKFESVAREVCKSTITEIKECADEPVGKGYMVSCLVDHRGNITEYQCHQYITKMTAIIFSDYRLICGFMDDCKNDINILKCGSIRLGEKDAHSQGEVVSCLEKGLVKEAEEREPKIQVSELCKKAILRVAELSSDDFHLDRHLYFACRDDRERFCENTQAGEGRVYKCLFNHKFEESMSEKCREALTTRQKLIAQDYKVSYSLAKSCKSDLKKYRCNVENLPRSREARLSYLLMCLESAVHRGRQVSSECQGEMLDYRRMLMEDFSLSPEIILSCRGEIEHHCSGLHRKGRTLHCLMKVVRGEKGNLGMNCQQALQTLIQETDPGADYRIDRALNEACESVIQTACKHIRSGDPMILSCLMEHLYTEKMVEDCEHRLLELQYFISRDWKLDPVLYRKCQGDASRLCHTHGWNETSEFMPQGAVFSCLYRHAYRTEEQGRRLSRECRAEVQRILHQRAMDVKLDPALQDKCLIDLGKWCSEKTETGQELECLQDHLDDLVVECRDIVGNLTELESEDIQIEALLMRACEPIIQNFCHDVADNQIDSGDLMECLIQNKHQKDMNEKCAIGVTHFQLVQMKDFRFSYKFKMACKEDVLKLCPNIKKKVDVVICLSTTVRNDTLQEAKEHRVSLKCRRQLRVEELEMTEDIRLEPDLYEACKSDIKNFCSAVQYGNAQIIECLKENKKQLSTRCHQKVFKLQETEMMDPELDYTLMRVCKQMIKRFCPEADSKTMLQCLKQNKNSELMDPKCKQMITKRQITQNTDYRLNPMLRKACKADIPKFCHGILTKAKDDSELEGQVISCLKLRYADQRLSSDCEDQIRIIIQESALDYRLDPQLQLHCSDEISSLCAEEAAAQEQTGQVEECLKVNLLKIKTELCKKEVLNMLKESKADIFVDPVLHTACALDIKHHCAAITPGRGRQMSCLMEALEDKRVRLQPECKKRLNDRIEMWSYAAKVAPADGFSDLAMQVMTSPSKNYILSVISGSICILFLIGLMCGRITKRVTRELKDR

SEQ ID NO: 713 - protein, 527 aa, Homo sapiens
MSLKICLSKYNGGAVLYLFWGYLLQILESFPKDIQIEALLMRACEPIIQNFCHDVADNQIDSGDLMECLIQNKHQKDMNEKCAIGVTHFQLVQMKDFRFSYKFKMACKEDVLKLCPNIKKKVDVVICLSTTVRNDTLQEAKEHRVSLKCRRQLRVEELEMTEDIRLEPDLYEACKSDIKNFCSAVQYGNAQIIECLKENKKQLSTRCHQKVFKLQETEMMDPELDYTLMRVCKQMIKRFCPEADSKTMLQCLKQNKNSELMDPKCKQMITKRQITQNTDYRLNPMLRKACKADIPKFCHGILTKAKDDSELEGQVISCLKLRYADQRLSSDCEDQIRIIIQESALDYRLDPQLQLHCSDEISSLCAEEAAAQEQTGQVEECLKVNLLKIKTELCKKEVLNMLKESKADIFVDPVLHTACALDIKHHCAAITPGRGRQMSCLMEALEDKRVRLQPECKKRLNDRIEMWSYAAKVAPADGFSDLAMQVMTSPSKNYILSVISGSICILFLIGLMCGRITKRVTRELKDR

SEQ ID NO: 714 - protein, 1179 aa, Homo sapiens; identical to SEQ ID NO: 712

SEQ ID NO: 715 - protein, 844 aa, Homo sapiens [sequence omitted]

SEQ ID NO: 716 - protein, 1222 aa, Homo sapiens
MLVGQGAGLLGPAVVTAAVVLLLSGVGPAHGSEDIVVGCGGFVKSDVEINYSLIEIKLYTKHGTLKYQTDCAPNNGYFMIPLYDKGDFILKIEPPLGWSFEPTTVELHVDGVSDICTKGGDINFVFTGFSVNGKVLSKGQPLGPAGVQVSLRNTGTEAKIQSTVTQPGGKFAFFKVLPGDYEILATHPTWALKEASTTVRVTNSNANAASPLIVAGYNVSGSVRSDGEPMKGVKFLLFSSLVTKEDVLGCNVSPVPGFQPQDESLVYLCYTVSREDGSFSFYSLPSGGYTVIPFYRGERITFDVAPSRLDFTVEHDSLKIEPVFHVMGFSVTGRVLNGPEGDGVPEAVVTLNNQIKVKTKADGSFRLENITTGTYTIHAQKEHLYFETVTIKIAPNTPQLADIVATGFSVCGRISIIRFPDTVKQMNKYKVVLSSQDKDKSLVTVETDAHGSFCFKAKPGTYKVQVMVPEAETRAGLTLKPQTFPLTVTDRPVMDVAFVQFLASVSGKVSCLDTCGDLLVTLQSLSRQGEKRSLQLSGKVNAMTFTFDNVLPGKYKISIMHEDWCWKNKSLEVEVLEDDVSAVEFRQTGYMLRCSLSHAITLEFYQDGNGRENVGIYNLSKGVNRFCLSKPGVYKVTPRSCHRFEQAFYTYDTSSPSILTLTAIRHHVLGTITTDKMMDVTVTIKSSIDSEPALVLGPLKSVQELRREQQLAEIEARRQEREKNGNEEGEERMTKPPVQEMVDELQGPFSYDFSYWARSGEKITVTPSSKELLFYPPSMEAVVSGESCPGKLIEIHGKAGLFLEGQIHPELEGVEIVISEKGASSPLITVFTDDKGAYSVGPLHSDLEYTVTSQKEGYVLTAVEGTIGDFKAYALAGVSFEIKAEDDQPLPGVLLSLSGGLFRSNLLTQDNGILTFSNLSPGQYYFKPMMKEFRFEPSSQMIEVQEGQNLKITITGYRTAYSCYGTVSSLNGEPEQGVAMEAVGQNDCSIYGEDTVTDEEGKFRLRGLLPGCVYHVQLKAEGNDHIERALPHHRVIEVGNNDIDDVNIIVFRQINQFDLSGNVITSSEYLPTLWVKLYKSENLDNPIQTVSLGQSLFFHFPPLLRDGENYVVLLDSTLPRSQYDYILPQVSFTAVGYHKHITLIFNPTRKLPEQDIAQGSYIALPLTLLVLLAGYNHDKLIPLLLQLTSRLQGVGALGQAASDNSGPEDAKRQAKKQKTRRT

SEQ ID NO: 717 - protein, 913 aa, Homo sapiens
MSRFFTTGSDSESESSLSGEELVTKPVGGNYGKQPLLLSEDEEDTKRVVRSAKDKRFEELTNLIRTIRNAMKIRDVTKCLEEFELLGKAYGKAKSIVDKEGVPRFYIRILADLEDYLNELWEDKEGKKKMNKNNAKALSTLRQKIRKYNRDFESHITSYKQNPEQSADEDAEKNEEDSEGSSDEDEDEDGVSAATFLKKKSEAPSGESRKFLKKMDDEDEDSEDSEDDEDWDTGSTSSDSDSEEEEGKQTALASRFLKKAPTTDEDKKAAEKKREDKAKKKHDRKSKRLDEEEEDNEGGEWERVRGGVPLVKEKPKMFAKGTEITHAVVIKKLNEILQARGKKGTDRAAQIELLQLLVQIAAENNLGEGVIVKIKFNIIASLYDYNPNLATYMKPEMWGKCLDCINELMDILFANPNIFVGENILEESENLHNADQPLRVRGCILTLVERMDEEFTKIMQNTDPHSQEYVEHLKDEAQVCAIIERVQRYLEEKGTTEEVCRIYLLRILHTYYKFDYKAHQRQLTPPEGSSKSEQDQAENEGEDSAVLMERLCKYIYAKDRTDRIRTCAILCHIYHHALHSRWYQARDLMLMSHLQDNIQHADPPVQILYNRTMVQLGICAFRQGLTKDAHNALLDIQSSGRAKELLGQGLLLRSLQERNQEQEKVERRRQVPFHLHINLELLECVYLVSAMLLEIPYMAAHESDARRRMISKQFHHQLRVGERQPLLGPPESMREHVVAASKAMKMGDWKTCHSFIINEKMNGKVWDLFPEADKVRTMLVRKIQEESLRTYLFTYSSVYDSISMETLSDMFELDLPTVHSIISKMIINEELMASLDQPTQTVVMHRTEPTAQQNLALQLAEKLGSLVENNERVFDHKQGTYGGYFRDQKDGYRKNEGYMRRGGYRQQQSQTAY

SEQ ID NO: 718 - protein, 5065 aa, Homo sapiens
MAATLGAGTPPRPQARSIAGVYVEASGQAQSVYAAMEQGLLPAGLGQALLEAQAATGGLVDLARGQLLPVSKALQQGLVGLELKEKLLAAERATTGYPDPYGGEKLALFQAIGKEVVDRALGQSWLEVQLATGGLVDPAQGVLVAPEPACHQGLLDRETWHKLSELEPGTGDLRFLNPNTLERLTYHQLLERCVRAPGSGLALLPLKITFRSMGGAVSAAELLEVGILDEQAVQGLREGRLAAVDVSARAEVRRYLEGTGSVAGVVLLPEGHKKSFFQAATEHLLPMGTALPLLEAQAATHTLVDPITGQRLWVDEAVRAGLVSPELHEQLLVAEQAVTGHHDPFSGSQIPLFQAMKKGLVDRPLALRLLDAQLATGGLVCPARRLRLPLEAALRCGCLDEDTQRQLSQAGSFSDGTHGGLRYEQLLALCVTDPETGLAFLPLSGGPRGGEPQGPPFIKYSTRQALSTATATVSVGKFRGRPVSLWELLFSEAISSEQRAMLAQQYQEGTLSVEKLAAELSATLEQAAATARVTFSGLRDTVTPGELLKAEIIDQDLYERLEHGQATAKDVGSLASAQRYLQGTGCIAGLLLPGSQERLSIYEARCKGLLRPGTALILLEAQAATGFIIDPKANKGHSVEEALRAAVIGPDVFAKLLSAERAVTGYTDPYTGQQISLFQAMQKGLIVREHGIRLLEAQIATGGVIDPVHSHRVPVDVAYRRGYFDQMLNLILLDPSDDTKGFFDPNTHENLTYLQLLERCVRDPETGLYLLPLSSTQSPLVDSATQQAFQNLLLSVKYGRFQGQRVSAWELINSEYFSEGRRRQLLRRYRQREVTLGQVAKLLEAETQRQADIMLPALRSRVTVHQLLEAGIIDQQLLDQVLAGTISPEALLLMDGVRRYLCGLGAVGGVRLLPSGQRLSLYQAMRQKLLGPRVALALLEAQAATGTIMDPHSPESLSVDEAVRRGVVGPELYGRLKRAEGAIAGFRDPFSGKQVSVFQAMKKGLIPWEQAARLLEAQVATGGIIDPTSHHHLPMPVAIQRGYVDQEMETALSSSSETFPTPDGQGRTSYAQLLEECPRDETSGLHLLPLPESAPALPTEEQVQRSLQAVPGAKDGTSLWDLLSSCHFTEEQRRGLLEDVQEGRTTVPQLLASVQRWVQETKLLAQARVMVPGPRGEVPAVWLLDAGIITQETLEALAQGTQSPAQVAEQPAVKACLWGTGCVAGVLLQPSGAKASIAQAVRDGLLPTGLGQRLLEAQVASGFLVDPLNNQRLSVEDAVKVGLVGRELSEQLGQAERAAAGYPDPYSRASLSLWQAMEKGLVPQNEGLPLLQVQLATGGVVDPVHGVHLPQAAACRLGLLDTQTSQVLTAVDKDNKFFFDPSARDQVTYQQLRERCVCDSETGLLLLPLPSDTVLEVDDHTAVALRAMKVPVSTGRFKGCSVSLWDLLLSEYVGADKRRELVALCRSGRAAALRQVVSAVTALVEAAERQPLQATFRGLRKQVSARDLFRAQLISRKTLDELSQGTTTVKEVAEMDSVKRSLEGGNFIAGVLIQGTQERMSIPEALRRHILRPGTALVLLEAQAATGFIIDPAENRKLTVEEAFKAGMFGKETYVKLLSAERAVTGYTDPYTGQQISLFQAMQKDLIVREHGIRLLEAQIATGGIIDPVHSHRVPVDVAYRCGYFDEEMNRILADPSDDTKGFFDPNTHENLTYLQLLERCVEDPETGLYLLQIIKKGENYVYINEATRHVLQSRTAKMRVGRFADQVVSFWDLLSSPYFTEDRKRELIQEYGAQSGGLEKLLEIITTTIEETETQNQGIKVAAIRGEVTAADLFNSRVIDQKTLHTLRVGRTGGQALSTLECVKPYLEGSDCIAGVTVPSTREVMSLHEASRKELIPAAFATWLLEAQAATGFLLDPCTRQKLSVDEAVDVGLVNEELRERLLKAERAATGYRDPATGDTIPLFQAMQKQLIEKAEALRLLEVQVATGGVIDPQHHHRLPLETAYRRGCLHKDIYALISDQKHMRKRFVDPNTQEKVSYRELQERCRPQEDTGWVLFPVNKAARDSEHIDDETRRALEAEQVEITVGRFRGQKPTLWALLNSEYVTEEKKLQLVRMYRTHTRRALQTVAQLILELIEKQETSNKHLWFQGIRRQITASELLSSAIITEEMLQDLETGRSTTQELMEDDRVKRYLEGTSCIAGVLVPAKDQPGRQEKMSIYQAMWKGVLRPGTALVLLEAQAATGFVIDPVRNLRLSVEEPVPAGVVGSEIQEKLLSAERAVTGYTDPYTGQQISLFQAMQKDLIVREHGIRLLEAQIATGGVIDPVHSHRVPVDVAYRRGYFDEEMNRVLADPSDDTKGFFDPNTHENLTYVQLLRRCVPDPDTGLYMLQLAGRGSAVHQLSEELRCALRDARVTPGSGALQGQSVSVWELLFYREVSEDRRQDLLSRYRAGTLTVEELGATLTSLLAQAQAQARAEAEAGSPRPDPREALRAATMEVKVGRLRGRAVPVWDVLASGYVSRAAREELLAEFGSGTLDLPALTRRLTAIIEEAEEAPGARPQLQDARRGPREPGPAGRGDGDSGRSQREGQGEGETQEAAAAAAAARRQEQTLRDATMEVQRGQFQGRPVSVWDVLFSSYLSEARRDELLAQHAAGALGLPDLVAVLTRVIEETEERLSKVSFRGLRRQVSASELHTSGILGPETLRDLAQGTKTLQEVTEMDSVKRYLEGTSCIAGVLVPAKDQPGRQEKMSIYQAMWKGVLRPGTALVLLEAQAATGFVIDPVRNLRLSVEEAVAAGVVGGEIQEKLLSAERAVTGYTDPYTGQQISLFQAMQKDLIVREHGIRLLEAQIATGGVIDPVHSHRVPVDVAYRRGYFDEEMNRVLADPSDDTKGFFDPNTHENLTYVQLLRRCVPDPDTGLYMLQLAGRGSAVHQLSEELRCALRDARVTPGSGALQGQSVSVWELLFYREVSEDRRQDLLSRYRAGTLTVEELGATLTSLLAQAQAQARAEAEAGSPRPDPREALRAATMEVKVGRLRGRAVPVWDVLASGYVSGAAREELLAEFGSGTLDLPALTRRLTAIIEEAEEAPGARPQLQDAWRGPREPGPAGRGDGDSGRSQREGQGEGETQEAAAAAAAARRQEQTLRDATMEVQRGQFQGRPVSVWDVLFSSYLSEARRDELLAQHAAGALGLPDLVAVLTRVIEETEERLSKVSFRGLRRQVSASELHTSGILGPETLRDLAQGTKTLQEVTEMDSVKRYLEGTSCIAGVLVPAKDQPGRQEKMSIYQAMWKGVLRPGTALVLLEAQAATGFVIDPVRNLRLSVEEAVAAGVVGGEIQEKLLSAERAVTGYTDPYTGQQISLFQAMQKDLIVREHGIRLLEAQIATGGVIDPVHSHRVPVDVAYRRGYFDEEMNRVLADPSDDTKGFFDPNTHENLTYVQLLRRCVPDPDTGLYMLQLAGRGSAVHQLSEELRCALRDARVTPGSGALQGQSVSVWELLFYREVSEDRRQDLLSRYRAGTLTVEELGATLTSLLAQAQAQARAEAEAGSPRPDPREALRAATMEVKVGRLRGRAVPVWDVLASGYVSGAAREELLAEFGSGTLDLPALTRRLTAIIEEAEEAPGARPQLQDAWRGPREPGPAGRGDGDSGRSQREGQGEGETQEAAAAAAAARRQEQTLRDATMEVQRGQFQGRPVSVWDVLFSSYLSEARRDELLAQHAAGALGLPDLVAVLTRVIEETEERLSKVSFRGLRRQVSASELHTSGILGPETLRDLAQGTKTLQEVTEMDSVKRYLEGTSCIAGVLVPAKDQPGRQEKMSIYQAMWKGVLRPGTALVLLEAQAATGFVIDPVRNLRLSVEEAVAAGVVGGEIQEKLLSAERAVTGYTDPYTGQQISLFQAMQKDLIVREHGIRLLEAQIATGGVIDPVHSHRVPVDVAYRRGYFDEEMNRVLADPSDDTKGFFDPNTHENLTYVQLLRRCVPDPDTGLYMLQLAGRGSAVHQLSEELRCALRDARVTPGSGALQGQSVSVWELLFYREVSEDRRQDLLSRYRASTLTVEELGATLTSLLAQAQAQARAEAEAGSPRPDPREALRAATMEVKVGRLRGRAVPVWDVLASGYVSRAAREELLAEFGSGTLDLPALTRRLTAIIEEAEEAPGARPQLQDAWRGPREPGPAGRGDGDSGRSQREGQGEGETQEAAAATAAARRQEQTLRDATMEVQRGQFQGRPVSVWDVLFSSYLSEARRDELLAQHAAGALGLPDLVAVLTRVIEETEERLSKVSFRGLRRQVSASELHTSGILGPETLRDLAQGTKTLQEVTEMDSVKRYLEGTSCIAGVLVPAKDQPGRQEKMSIYQAMWKGVLRPGTALVLLEAQAATGFVIDPVRNLRLSVEEAVAAGVVGGEIQEKLLSAERAVTGYTDPYTGQQISLFQAMQKDLIVREHGIRLLEAQIATGGVIDPVHSHRVPVDVAYRRGYFDEEMNRVLADPSDDTKGFFDPNTHENLTYVQLLRRCVPDPDTGLYMLQLAGRGSAVHQLSEELRCALRDARVTPGSGALQGQSVSVWELLFYREVSEDRRQDLLSRYRAGTLTVEELGATLTSLLAQAQAQARAEAEAGSPRPDPREALRAATMEVKVGRLRGRAVPVWDVLASGYVSGAAREELLAEFGSGTLDLPALTRRLTAIIEEAEEAPGARPQLQDAWRGPREPGPAGRGDGDSGRSQREGQGEGETQEAAAAAAAARRQEQTLRDATMEVQRGQFQGRPVSVWDVLFSSYLSEARRDELLAQHAAGALGLPDLVAVLTRVIEETEERLSKVSFRGLRRQVSASELHTSGILGPETLRDLAQGTKTLQEVTEMDSVKRYLEGTSCIAGVLVPAKDQPGRQEKMSIYQAMWKGVLRPGTALVLLEAQAATGFVIDPVRNLRLSVEEAVAAGVVGGEIQEKLLSAERAVTGYTDPYTGQQISLFQAMQKDLIVREHGIRLLEAQIATGGVIDPVHSHRVPVDVAYRRGYFDEEMNRVLADPSDDTKGFFDPNTHENLTYLQLLQRATLDPETGLLFLSLSLQ

SEQ ID NO: 719 - protein, 2951 aa, Homo sapiens [sequence omitted]

SEQ ID NO: 720 - protein, 2395 aa, Homo sapiens
MAATLGAGTPPRPQARSIAGVYVEASGQAQSVYAAMEQGLLPAGLGQALLEAQAATGGLVDLARGQLLPVSKALQQGLVGLELKEKLLAAERATTGYPDPYGGEKLALFQAIGKEVVDRALGQSWLEVQLATGGLVDPAQGVLVAPEPACHQGLLDRETWHKLSELEPGTGDLRFLDPNTLERLTYHQLLERCVRAPGSGLALLPLKITFRSMGGAVSAAELLEVGILDEQAVQGLREGRLAAVDVSARAEVRRYLEGTGSVAGVVLLPEGHKKSFFQAATEHLLPMGTALPLLEAQAATHTLVDPITGQRLWVDEAVRAGLVSPELHEQLLVAEQAVTGHHDPFSGSQIPLFQAMKKGLVDRPLALRLLDAQLATGGLVCPARRLRLPLEAALRCGCLDEDTQRQLSQAGSFSDGTHGGLRYEQLLALCVTDPETGLAFLPLSGGPRGGEPQGPPFIKYSTRQALSTATATVSVGKFRGRPVSLWELLFSEAISSEQRAMLAQQYQEGTLSVEKLAAKLSATLEQAAATARVTFSGLRDTVTPGELLKAEIIDQDLYERLEHGQATAKDVGSLASVQRYLQGTGCIAGLLLPGSQERLSIYEARCKGLLRPGTALILLEAQAATGFIIDPKANKGHSVEEALRAAVIGPDVFAKLLSAERAVTGYTDPYTGQQISLFQAMQKGLIVREHGIRLLEAQIATGGVIDPVHSHRVPVDVAYRRGYFDQMLNLILLDPSDDTKGFFDPNTHENLTYLQLLERCVRDPETGLYLLPLSSTQSPLVDSATQQAFQNLLLSVKYGRFQGQRVSAWELINSEYFSEGRRRQLLRRYRQREVTLGQVAKLLEAETQRQADIMLPALRSRVTVHQLLEAGIIDQQLLDQVLAGTISPEALLLMDGVRRYLCGLGAVGGVRLLPSGQRLSLYQAMRQKLLGPRVALALLEAQAATGTIMDPHSPESLSVDEAVRRGVVGPELYGRLKRAEGAIAGFRDPFSGKQVSVFQAMKKGLIPWEQAARLLEAQVATGGIIDPTSHHHLPMPVAIQRGYVDQEMETALSSSSETFPTPDGQGRTSYAQLLEECPRDETSGLHLLPLPESAPALPTEEQVQRSLQAVPGAKDGTSLWDLLSSCHFTEEQRRGLLEDVQEGRTTVPQLLASVQRWVQETKLLAQARVMVPGPRGEVPAVWLLDAGIITQETLEALAQGTQSPAQVAEQPAVKACLWGTGCVAGVLLQPSGAKASIAQAVRDGLLPTGLGQRLLEAQVASGFLVDPLNNQRLSVEDAVKVGLVGRELSEQLGQAERAAAGYPDPYSRASLSLWQAMEKGLVPQNEGLPLLQVQLATGGVVDPVHGVHLPQAAACRLGLLDTQTSQVLTAVDKDNKFFFDPSARDQVTYQQLRERCVCDSETGLLLLPLPSDTVLEVDDHTAVALRAMKVPVSTGRFKGCSVSLWDLLLSEYVGADKRRELVALCRSGRAAALRQVVSAVTTLVEAAERQPLQATFRGLRKQVSARDLFRAQLISRKTLDELSQGTTTVKEVAEMDSVKRSLEGGNFIAGVLIQGTQERMSIPEALRRHILRPGTALVLLEAQAATGFIIDPVENRKLTVEEAFKAGMFGKETYVKLLSAERAVTGYTDPYTGQQISLFQAMQKDLIVREHGIRLLEAQIATGGIIDPVHSHRVPVDVAYRCGYFDEEMNRILADPSDDTKGFFDPNTHENLTYLQLLERCVEDPETGLYLLQIIKKGENYVYINEATRHVLQSRTAKMRVGRFADQVVSFWDLLSSPYFTEDRKRELIQEYGAQSGGLEKLLEIITTTIEETETQNQGIKVAAIRGEVTAADLFNSRVIDQKTLHTLRVGRTGGQALSTLECVKPYLEGSGCIAGVTVPSTREVMSLHEASRKELIPAAFATWLLEAQAATGFLLDPCTRQKLSVDEAVDVGLVNEELRERLLKAERAATGYRDPATGDTIPLFQAMQKQLIEKAEALRLLEVQVATGGVIDPQHHHRLPLETAYRRGCLHKDIYALISDQKHMRKRFVDPNTQEKVSYRELQERCRPQEDTGWLLFPVNKAARDSEHIDDETRRALEAEQVEITVGRFRGQKPTLWALLNSEYVTEEKKLQLVRMYRTHTRRALQTVAQLILELIEKQETSNKHLWFQGIRRQITASELLSSAIITEEMLQDLETGRSTTQELMEDDRVKRYLEGTSCIAGVLVPAKDQPGRQEKMSIYQAMWKGVLRPGTALVLLEAQAATGFVIDPVRNLRLSVEEAVAAGVVGGEIQEKLLSAERAVTGYTDPYTGQQISLFQAMQKDLIVREHGIRLLEAQIATGGVIDPVHSHRVPVDVAYRRGYFDEEMNRVLADPSDDTKGFFDPNTHENLTYLQLLQRATLDPETGLLFLSLSLQ

SEQ ID NO: 721 - protein, 439 aa, Homo sapiens
MEPSTAARAWALFWLLLPLLGAVCASGPRTLVLLDNLNVRETHSLFFRSLKDRGFELTFKTADDPSLSLIKYGEFLYDNLIIFSPSVEDFGGNINVETISAFIDGGGSVLVAASSDIGDPLRELGSECGIEFDEEKTAVIDHHNYDISDLGQHTLIVADTENLLKAPTIVGKSSLNPILFRGVGMVADPDNPLVLDILTGSSTSYSFFPDKPITQYPHAVGKNTLLIAGLQARNNARVIFSGSLDFFSDSFFNSAVQKAAPGSQRYSQTGNYELAVALSRWVFKEEGVLRVGPVSHHRVGETAPPNAYTVTDLVEYSIVIQQLSNGKWVPFDGDDIQLEFVRIDPFVRTFLKKKGGKYSVQFKLPDVYGVFQFKVDYNRLGYTHLYSSTQVSVRPLQHTQYERFIPSAYPYYASAFPMMLGLFIFSIVFLHMKEKEKSD

SEQ ID NO: 722 - protein, 456 aa, Homo sapiens
MGYFRCAGAGSFGRRRKMEPSTAARAWALFWLLLPLLGAVCASGPRTLVLLDNLNVRETHSLFFRSLKDRGFELTFKTADDPSLSLIKYGEFLYDNLIIFSPSVEDFGGNINVETISAFIDGGGSVLVAASSDIGDPLRELGSECGIEFDEEKTAVIDHHNYDISDLGQHTLIVADTENLLKAPTIVGKSSLNPILFRGVGMVADPDNPLVLDILTGSSTSYSFFPDKPITQYPHAVGKNTLLIAGLQARNNARVIFSGSLDFFSDSFFNSAVQKAAPGSQRYSQTGNYELAVALSRWVFKEEGVLRVGPVSHHRVGETAPPNAYTVTDLVEYSIVIQQLSNGKWVPFDGDDIQLEFVRIDPFVRTFLKKKGGKYSVQFKLPDVYGVFQFKVDYNRLGYTHLYSSTQVSVRPLQHTQYERFIPSAYPYYASAFSMMLGLFIFSIVFLHMKEKEKSD

SEQ ID NO: 723 - protein, 456 aa, Homo sapiens; identical to SEQ ID NO: 722

SEQ ID NO: 724 - protein, 456 aa, Homo sapiens
MGYFRCAGAGSFGRRRKMEPSTAARAWALFWLLLPLLGAVCASGPRTLVLLDNLNVRETHSLFFRSLKDRGFELTFKTADDPSLSLIKYGEFLYDNLIIFSPSVEDFGGNINVETISAFIDGGGSVLVAASSDIGDPLRELGSECGIEFDEEKTAVIDHHNYDISDLGQHTLIVADTENLLKAPTIVGKSSLNPILFRGVGMVADPDNPLVLDILTGSSTSYSFFPDKPITQYPHAVGKNTLLIAGLQARNNARVIFSGSLDFFSDSFFNSAVQKAAPGSQRYSQTGNYELAVALSRWVFKEEGVLRVGPVSHHRVGETAPPNAYTVTDLVEYSIVIQQLSNGKWVPFDGDDIQLEFVRIDPFVRTFLKKKGGKYSVQFKLPDVYGVFQFKVDYNRLGYTHLYSSTQVSVRPLQHTQYERFIPSAYPYYASAFPMMLGLFIFSIVFLHMKEKEKSD

SEQ ID NO: 725 - protein, 219 aa, Homo sapiens
MGYFRCAGAGSFGRRRKMEPSTAARAWALFWLLLPLLGAVCASGPRTLVLLDNLNVRETHSLFFRSLKDRGFELTFKTADDPSLSLIKYGEFLYDNLIIFSPSVEDFGGNINVETISAFIDGGGSVLVAASSDIGDPLRELGSECGIEFDEEKTAVIDHHNYDISDLGQHTLIVADTENLLKAPTIVGKSSLNPIPSPHSVETGQGGGLLGLVVLFCFV

SEQ ID NO: 726 - protein, 264 aa, Homo sapiens
MKYLLPTAAAGLLLLAAQPAMASSELTQDPAVSVASGQTVRITCQGDSLRHYYPSWYQQKPRQAPVLVFFGENNRPSGIPDRFSGSASGNTASLTIAGAQAEDDADYYCSSRDGNDDRWLFGGGTKVTVLGQPKAAPSVTLFPPSSEELQANKATLVCLISDFYPGAVTVAWKADSSPVKAGVETTTPSKQSNNKYAASSYLSLTPEQWKSHRSYSCQVTHEGSTVEKTVAPTECSARQSTPFVCEYQGQSSDLPQPPVNAGGG

SEQ ID NO: 727 - protein, 418 aa, Homo sapiens [sequence omitted]

SEQ ID NO: 728 - protein, 418 aa, Homo sapiens [sequence omitted]

SEQ ID NO: 729 - protein, 340 aa, Homo sapiens
MVTLRKRTLKVLTFLVLFIFLTSFFLNYSHTMVATTWFPKQMVLELSENLKRLIKHRPCTCTHCIGQRKLSAWFDERFNQTMQPLLTAQNALLEDDTYRWWLRLQREKKPNNLNDTIKELFRVVPGNVDPMLEKRSVGCRRCAVVGNSGNLRESSYGPEIDSHDFVLRMNKAPTAGFEADVGTKTTHHLVYPESFRELGDNVSMILVPFKTIDLEWVVSAITTGTISHTYIPVPAKIRVKQDKILIYHPAFIKYVFDNWLQGHGRYPSTGILSVIFSMHVCDEVDLYGFGADSKGNWHHYWENNPSAGAFRKTGVHDADFESNVTATLASINKIRIFKGR

SEQ ID NO: 730 - protein, 340 aa, Homo sapiens; identical to SEQ ID NO: 729

SEQ ID NO: 731 - protein, 340 aa, Homo sapiens; identical to SEQ ID NO: 729

SEQ ID NO: 732 - protein, 340 aa, Homo sapiens; identical to SEQ ID NO: 729

SEQ ID NO: 733 - protein, 622 aa, Homo sapiens
MAAAPRAGRRRGQPLLALLLLLLAPLPPGAPPGADAYFPEERWSPESPLQAPRVLIALLARNAAHALPTTLGALERLRHPRERTALWVATDHNMDNTSTVLREWLVAVKSLYHSVEWRPAEEPRSYPDEEGPKHWSDSRYEHVMKLRQAALKSARDMWADYILFVDADNLILNPDTLSLLIAENKTVVAPMLDSRAAYSNFWCGMTSQGYYKRTPAYIPIRKRDRRGCFAVPMVHSTFLIDLRKAASRNLAFYPPHPDYTWSFDDIIVFAFSCKQAEVQMYVCNKEEYGFLPVPLRAHSTLQDEAESFMHVQLEVMVKHPPAEPSRFISAPTKTPDKMGFDEVFMINLRRRQDRRERMLRALQAQEIECRLVEAVDGKAMNTSQVEALGIQMLPGYRDPYHGRPLTKGELGCFLSHYNIWKEVVDRGLQKSLVFEDDLRFEIFFKRRLMNLMRDVEREGLDWDLIYVGRKRMQVEHPEKAVPRVRNLVEADYSYWTLAYVISLQGARKLLAAEPLSKMLPVDEFLPVMFDKHPVSEYKAHFSLRNLHAFSVEPLLIYPTHYTGDDGYVSDTETSVVWNNEHVKTDWDRAKSQKMREQQALSREAKNSDVLQSPLDSAARDEL

SEQ ID NO: 734 - protein, 645 aa, Homo sapiens [sequence omitted]

SEQ ID NO: 735 - protein, 565 aa, Homo sapiens
MAAAPRAGRRRGQPLLALLLLLLAPLPPGAPPGADAYFPEERWSPESPLQAPRVLIALLARNAAHALPTTLGALERLRHPRERTALWVATDHNMDNTSTVLREWLVAVKSLYHSVEWRPAEEPRSYPDEEGPKHWSDSRYEHVMKLRQAALKSARDMWADYILFVDADNLILNPDTLSLLIAENKTVVAPMLDSRAAYSNFWCGMTSQGYYKRTPAYIPIRKRDRRGCFAVPMVHSTFLIDLRKAASRNLAFYPPHPDYTWSFDDIIVFAFSCKQAEVQMYVCNKEEYGFLPVPLRAHSTLQDEAESFMHVQLEVMVKHPPAEPSRFISAPTKTPDKMGFDEVFMINLRRRQDRRERMLRALQAQEIECRLVEAVDGKAMNTSQVEALGIQMLPGYRDPYHGRPLTKGELGCFLSHYNIWKEVVDRGLQKSLVFEDDLRFEIFFKRRLMNLMRDVEREGLDWDLIYVGRKRMQVEHPEKAVPRVRNLVEADYSYWTLAYVISLQGARKLLAAEPLSKMLPVDEFLPVMFDKHPVTRPTSPSATCMPSLWSRCSSTPHTTQETMAM

SEQ ID NO: 736 - protein, 466 aa, Homo sapiens
MRAPGMRSRPAGPALLLLLLFLGAAESVRRAQPPRRYTPDWPSLDSRPLPAWFDEAKFGVFIHWGVFSVPAWGSEWFWWHWQGEGRPQYQRFMRDNYPPGFSYADFGPQFTARFFHPEEWADLFQAAGAKYVVLTTKHHEGFTNWPSPVSWNWNSKDVGPHRDLVGELGTALRKRNIRYGLYHSLLEWFHPLYLLDKKNGFKTQHFVSAKTMPELYDLVNSYKPDLIWSDGEWECPDTYWNSTNFLSWLYNDSPVKDEVVVNDRWGQNCSCHHGGYYNCEDKFKPQSLPDHKWEMCTSIDKFSWGYRRDMALSDVTEESEIISELVQTVSLGGNYLLNIGPTKDGLIVPIFQERLLAVGKWLSINGEAIYASKPWRVQWEKNTTSVWYTSKGSAVYAIFLHWPENGVLNLESPITTSTTKITMLGIQGDLKWSTDPDKGLFISLPQLPPSAVPAEFAWTIKLTGVK

SEQ ID NO: 737 - protein, 461 aa, Homo sapiens [sequence omitted]

SEQ ID NO: 738 - protein, 687 aa, Homo sapiens
MTPQSLLQTTLFLLSLLFLVQGAHGRGHREDFRFCSQRNQTHRSSLHYKPTPDLRISIENSEEALTVHAPFPAAHPASRSFPDPRGLYHFCLYWNRHAGRLHLLYGKRDFLLSDKASSLLCFQHQEESLAQGPPLLATSVTSWWSPQNISLPSAASFTFSFHSPPHTAAHNASVDMCELKRDLQLLSQFLKHPQKASRRPSAAPASQQLQSLESKLTSVRFMGDMVSFEEDRINATVWKLQPTAGLQDLHIHSRQEEEQSEIMEYSVLLPRTLFQRTKGRSGEAEKRLLLVDFSSQALFQDKNSSQVLGEKVLGIVVQNTKVANLTEPVVLTFQHQLQPKNVTLQCVFWVEDPTLSSPGHWSSAGCETVRRETQTSCFCNHLTYFAVLMVSSVEVDAVHKHYLSLLSYVGCVVSALACLVTIAAYLCSRRKPRDYTIKVHMNLLLAVFLLDTSFLLSEPVALTGSEAGCRASAIFLHFSLLTCLSWMGLEGYNLYRLVVEVFGTYVPGYLLKLSAMGWGFPIFLVTLVALVDVDNYGPIILAVHRTPEGVIYPSMCWIRDSLVSYITNLGLFSLVFLFNMAMLATMVVQILRLRPHTQKWSHVLTLLGLSLVLGLPWALIFFSFASGTFQLVVLYLFSIITSFQGFLIFIWYWSMRLQARGGPSPLKSNSDSARLPISSGSTSSSRI

SEQ ID NO: 739 - protein, 693 aa, Homo sapiens
MTPQSLLQTTLFLLSLLFLVQGAHGRGHREDFRFCSQRNQTHRSSLHYKPTPDLRISIENSEEALTVHAPFPAAHPASRSFPDPRGLYHFCLYWNRHAGRLHLLYGKRDFLLSDKASSLLCFQHQEESLAQGPPLLATSVTSWWSPQNISLPSAASFTFSFHSPPHTAAHNASVDMCELKRDLQLLSQFLKHPQKASRRPSAAPASQQLQSLESKLTSVRFMGDMVSFEEDRINATVWKLQPTAGLQDLHIHSRQEEEQSEIMEYSVLLPRTLFQRTKGRSGEAEKRLLLVDFSSQALFQDKNSSQVLGEKVLGIVVQNTKVANLTEPVVLTFQHQLQPKNVTLQCVFWVEDPTLSSPGHWSSAGCETVRRETQTSCFCNHLTYFAVLMVSSVEVDAVHKHYLSLLSYVGCVVSALACLVTIAAYLCSRVPLPCRRKPRDYTIKVHMNLLLAVFLLDTSFLLSEPVALTGSEAGCRASAIFLHFSLLTCLSWMGLEGYNLYRLVVEVFGTYVPGYLLKLSAMGWGFPIFLVTLVALVDVDNYGPIILAVHRTPEGVIYPSMCWIRDSLVSYITNLGLFSLVFLFNMAMLATMVVQILRLRPHTQKWSHVLTLLGLSLVLGLPWALIFFSFASGTFQLVVLYLFSIITSFQGFLIFIWYWSMRLQARGGPSPLKSNSDSARLPISSGSTSSSRI

SEQ ID NO: 740 - protein, 693 aa, Homo sapiens; identical to SEQ ID NO: 739

SEQ ID NO: 741 - protein, 687 aa, Homo sapiens; identical to SEQ ID NO: 738

SEQ ID NO: 742 - protein, 693 aa, Homo sapiens; identical to SEQ ID NO: 739

SEQ ID NO: 743 - protein, 693 aa, Homo sapiens; identical to SEQ ID NO: 739

SEQ ID NO: 744 - protein, 693 aa, Homo sapiens; identical to SEQ ID NO: 739

SEQ ID NO: 745 - protein, 693 aa, Homo sapiens; identical to SEQ ID NO: 739

SEQ ID NO: 746 - protein, 693 aa, Homo sapiens; identical to SEQ ID NO: 739

SEQ ID NO: 747 - protein, 1023 aa, Homo sapiens
MGKGVGRDKYEPAAVSEQGDKKGKKGKKDRDMDELKKEVSMDDHKLSLDELHRKYGTDLSRGLTSARAAEILARDGPNALTPPPTTPEWIKFCRQLFGGFSMLLWIGAILCFLAYSIQAATEEEPQNDNLYLGVVLSAVVIITGCFSYYQEAKSSKIMESFKNMVPQQALVIRNGEKMSINAEEVVVGDLVEVKGGDRIPADLRIISANGCKVDNSSLTGESEPQTRSPDFTNENPLETRNIAFFSTNCVEGTARGIVVYTGDRTVMGRIATLASGLEGGQTPIAAEIEHFIHIITGVAVFLGVSFFILSLILEYTWLEAVIFLIGIIVANVPEGLLATVTVCLTLTAKRMARKNCLVKNLEAVETLGSTSTICSDKTGTLTQNRMTVAHMWFDNQIHEADTTENQSGVSFDKTSATWLALSRIAGLCNRAVFQANQENLPILKRAVAGDASESALLKCIELCCGSVKEMRERYAKIVEIPFNSTNKYQLSIHKNPNTSEPQHLLVMKGAPERILDRCSSILLHGKEQPLDEELKDAFQNAYLELGGLGERVLGFCHLFLPDEQFPEGFQFDTDDVNFPIDNLCFVGLISMIDPPRAAVPDAVGKCRSAGIKVIMVTGDHPITAKAIAKGVGIISEGNETVEDIAARLNIPVSQVNPRDAKACVVHGSDLKDMTSEQLDDILKYHTEIVFARTSPQQKLIIVEGCQRQGAIVAVTGDGVNDSPALKKADIGVAMGIAGSDVSKQAADMILLDDNFASIVTGVEEGRLIFDNLKKSIAYTLTSNIPEITPFLIFIIANIPLPLGTVTILCIDLGTDMVPAISLAYEQAESDIMKRQPRNPKTDKLVNERLISMAYGQIGMIQALGGFFTYFVILAENGFLPIHLLGLRVDWDDRWINDVEDSYGQQWTYEQRKIVEFTCHTAFFVSIVVVQWADLVICKTRRNSVFQQGMKNKILIFGLFEETALAAFLSYCPGMGVALRMYPLKPTWWFCAFPYSLLIFVYDEVRKLIIRRRPGGWVEKETYY

SEQ ID NO: 748 - protein, 992 aa, Homo sapiens
MDELKKEVSMDDHKLSLDELHRKYGTDLSRGLTSARAAEILARDGPNALTPPPTTPEWIKFCRQLFGGFSMLLWIGAILCFLAYSIQAATEEEPQNDNLYLGVVLSAVVIITGCFSYYQEAKSSKIMESFKNMVPQQALVIRNGEKMSINAEEVVVGDLVEVKGGDRIPADLRIISANGCKVDNSSLTGESEPQTRSPDFTNENPLETRNIAFFSTNCVEGTARGIVVYTGDRTVMGRIATLASGLEGGQTPIAAEIEHFIHIITGVAVFLGVSFFILSLILEYTWLEAVIFLIGIIVANVPEGLLATVTVCLTLTAKRMARKNCLVKNLEAVETLGSTSTICSDKTGTLTQNRMTVAHMWFDNQIHEADTTENQSGVSFDKTSATWLALSRIAGLCNRAVFQANQENLPILKRAVAGDASESALLKCIELCCGSVKEMRERYAKIVEIPFNSTNKYQLSIHKNPNTSEPQHLLVMKGAPERILDRCSSILLHGKEQPLDEELKDAFQNAYLELGGLGERVLGFCHLFLPDEQFPEGFQFDTDDVNFPIDNLCFVGLISMIDPPRAAVPDAVGKCRSAGIKVIMVTGDHPITAKAIAKGVGIISEGNETVEDIAARLNIPVSQVNPRDAKACVVHGSDLKDMTSEQLDDILKYHTEIVFARTSPQQKLIIVEGCQRQGAIVAVTGDGVNDSPALKKADIGVAMGIAGSDVSKQAADMILLDDNFASIVTGVEEGRLIFDNLKKSIAYTLTSNIPEITPFLIFIIANIPLPLGTVTILCIDLGTDMVPAISLAYEQAESDIMKRQPRNPKTDKLVNERLISMAYGQIGMIQALGGFFTYFVILAENGFLPIHLLGLRVDWDDRWINDVEDSYGQQWTYEQRKIVEFTCHTAFFVSIVVVQWADLVICKTRRNSVFQQGMKNKILIFGLFEETALAAFLSYCPGMGVALRMYPLKPTWWFCAFPYSLLIFVYDEVRKLIIRRRPGGWVEKETYY

SEQ ID NO: 749 - protein, 470 aa, Homo sapiens
MGKGVGRDKYEPAAVSEQGDKKGKKGKKDRDMDELKKEVSMDDHKLSLDELHRKYGTDLSRGLTSARAAEILARDGPNALTPPPTTPEWIKFCRQLFGGFSMLLWIGAILCFLAYSIQAATEEEPQNDNLYLGVVLSAVVIITGCFSYYQEAKSSKIMESFKNMVPQQALVIRNGEKMSINAEEVVVGDLVEVKGGDRIPADLRIISANGCKVDNSSLTGESEPQTRSPDFTNENPLETRNIAFFSTNCVEGTARGIVVYTGDRTVMGRIATLASGLEGGQTPIAAEIEHFIHIITGVAVFLGVSFFILSLILEYTWLEAVIFLIGIIVANVPEGLLATVTVCLTLTAKRMARKNCLVKNLEAVETLGSTSTICSDKTGTLTQNRMTVAHMWFDNQIHEADTTENQSGVSFDKTSATWLALSRIAGLCNRAVFQANQENLPSLLIFVYDEVRKLIIRRRPGGWVEKETYY

SEQ ID NO: 750 - protein, 729 aa, Homo sapiens
MGKGVGRDKYEPAAVSEQGDKKGKKGKKDRDMDELKKEVSMDDHKLSLDELHRKYGTDLSRGLTSARAAEILARDGPNALTPPPTTPEWIKFCRQLFGGFSMLLWIGAILCFLAYSIQAATEEEPQNDNLYLGVVLSAVVIITGCFSYYQEAKSSKIMESFKNMVPQQALVIRNGEKMSINAEEVVVGDLVEVKGGDRIPADLRIISANGCKVDNSSLTGESEPQTRSPDFTNENPLETRNIAFFSTNCVEGTARGIVVYTGDRTVMGRIATLASGLEGGQTPIAAEIEHFIHIITGVAVFLGVSFFILSLILEYTWLEAVIFLIGIIVANVPEGLLATVTVCLTLTAKRMARKNCLVKNLEAVETLGSTSTICSDKTGTLTQNRMTVAHMWFDNQIHEADTTENQSGVSFDKTSATWLALSRIAGLCNRAVFQANQENLPILKRAVAGDASESALLKCIELCCGSVKEMRERYAKIVEIPFNSTNKYQLSIHKNPNTSEPQHLLVMKGAPERILDRCSSILLHGKEQPLDEELKDAFQNAYLELGGLGERVLGFCHLFLPDEQFPEGFQFDTDDVNFPIDNLCFVGLISMIDPPRAAVPDAVGKCRSAGIKTYEQRKIVEFTCHTAFFVSIVVVQWADLVICKTRRNSVFQQGMKNKILIFGLFEETALAAFLSYCPGMGVALRMYPLKPTWWFCAFPYSLLIFVYDEVRKLIIRRRPGGWVEKETYY

SEQ ID NO: 751 - protein, 681 aa, Homo sapiens
MGKGVGRDKYEPAAVSEQGDKKGKKGKKDRDMDELKKEVSMDDHKLSLDELHRKYGTDLSRGLTSARAAEILARDGPNALTPPPTTPEWIKFCRQLFGGFSMLLWIGAILCFLAYSIQAATEEEPQNDNLYLGVVLSAVVIITGCFSYYQEAKSSKIMESFKNMVPQQALVIRNGEKMSINAEEVVVGDLVEVKGGDRIPADLRIISANGCKVDNSSLTGESEPQTRSPDFTNENPLETRNIAFFSTNCVEGTARGIVVYTGDRTVMGRIATLASGLEGGQTPIAAEIEHFIHIITGVAVFLGVSFFILSLILEYTWLEAVIFLIGIIVANVPEGLLATVTVCLTLTAKRMARKNCLVKNLEAVETLGSTSTICSDKTGTLTQNRMTVAHMWFDNQIHEADTTENQSGVSFDKTSATWLALSRIAGLCNRAVFQANQENLPILKRAVAGDASESALLKCIELCCGSVKEMRERYAKIVEIPFNSTNKYQLSIHKNPNTSEPQHLLVMKGAPERILDRCSSILLHGKEQPLDEELKDAFQNAYLELGGLGERVLGFCHLFLPDEQFPEGFQFDTDDVNFPIDNLCFVGLISMIDPPRAAVPDAVGKCRSAGIKVIMVTGDHPITAKAIAKGVGIISEGNGPMSRGKSWSSPATQPSSSVSWWCSGPTWSSVRPGGIRSSSRG

SEQ ID NO: 752 - protein, 757 aa, Homo sapiens
MGKGVGRDKYEPAAVSEQGDKKGKKGKKDRDMDELKKEVSMDDHKLSLDELHRKYGTDLSRGLTSARAAEILARDGPNALTPPPTTPEWIKFCRQLFGGFSMLLWIGAILCFLAYSIQAATEEEPQNDNLYLGVVLSAVVIITGCFSYYQEAKSSKIMESFKNMVPQQALVIRNGEKMSINAEEVVVGDLVEVKGGDRIPADLRIISANGCKVDNSSLTGESEPQTRSPDFTNENPLETRNIAFFSTNCVEGTARGIVVYTGDRTVMGRIATLASGLEGGQTPIAAEIEHFIHIITGVAVFLGVSFFILSLILEYTWLEAVIFLIGIIVANVPEGLLATVTVCLTLTAKRMARKNCLVKNLEAVETLGSTSTICSDKTGTLTQNRMTVAHMWFDNQIHEADTTENQSGVSFDKTSATWLALSRIAGLCNRAVFQANQENLPILKRAVAGDASESALLKCIELCCGSVKEMRERYAKIVEIPFNSTNKYQLSIHKNPNTSEPQHLLVMKGAPERILDRCSSILLHGKEQPLDEELKDAFQNAYLELGGLGERVLGFCHLFLPDEQFPEGFQFDTDDVNFPIDNLCFVGLISMIDPPRAAVPDAVGKCRSAGIKVIMVTGDHPITAKAIAKGVGIISEGNETTYEQRKIVEFTCHTAFFVSIVVVQWADLVICKTRRNSVFQQGMKNKILIFGLFEETALAAFLSYCPGMGVALRMYPLKPTWWFCAFPYSLLIFVYDEVRKLIIRRRPGGWVEKETYY

SEQ ID NO: 753 - protein, 1023 aa, Homo sapiens; identical to SEQ ID NO: 747

SEQ ID NO: 754 - protein, 454 aa, Homo sapiens
MASKCSSERKSHTSLTLNQKLEMIKLSEEGMSKAEIGQKLGLLCQTVSQVVNAKEKFLKEIKSATPVNTRMIRKQNSLIADMEKVLVVWIEDQTSHNIPLSQSLIQSKALTLFNSMKAERGEEAAEEKLEASRGWFMRFKERSHLHNIKVQGEAASADVEAAASYPEDLAKIIDEGGYTKQQIFNVDETAFYWKKMPSRTFIAREEKSMPGFKASKDRLTLLLGANAAGDFKLKPMLIYHSENPRALKNYAKSTLPVLYKWNNKAWMTAHLFTAWFTEYFKPTVETYCSEKKIPFKILLLIDNAPGHPRALMEMYKEINVVFMPANTTSILQPMDQGVILTFKSYYLRNTFCKAIAAIDSDSSDGSGQSKLKTFWKGFTILDAIKNICDSWEEVKISTLTGVWKKLIPTLMDDFEGFKTSVEEVTADVVEIARELELEVEPEDVTELLQSHDKT

SEQ ID NO: 755 - protein, 4295 aa, Homo sapiens [sequence omitted]

SEQ ID NO: 756 - protein, 5703 aa, Homo sapiens
MGAPSACRTLVLALAAMLVVPQAETQGPVEPSWGNAGHTMDGGAPTSSPTRRVSFVPPVTVFPSLSPLNPAHNGRVCSTWGDFHYKTFDGDVFRFPGLCNYVFSEHCRAAYEDFNVQLRRGLVGSRPVVTRVVIKAQGLVLEASNGSVLINGQREELPYSRTGLLVEQSGDYIKVSIRLVLTFLWNGEDSALLELDPKYANQTCGLCGDFNGLPAFNEFYAHNARLTPLQFGNLQKLDGPTEQCPDPLPLPAGNCTDEEGICHRTLLGPAFAECHALVDSTAYLAACAQDLCRCPTCPCATFVEYSRQCAHAGGQPRNWRCPELCPRTCPLNMQHQECGSPCTDTCSNPQRAQLCEDHCVDGCFCPPGSTVLDDITHSGCLPLGQCPCTHGGRTYSPGTSFNTTCSSCTCSGGLWQCQDLPCPGTCSVQGGAHISTYDEKLYDLHGDCSYVLSKKCADSSFTVLAELRKCGLTDNENCLKAVTLSLDGGDTAIRVQADGGVFLNSIYTQLPLSAANITLFTPSSFFIVVQTGLGLQLLVQLVPLMQVFVRLDPAHQGQMCGLCGNFNQNQADDFTALSGVVEATGAAFANTWKAQAACANARNSFEDPCSLSVENENYARHWCSRLTDPNSAFSRCHSIINPKPFHSNCMFDTCNCERSEDCLCAALSSYVHACAAKGVQLSDWRDGVCTKYMQNCPKSQRYAYVVDACQPTCRGLSEADVTCSVSFVPVDGCTCPAGTFLNDAGACVPAQECPCYAHGTVLAPGEVVHDEGAVCSCTGGKLSCLGASLQKSTGCAAPMVYLDCSNSSAGTPGAECLRSCHTLDVGCFSTHCVSGCVCPPGLVSDGSGGCIAEEDCPCVHNEATYKPGETIRVDCNTCTCRNRRWECSHRLCLGTCVAYGDGHFITFDGDRYSFEGSCEYILAQDYCGDNTTHGTFRIVTENIPCGTTGTTCSKAIKLFVESYELILQEGTFKAVARGPGGDPPYKIRYMGIFLVIETHGMAVSWDRKTSVFIRLHQDYKGRVCGLCGNFDDNAINDFATRSRSVVGDALEFGNSWKLSPSCPDALAPKDPCTANPFRKSWAQKQCSILHGPTFAACRSQVDSTKYYEACVNDACACDSGGDCECFCTAVAAYAQACHDAGLCVSWRTPDTCPLFCDFYNPHGGCEWHYQPCGAPCLKTCRNPSGHCLVDLPGLEGCYPKCPPSQPFFNEDQMKCVAQCGCYDKDGNYYDVGARVPTAENCQSCNCTPSGIQCAHSLEACTCTYEDRTYSYQDVIYNTTDGLGACLIAICGSNGTIIRKAVACPGTPATTPFTFTTAWVPHSTTSPALPVSTVCVREVCRWSSWYNGHRPEPGLGGGDFETFENLRQRGYQVCPVLADIECRAAQLPDMPLEELGQQVDCDRMRGLMCANSQQSPPLCHDYELRVLCCEYVPCGPSPAPGTSPQPSLSASTEPAVPTPTQTTATEKTTLWVTPSIRSTAALTSQTGSSSGPVTVTPSAPGTTTCQPRCQWTEWFDEDYPKSEQLGGDVESYDKIRAAGGHLCQQPKDIECQAESFPNWTLAQVGQKVHCDVHFGLVCRNWEQEGVFKMCYNYRIRVLCCSDDHCRGRATTPPPTTELETATTTTTQALFSTPQPTSSPGLTRAPPASTTAVPTLSEGLTSPRYTSTLGTATTGGPRQSAGSTEPTVPGVATSTLPTRSALPGTTGSLGTWRPSQPPTLAPTTMATSRARPTGTASTASKEPLTTSLAPTLTSELSTSQAETSTPRTETTMSPLTNTTTSQGTTRCQPKCEWTEWFDVDFPTSGVASGDMETFENIRAAGGKMCWAPKSIECRAENYPEVSIDQVGQVLTCSLETGLTCKNEDQTGRFNMCFNYNVRVLCCDDYSHCPSTLATSSTATPSSTPGTTWILTKPTTTATTTASTGSTATASSTQATAGTPHVSTTATTPTVTSSKATPFSSPGTATALPALRSTATTPTATSFTAIPSSSLGTTWTRLSQTTTPMATMSTATPSSTPETVHTSTVLTTTATTTGATGSVATPSSTPGTAHTTKVLTTTTTGFTATPSSSPGRARTLPVWISTTTTPTTRGSTVTPSSIPGTTHTPTVLTTTTTTVATGSMATPSSSTQTSGTPPSLTTTATTITATGSTTNPSSTPGTTPIPPVLTTTATTPAATSSTVTPSSALGTTHTPPVPNTTATTHGRSLSPSSPHTVCTAWTSATSGILGTTHITEPSTGTSHTPAATTGTTQHSTPALSSPHPSSRTTESPPSPGTTTPGHTTATSRTTATATPSKTRTSTLLPSQPTSAPITTVVTMGCEPQCAWSEWLDYSYPMPGPSGGDFDTYSNIRAAGGAVCEQPLGLECRAQAQPGVPLRELGQVVECSLDFGLVCRNREQVGKFKMCFNYEIRVFCCNYGHCPSTPATSSTATPSSTPGTTWILTELTTTATTTESTGSTATPTSTLRTAPPPKVLTTTATTPTVTSSKATPSSSPGTATALPALRSTATTPTATSVTPIPSSSLGTTWTRLSQTTTPTATMSTATPSSTPETAHTSTVLTATATTTGATGSVATPSSTPGTAHTTKVPTTTTTGFTATPSSSPGTALTPPVWISTTTTPTTRGSTVTPSSIPGTTHTATVLTTTTTTVATGSMATPSSSTQTSGTPPSLTTTATTITATGSTTNPSSTPGTRPIPPVLTTTATTPAATSSTVTPSSALGTTHTPPVPNTTATTHGRSLSPSSPHTVRTAWTSATSGTLGTTHITEPSTGTSHTPAATTGTTQHSTPALSSPHPSSRTTESPPSPGTTTPGHTTATSRTTATATPSKTRTSTLLPSSPTSAPITTVVTMGCEPQCAWSEWLDYSYPMPGPSGGDFDTYSNIRAAGGAVCEQPLGLECRAQAQPGVPLRELGQVVECSLDFGLVCRNREQVGKFKMCFNYEIRVFCCNYGHCPSTPATSSTATPSSTPGTTWILTEQTTAATTTATTGSTAIPSSTPGTAPPPKVLTSQATTPTATSSKATSSSSPRTATTLPVLTSTATKSTATSFTPIPSSTLGTTGTSQNRPPHPMATMSTIHPSSTPETTHTSTVLTTKATTTRATSSMSTPSSTPGTTWILTELTTAATTTAALPHGTPSSTPGTTWILTEPSTTATVTVPTGSTATASSTRATAGTLKVLTSTATTPTVISSRATPSSSPGTATALPALRSTATTPTATSVTAIPSSSLGTAWTRLSQTTTPTATMSTATPSSTPETVHTSTVLTTTATTTRTGSVATPSSTPGTAHTTKVPTTTTTGFTATPSSSPGTALTPPVWISTTTTPTTRGSTVTPSSIPGTTHTATVLTTTTTTVATGSMATPSSSTQTSGTPPSLTTTATTITATGSTTNPSSTPGTTPIPPVLTTTATTPAATSSTVTPSSALGTTHTPPVPNTTATTHGRSLPPSSPHTVPTAWTSATSGILGTTHITEPSTGTSHTPAATTGTTQPSTPALSSPHPSSRTTESPPSPGTTTPGHTRGTSRTTATATPSKTRTSTLLPSSPTSAPITTVVTTGCEPQCAWSEWLDYSYPMPGPSGGDFDTYSNIRAAGGAVCEQPLGLECRAQAQPGVPLRELGQVVECSLDFGLVCRNREQVGKFKMCFNYEIRVFCCNYGHCPSTPATSSTATPSSTPGTTWILTKLTTTATTTESTGSTATPSSTQGPPAGTPHVSTTATTPTVTSSKATPFSSPGTATALPALRSTATTPTATSFTAIPSSSLGTTWTRLSQTTTPMATMSTATPSSTPETVHTSTVLTTTATTTGATGSVATPSSTPGTAHTTKVPTTTTTGFTVTPSSSPGTARTPPVWISTTTTPTTSGSTVTPSSIPGTTHTPTVLTTTTQPVATGSMATPSSSTQTSGTPPSLITTATTITATGSTTNPSSTPGTTPIPPELTTTATTPAATSSTVTPSSALGTTHTPPVPNTTATTHGRSLSPSSPHTVRTAWTSATSGTLGTTHITEPSTGTSHTPAATTGTTTTSTPALSSPHPSSRTTESPPSPGTTTPGHTTATSRTTATATPSKTRTSTLLPSQPTSAPITTVVTTGCEPQCAWSEWLDYSYPMPGPSGGDFDTYSNIRAAGGAVCEQPLGLECRAQAQPGVPLGELGQVVECSLDFGLVCRNREQVGKFKMCFNYEIRVFCCNYGHCPSTPATSSTAMPSSTPGTTWILTELTTTATTTASTGSTATPSSTPGTAPPPKVLTSPATTPTATSSKATSSSSPRTATTLPVLTSTATKSTATSVTPIPSSTLGTTGTLPEQTTTPVATMSTIHPSSTPETTHTSTVLTTKATTRATSSTSTPSSTPGTTWILTELTTAATTTAGTGPTATPSSTPGTTWILTELTTTATTTASTGSTATLSSTPGTTWILTEPSTTATVTVPTGSTATASSTQATAGTPHVSTTATTPTVTSSKATPSSSPGTATALPALRSTATTPTATSFTAIPSSSLGTTWTRLSQTTTPTATMSTATPSSTPETVHTSTVLTTTATTTGATGSVATPSSTPGTAHTTKVPTTTTTGFTATPSSSPGTALTPPVWISTTTTPTTTTPTTSGSTVTPSSIPGTTHTARVLTTTTTTVATGSMATPSSSTQTSGTPPSLTTTATTITATGSTTNPSSTPGTTPIPPVLTSMATTPAATSSKATSSSSPRTATTLPVLTSTATKSTATSFTPIPSSTLWTTWTVPAQTTTPMSTMSTIHTSSTPETTHTSTVLTTTATMTRATNSTATPSSTLGTTRILTELTTTATTTAATGSTATLSSTPGTTWILTEPSTIATVMVPTGSTATTSSTLGTAHTPKVVTAMATMPTATASTVPSSSTVGTTRTPAVLPSSLPTFSVSTVSSSVLTTLRPTGFPSSHFSTPCFCRAFGQFFSPGEVIYNKTDRAGCHFYAVCNQHCDIDRFQGACPTSPPPVSSAPLSSPSPAPGCDNAIPLRQVNETWTLENCTVARCVGDNRVVLLDPKPVANVTCVNKHLPIKVSDPSQPCDFHYECECICSMWGGSHYSTFDGTSYTFRGNCTYVLMREIHARFGNLSLYLDNHYCTASATAAAARCPRALSIHYKSMDIVLTVTMVHGKEEGLILFDQIPVSSGFSKNGVLVSVLGTTTMRVDIPALGVTVTFNGQVFQARLPYSLFHNNTEGQCGTCTNNQRDDCLQRDGTTAASCKDMAKTWLVPDSRKDGCWAPTGTPPTASPAAPVSSTPTPTPCPPQPLCDLMLSQVFAECHNLVPPGPFFNACISDHCRGRLEVPCQSLEAYAELCRARGVCSDWRGATGGLCDLTCPPTKVYKPCGPIQPATCNSRNQSPQLEGMAEGCFCPEDQILFNAHMGICVQACPCVGPDGFPKFPGERWVSNCQSCVCDEGSVSVQCKPLPCDAQGQPPPCNRPGFVTVTRPRAENPCCPETVCVCNTTTCPQSLPVCPPGQESICTQEEGDCCPTFRCRPQLCSYNGTFYGVGATFPGALPCHMCTCLSGDTQDPTVQCQEDACNNTTCPQGFEYKRVAGQCCGECVQTACLTPDGQPVQLNETWVNSHVDNCTVYLCEAEGGVHLLTPQPASCPDVSSCRGSLRKTGCCYSCEEDSCQVRINTTILWHQGCETEVNITFCEGSCPGASKYSAEAQAMQHQCTCCQERRVHEETVPLHCPNGSAILHTYTHVDECGCTPFCVPAPMAPPHTRGFPAQEATAV

SEQ ID NO: 757 - protein, 458 aa, Homo sapiens [sequence omitted]

SEQ ID NO: 758 - protein, 74 aa, Homo sapiens
PREKIRDVFFQEGCLTKSVSQQLIGQKVAHALAEGLGVIACIGEKLDEREAGITEKVVFEQTKVIAGISGERDL

SEQ ID NO: 759 - protein, 286 aa, Homo sapiens
MAEDGEEAEFHFAALYISGQWPRLRADTDLQRLGSSAMAPSRKFFVGGNWKMNGRKQSLGELIGTLNAAKVPADTEVVCAPPTAYIDFARQKLDPKIAVAAQNCYKVTNGAFTGEISPGMIKDCGATWVVLGHSERRHVFGESDELIGQKVAHALAEGLGVIACIGEKLDEREAGITEKVVFEQTKVIADNVKDWSKVVLAYEPVWAIGTGKTATPQQAQEVHEKLRGWLKSNVSDAVAQSTRIIYGGSVTGATCKELASQPDVDGFLVGGASLKPEFVDIINAKQ

SEQ ID NO: 760 - protein, 248 aa, Homo sapiens
APSRKFFVGGNWKMNGRKQSLGELIGTLNAAKVPADTEVVCAPPTAYIDFARQKLDPKIAVAAQNCYKVTNGAFTGEISPGMIKDCGATWVVLGHSERRHVFGESDELIGQKVAHALAEGLGVIACIGEKLDEREAGITEKVVFEQTKVIADNVKDWSKVVLAYEPVWAIGTGKTATPQQAQEVHEKLRGWLKSNVSDAVAQSTRIIYGGSVTGATCKELASQPDVDGFLVGGASLKPEFVDIINAKQ

SEQ ID NO: 761 - protein, 286 aa, Homo sapiens; identical to SEQ ID NO: 759

SEQ ID NO: 762 - protein, 74 aa, Homo sapiens
VSVFFGGLSIKKDEEVLKKNCPHVVVGTPGRILALVRNRSFSLKNVKHFVLDECDKMLEQLGESSALAAPAESQ

SEQ ID NO: 763 - protein, 427 aa, Homo sapiens
MAEQDVENDLLDYDEEEEPQAPQESTPAPPKKDIKGSYVSIHSSGFRDFLLKPELLRAIVDCGFEHPSEVQHECIPQAILGMDVLCQAKSGMGKTAVFVLATLQQIEPVNGQVTVLVMCHTRELAFQISKEYERFSKYMPSVKVSVFFGGLSIKKDEEVLKKNCPHVVVGTPGRILALVRNRSFSLKNVKHFVLDECDKMLEQLDMRRDVQEIFRLTPHEKQCMMFSATLSKDIRPVCRKFMQDPMEVFVDDETKLTLHGLQQYYVKLKDSEKNRKLFDLLDVLEFNQVIIFVKSVQRCMALAQLLVEQNFPAIAIHRGMAQEERLSRYQQFKDFQRRILVATNLFGRGMDIERVNIVFNYDMPEDSDTYLHRVARAGRFGTKGLAITFVSDENDAKILNDVQDRFEVNVAELPEEIDISTYIEQSR

SEQ ID NO: 764 - protein, 316 aa, Homo sapiens
MAEQDVENDLLDYDEEEEPQAPQESTPAPPKKDIKGSYVSIHSSGFRDFLLKPELLRAIVDCGFEHPSEVQHECIPQAILGMDVLCQAKSGMGKTAVFVLATLQQIEPVNGQVTVLVMCHTRELAFQISKEYERFSKYMPSVKVSVFFGGLSIKKDEEVLKKNCPHVVVGTPGRILALVRNRSFSLKNVKHFVLDECDKMLEQLDMRRDVQEIFRLTPHEKQCMMFSATLSKDIRPVCRKFMQDVSRARVAALAFPRGLEPGAPGHPHGPHGTEDAGMLGAGGASFPPLGLVKLGVKLGPHLSRARAYIQLLSDVY

SEQ ID NO: 765 - protein, 583 aa, Homo sapiens
MGAVYQAAALSKAFKVKPFVVRDAVVYPILVEFTREVEEEPGIHSLKHNKRVLFSRMGPYPQRKVITFNRYSHDFNFHINYGDLGFLGPEDLRVFGSQNLTTVKLKGVGDSFKKYPDYESKGIKAHFNLDESGVLSLDRVESVFETLVEDSAEEESTLTKLGNTISSLFGGGTTPDAKENGTDTVQEEEESPAEGSKDEPGEQVELKEEAEAPVEDGSQPPPPEPKGDATPEGEKATEKENGDKSEAQKPSEKAEAGPEGVAPAPEGEKKQKPARKRRMVEEIGVELVVLDLPDLPEDKLAQSVQKLQDLTLRDLEKQEREKAANSLEAFIFETQDKLYQPEYQEVSTEEQREEISGKLSAASTWLEDEGVGATTVMLKEKLAELRKLCQGLFFRVEERKKWPERLSALDNLLNHSSMFLKGARLIPEMDQIFTEVEMTTLEKVINETWAWKNATLAEQAKLPATEKPVLLSKDIEAKMMALDREVQYLLNKAKFTKPRPRPKDKNGTRAEPPLNASASDQGEKVIPPAGQTEDAEPISEPEKVETGSEPGDTEPLELGGPGAEPEQKEQSTGQKRPLKNDEL

SEQ ID NO: 766 - protein, 583 aa, Homo sapiens; identical to SEQ ID NO: 765

SEQ ID NO: 767 - protein, 583 aa, Homo sapiens; identical to SEQ ID NO: 765

SEQ ID NO: 768 - protein, 583 aa, Homo sapiens; identical to SEQ ID NO: 765

SEQ ID NO: 769 - protein, 422 aa, Homo sapiens
RPGYRREPSLSPKLTCLQNLKWSTAVEFCKKKSCPNPGEIRNGQIDVPGGILFGATISFSCNTGYKLFGSTSSFCLISGSSVQWSDPLPECREIYCPAPPQIDNGIIQGERDHYGYRQSVTYACNKGFTMIGEHSIYCTVNNDEGEWSGPPPECRGKSLTSKVPPTVQKPTTVNVPTTEVSPTSQKTTTKTTTPNAQGTETPSVLQKHTTENVSATRTPPTPQKPTTVNVPATIVTPTPQKPTTINVPATGVSSTPQRHTIVNVSATGTLPTLQKPTRANDSATKSPAAAQTSFISKTLSTKTPSAAQNPMMTNASATQATLTAQKFTTAKVAFTQSPSAARKSTNVHSPVTNGLKSTQRFPSAHITATRSTPVSRTTKHFHETTPNKGSGTTSGTTRLLSGHTCFTLTGLLGTLVTMGLLT

SEQ ID NO: 770 - protein, 381 aa, Homo sapiens
MTVARPSVPAALPLLGELPRLLLLVLLCLPAVWGDCGLPPDVPNAQPALEGRTSFPEDTVITYKCEESFVKIPGEKDSVICLKGSQWSDIEEFCNRSCEVPTRLNSASLKQPYITQNYFPVGTVVEYECRPGYRREPSLSPKLTCLQNLKWSTAVEFCKKKSCPNPGEIRNGQIDVPGGILFGATISFSCNTGYKLFGSTSSFCLISGSSVQWSDPLPECREIYCPAPPQIDNGIIQGERDHYGYRQSVTYACNKGFTMIGEHSIYCTVNNDEGEWSGPPPECRGKSLTSKVPPTVQKPTTVNVPTTEVSPTSQKTTTKTTTPNAQATRSTPVSRTTKHFHETTPNKGSGTTSGTTRLLSGHTCFTLTGLLGTLVTMGLLT

SEQ ID NO: 771 - protein, 507 aa, Homo sapiens
GHLIVISFSSAFVSLGDCGLPPDVPNAQPALEGRTSFPEDTVITYKCEESFVKIPGEKDSVICLKGSQWSDIEEFCNRSCEVPTRLNSASLKQPYITQNYFPVGTVVEYECRPGYRREPSLSPKLTCLQNLKWSTAVEFCKKKSCPNPGEIRNGQIDVPGGILFGATISFSCNTGYKLFGSTSSFCLISGSSVQWSDPLPECREIYCPAPPQIDNGIIQGERDHYGYRQSVTYACNKGFTMIGEHSIYCTVNNDEGEWSGPPPECRGKSLTSKVPPTVQKPTTVNVPTTEVSPTSQKTTTKTTTPNAQGTETPSVLQKHTTENVSATRTPPTPQKPTTVNVPATIVTPTPQKPTTINVPATGVSSTPQRHTIVNVSATGTLPTLQKPTRANDSATKSPAAAQTSFISKTLSTKTPSAAQNPMMTNASATQATLTAQKFTTAKVAFTQSPSAAPTRSTPVSRTTKHFHETTPNKGSGTTSGTTRLLSGHTCFTLTGLLGTLVTMGLLT

SEQ ID NO: 772 - protein, 363 aa, Homo sapiens
GHLIVISFSSAFVSLGDCGLPPDVPNAQPALEGRTSFPEDTVITYKCEESFVKIPGEKDSVICLKGSQWSDIEEFCNRSCEVPTRLNSASLKQPYITQNYFPVGTVVEYECRPGYRREPSLSPKLTCLQNLKWSTAVEFCKKKSCPNPGEIRNGQIDVPGGILFGATISFSCNTGYKLFGSTSSFCLISGSSVQWSDPLPECREIYCPAPPQIDNGIIQGERDHYGYRQSVTYACNKGFTMIGEHSIYCTVNNDEGEWSGPPPECRGKSLTSKVPPTVQKPTTVNVPTTEVSPTSQKTTTKTTTPNAQATRSTPVSRTTKHFHETTPNKGSGTTSGTTRLLSGHTCFTLTGLLGTLVTMGLLT

SEQ ID NO: 773 - protein, 321 aa, Homo sapiens
GHLIVISFSSAFVSLGDCGLPPDVPNAQPALEGRTSFPEDTVITYKCEESFVKIPGEKDSVICLKGSQWSDIEEFCNRSCEVPTRLNSASLKQPYITQNYFPVGTVVEYECRPGYRREPSLSPKLTCLQNLKWSTAVEFCKKKSCPNPGEIRNGQIDVPGGILFGATISFSCNTGYKLFGSTSSFCLISGSSVQWSDPLPECREIYCPAPPQIDNGIIQGERDHYGYRQSVTYACNKGFTMIGEHSIYCTVNNDEGEWSGPPPECRATRSTPVSRTTKHFHETTPNKGSGTTSGTTRLLSGHTCFTLTGLLGTLVTMGLLT

SEQ ID NO: 774 - protein, 530 aa, Homo sapiens
GHLIVISFSSAFVSLGDCGLPPDVPNAQPALEGRTSFPEDTVITYKCEESFVKIPGEKDSVICLKGSQWSDIEEFCNRSCEVPTRLNSASLKQPYITQNYFPVGTVVEYECRPGYRREPSLSPKLTCLQNLKWSTAVEFCKKKSCPNPGEIRNGQIDVPGGILFGATISFSCNTGYKLFGSTSSFCLISGSSVQWSDPLPECREIYCPAPPQIDNGIIQGERDHYGYRQSVTYACNKGFTMIGEHSIYCTVNNDEGEWSGPPPECRGKSLTSKVPPTVQKPTTVNVPTTEVSPTSQKTTTKTTTPNAQGTETPSVLQKHTTENVSATRTPPTPQKPTTVNVPATIVTPTPQKPTTINVPATGVSSTPQRHTIVNVSATGTLPTLQKPTRANDSATKSPAAAQTSFISKTLSTKTPSAAQNPMMTNASATQATLTAQKFTTAKVAFTQSPSAARKSTNVHSPVTNGLKSTQRFPSAHITATRSTPVSRTTKHFHETTPNKGSGTTSGTTRLLSALIMHMRATKYSMLCLTI

SEQ ID NO: 775 - protein, 440 aa, Homo sapiens
MTVARPSVPAALPLLGELPRLLLLVLLCLPAVWGDCGLPPDVPNAQPALEGRTSFPEDTVITYKCEESFVKIPGEKDSVICLKGSQWSDIEEFCNRSCEVPTRLNSASLKQPYITQNYFPVGTVVEYECRPGYRREPSLSPKLTCLQNLKWSTAVEFCKKKSCPNPGEIRNGQIDVPGGILFGATISFSCNTGYKLFGSTSSFCLISGSSVQWSDPLPECREIYCPAPPQIDNGIIQGERDHYGYRQSVTYACNKGFTMIGEHSIYCTVNNDEGEWSGPPPECRGKSLTSKVPPTVQKPTTVNVPTTEVSPTSQKTTTKTTTPNAQATRSTPVSRTTKHFHETTPNKGSGTTSGTTRLLSGSRPVTQAGMRWCDRSSLQSRTPGFKRSFHFSLPSSWYYRAHVFHVDRFAWDASNHGLADLAKEELRRKYTQVYRLFLVS

SEQ ID NO: 776 - protein, 193 aa, Homo sapiens
MTVARPSVPAALPLLGELPRLLLLVLLCLPAVWGDCGLPPDVPNAQPALEGRTSFPEDTVITYKCEESFVKIPGEKDSVICLKGSQWSDIEEFCNRSCEVPTRLNSASLKQPYITQNYFPVGTVVEYECRPGYRREPSLSPKLTCLQNLKWSTAVEFCKKKSCPNPGEIRNGQIDVPGGILFGATISFSCNTG

SEQ ID NO: 777 - protein, 381 aa, Homo sapiens; identical to SEQ ID NO: 770

SEQ ID NO: 778 - protein, 376 aa, Homo sapiens
GHLIVISFSSAFVSLGDCGLPPDVPNAQPALEGRTSFPEDTVITYKCEESFVKIPGEKDSVICLKGSQWSDIEEFCNRSCEVPTRLNSASLKQPYITQNYFPVGTVVEYECRPGYRREPSLSPKLTCLQNLKWSTAVEFCKKKSCPNPGEIRNGQIDVPGGILFGATISFSCNTGYKLFGSTSSFCLISGSSVQWSDPLPECREIYCPAPPQIDNGIIQGERDHYGYRQSVTYACNKGFTMIGEHSIYCTVNNDEGEWSGPPPECRGKSLTSKVPPTVQKPTTVNVPTTEVSPTSQKTTTKTTTPNAQATRSTPVSRTTKHFHETTPNKGSGTTSGQLTLFRFTEYGSNVLWWKYELDQDCRIKWSLIYCSQGFSY

SEQ ID NO: 779 - protein, 440 aa, Homo sapiens; identical to SEQ ID NO: 775

SEQ ID NO: 780 - protein, 419 aa, Homo sapiens
RPGYRREPSLSPKLTCLQNLKWSTAVEFCKKKSCPNPGEIRNGQIDVPGGILFGATISFSCNTGYKLFGSTSSFCLISGSSVQWSDPLPECREIYCPAPPQIDNGIIQGERDHYGYRQSVTYACNKGFTMIGEHSIYCTVNNDEGEWSGPPPECRGKSLTSKVPPTVQKPTTVNVPTTEVSPTSQKTTTKTTTPNAQGTETPSVLQKHTTENVSATRTPPTPQKPTTVNVPATIVTPTPQKPTTINVPATGVSSTPQRHTIVNVSATGTLPTLQKPTRANDSATKSPAAAQTSFISKTLSTKTPSAAQNPMMTNASATQATLTAQKFTTAKVAFTQSPSAARKSTNVHSPVTNGLKSTQRFPSAHITATRSTPVSRTTKHFHETTPNKGSGTTSGTTRLLSALIMHMRATKYSMLCLTI

SEQ ID NO: 781 - protein, 381 aa, Homo sapiens
MTVARPSVPAALPLLGELPRLLLLVLLCLPAVWGDCGLPPDVPNAQPALEGRTSFPEDTVITYKCEESFVKIPGEKDSVTCLKGSQWSDIEEFCNRSCEVPTRLNSASLKQPYITQNYFPVGTVVEYECRPGYRREPSLSPKLTCLQNLKWSTAVEFCKKKSCPNPGEIRNGQIDVPGGILFGATISFSCNTGYKLFGSTSSFCLISGSSVQWSDPLPECREIYCPAPPQIDNGIIQGERDHYGYRQSVTYACNKGFTMIGEHSIYCTVNNDEGEWSGPPPECRGKSLTSKVPPTVQKPTTVNVPTTEVSPTSQKTTTKTTTPNAQATRSTPVSRTTKHFHETTPNKGSGTTSGTTRLLSGHTCFTLTGLLGTLVTMGLLT

SEQ ID NO: 782 - protein, 533 aa, Homo sapiens
GHLIVISFSSAFVSLGDCGLPPDVPNAQPALEGRTSFPEDTVITYKCEESFVKIPGEKDSVICLKGSQWSDIEEFCNRSCEVPTRLNSASLKQPYITQNYFPVGTVVEYECRPGYRREPSLSPKLTCLQNLKWSTAVEFCKKKSCPNPGEIRNGQIDVPGGILFGATISFSCNTGYKLFGSTSSFCLISGSSVQWSDPLPECREIYCPAPPQIDNGIIQGERDHYGYRQSVTYACNKGFTMIGEHSIYCTVNNDEGEWSGPPPECRGKSLTSKVPPTVQKPTTVNVPTTEVSPTSQKTTTKTTTPNAQGTETPSVLQKHTTENVSATRTPPTPQKPTTVNVPATIVTPTPQKPTTINVPATGVSSTPQRHTIVNVSATGTLPTLQKPTRANDSATKSPAAAQTSFISKTLSTKTPSAAQNPMMTNASATQATLTAQKFTTAKVAFTQSPSAARKSTNVHSPVTNGLKSTQRFPSAHITATRSTPVSRTTKHFHETTPNKGSGTTSGTTRLLSGHTCFTLTGLLGTLVTMGLLT

SEQ ID NO: 783 - protein, 680 aa, Homo sapiens
MLEVLRVLSTSSEALHHAVIFLFNGAEENVLQASHGFITQHPWASLIRAFINLEAAGVGGKELVFQTGPENPWLVQAYVSAAKHPFASVVAQEVFQSGIIPSDTDFRIYRDFGNIPGIDLAFIENGYIYHTKYDTADRILTDSIQRAGDNILAVLKHLATSDMLAAASKYRHGNMVFFDVLGLFVIAYPSRIGSIINYMVVMGVVLYLGKKFLQPKHKTGNYKKDFLCGLGITLISWFTSLVTVLIIAVFISLIGQSLSWYNHFYVSVCLYGTATVAKIILIHTLAKRFYYMNASAQYLGEVFFDISLFVHCCFLVTLTYQGLCSAFISAVWVAFPLLTKLCVHKDFKQHGAQGKFIAFYLLGMFIPYLYALYLIWAVFEMFTPILGRSGSEIPPDVVLASILAGCTMILSSYFINFIYLAKSTKKTMLTLTLVCAITFLLVCSGTFFPYSSNPANPKPKRVFLQHMTRTFHDLEGNAVKRDSGIWINGFDYTGISHITPHIPEINDSIRAHCEENAPLCGFPWYLPVHFLIRKNWYLPAPEVSPRNPPHFRLISKEQTPWDSIKLTFEATGPSHMSFYVRAHKGSTLSQWSLGNGTPVTSKGGDYFVFYSHGLQASAWQFWIEVQVSEEHPEGMVTVAIAAHYLSGEDKRSPQLDALKEKFPDWTFPSAWVCTYDLFVF

SEQ ID NO: 784 - protein, 680 aa, Homo sapiens; identical to SEQ ID NO: 783

SEQ ID NO: 785 - protein, 904 aa, Homo sapiens
MEWGSESAAVRRHRVGVERREGAAAAPPPEREARAQEPLVDGCSGGGRTRKRSPGGSGGASRGAGTGLSEVRAALGLALYLIALRTLVQLSLQQLVLRGAAGHRGEFDALQARDYLEHITSIGPRTTGSPENEILTVHYLLEQIKLIEVQSNSLHKISVDVQRPTGSFSIDFLGGFTSYYDNITNVVVKLEPRDGAQHAVLANCHFDSVANSPGASDDAVSCSVMLEVLRVLSTSSEALHHAVIFLFNGAEENVLQASHGFITQHPWASLIRAFINLEAAGVGGKELVFQTGPENPWLVQAYVSAAKHPFASVVAQEVFQSGIIPSDTDFRIYRDFGNIPGIDLAFIENGYIYHTKYDTADRILTDSIQRAGDNILAVLKHLATSDMLAAASKYRHGNMVFFDVLGLFVIAYPSRIGSIINYMVVMGVVLYLGKKFLQPKHKTGNYKKDFLCGLGITLISWFTSLVTVLIIAVFISLIGQSLSWYNHFYVSVCLYGTATVAKIILIHTLAKRFYYMNASAQYLGEVFFDISLFVHCCFLVTLTYQGLCSAFISAVWVAFPLLTKLCVHKDFKQHGAQGKFIAFYLLGMFIPYLYALYLIWAVFEMFTPILGRSGSEIPPDVVLASILAGCTMILSSYFINFIYLAKSTKKTMLTLTLVCAITFLLVCSGTFFPYSSNPANPKPKRVFLQHMTRTFHDLEGNAVKRDSGIWINGFDYTGISHITPHIPEINDSIRAHCEENAPLCGFPWYLPVHFLIRKNWYLPAPEVSPRNPPHFRLISKEQTPWDSIKLTFEATGPSHMSFYVRAHKGSTLSQWSLGNGTPVTSKGGDYFVFYSHGLQASAWQFWIEVQVSEEHPEGMVTVAIAAHYLSGEDKRSPQLDALKEKFPDWTFPSAWVCTYDLFVF

SEQ ID NO: 786 - protein, 547 aa, Homo sapiens
MAMGLFRVCLVVVTAIINHPLLFPRENATVPENEEEIIRKMQAHQEKLQLEQLRLEEEVARLAAEKEALEQVAEEGRQQNETRVAWDLWSTLCMILFLMIEVWRQDHQEGPSPECLGGEEDELPGLGGAPLQGLTLPNKATLGHFYERCIRGATADAARTREFLEGFVDDLLEALRSLCNRDTDMEVEDFIGVDSMYENWQVDRPLLCHLFVPFTPPEPYRFHPELWCSGRSVPLDRQGYGQIKVVRADGDTLSCICGKTKLGEDMLCLLHGRNSMAPPCGDMENLLCATDSLYLDTMQVMKWFQTALTRAWKGIAHKYEFDLAFGQLDSPGSLKIKFRSGKFMPFNLIPVIQCDDSDLYFVSHLPREPSEGTPASSTDWLLSFAVYERHFLRTTLKALPEGACHLSCLQIASFLLSKQSRLTGPSGLSSYHLKTALLHLLLLRQAADWKAGQLDARLHELLCFLEKSLLQKKLHHFFIGNRKVPEAMGLPEAVLRAEPLNLFRPFVLQRSLYRKTLDSFYEMLKNAPALISEYSLHVPSDQPTPKS

SEQ ID NO: 787 - protein, 547 aa, Homo sapiens; identical to SEQ ID NO: 786

SEQ ID NO: 788 - protein, 916 aa, Homo sapiens
MVQKESQATLEERESELSSNPAASAGASLEPPAAPAPGEDNPAGAGGAAVAGAAGGARRFLCGVVEGFYGRPWVMEQRKELFRRLQKWELNTYLYAPKDDYKHRMFWREMYSVEEAEQLMTLISAAREYEIEFIYAISPGLDITFSNPKEVSTLKRKLDQVSQFGCRSFALLFDDIDHNMCAADKEVFSSFAHAQVSITNEIYQYLGEPETFLFCPTEYCGTFCYPNVSQSPYLRTVGEKLLPGIEVLWTGPKVVSKEIPVESIEEVSKIIKRAPVIWDNIHANDYDQKRLFLGPYKGRSTELIPRLKGVLTNPNCEFEANYVAIHTLATWYKSNMNGVRKDVVMTDSEDSTVSIQIKLENEGSDEDIETDVLYSPQMALKLALTEWLQEFGVPHQYSSRQVAHSGAKASVVDGTPLVAAPSLNATTVVTTVYQEPIMSQGAALSGEPTTLTKEEEKKQPDEEPMDMVVEKQEETDHKNDNQILSEIVEAKMAEELKPMDTDKESIAESKSPEMSMQEDCISDIAPMQTDEQTNKEQFVPGPNEKPLYTAEPVTLEDLQLLADLFYLPYEHGPKGAQMLREFQWLRANSSVVSVNCKGKDSEKIEEWRSRAAKFEEMCGLVMGMFTRLSNCANRTILYDMYSYVWDIKSIMSMVKSFVQWLGCRSHSSAQFLIGDQEPWAFRGGLAGEFQRLLPIDGANDLFFQPPPLTPTSKVYTIRPYFPKDEASVYKICREMYDDGVGLPFQSQPDLIGDKLVGGLLSLSLDYCFVLEDEDGICGYALGTVDVTPFIKKCKISWIPFMQEKYTKPNGDKELSEAEKIMLSFHEEQEVLPETFLANFPSLIKMDIHKKVTDPSVAKSMMACLLSSLKANGSRGAFCEVRPDDKRILEFYSKLGCFEIAKMEGFPKDVVILGRSL

SEQ ID NO: 789 - protein, 916 aa, Homo sapiens; identical to SEQ ID NO: 788

SEQ ID NO: 790 - protein, 677 aa, Homo sapiens
MVQKESQATLEERESELSSNPAASAGASLEPPAAPAPGEDNPAGAGGAAVAGAAGGARRFLCGVVEGFYGRPWVMEQRKELFRRLQKWELNTYLYAPKDDYKHRMFWREMYSVEEAEQLMTLISAAREYEIEFIYAISPGLDITFSNPKEVSTLKRKLDQVSQFGCRSFALLFDDIDHNMCAADKEVFSSFAHAQVSITNEIYQYLGEPETFLFCPTEYCGTFCYPNVSQSPYLRTVGEKLLPGIEVLWTGPKVVSKEIPVESIEEVSKIIKRAPVIWDNIHANDYDQKRLFLGPYKGRSTELIPRLKGVLTNPNCEFEANYVAIHTLATWYKSNMNGVRKDVVMTDSEDSTVSIQIKLENEGSDEDIETDVLYSPQMALKLALTEWLQEFGVPHQYSSRQVAHSGAKASVVDGTPLVAAPSLNATTVVTTVYQEPIMSQGAALSGEPTTLTKEEEKKQPDEEPMDMVVEKQEETDHKNDNQILSEIVEAKMAEELKPMDTDKESIAESKSPEMSMQEDCISDIAPMQTDEQTNKEQFVPGPNEKPLYTAEPVTLEDLQLLADLFYLPYEHGPKGAQMLREFQWLRANSSVVSVNCKGKDSEKIEEWRSRAAKFEEMCGLVMGMFTRLSNCANRTILYDMYSYVWDIKSIMSMVKSFVQWLGRCTRNNLFSSNILSL

SEQ ID NO: 791 - protein, 916 aa, Homo sapiens; identical to SEQ ID NO: 788

SEQ ID NO: 792 - protein, 849 aa, Homo sapiens
MVQKESQATLEERESELSSNPAASAGASLEPPAAPAPGEDNPAGAGGAAVAGAAGGARRFLCGVVEGFYGRPWVMEQRKELFRRLQKWELNTYLYAPKDDYKHRMFWREMYSVEEAEQLMTLISAAREYEIEFIYAISPGLDITFSNPKEVSTLKRKLDQVSQFGCRSFALLFDDIDHNMCAADKEVFSSFAHAQVSITNEIYQYLGEPETFLFCPTEYCGTFCYPNVSQSPYLRTVGEKLLPGIEVLWTGPKVVSKEIPVESIEEVSKIIKRAPVIWDNIHANDYDQKRLFLGPYKGRSTELIPRLKGVLTNPNCEFEANYVAIHTLATWYKSNMNGVRKDVVMSRQVAHSGAKASVVDGTPLVAAPSLNATTVVTTVYQEPIMSQGAALSGEPTTLTKEEEKKQPDEEPMDMVVEKQEETDHKNDNQILSEIVEAKMAEELKPMDTDKESIAESKSPEMSMQEDCISDIAPMQTDEQTNKEQFVPGPNEKPLYTAEPVTLEDLQLLADLFYLPYEHGPKGAQMLREFQWLRANSSVVSVNCKGKDSEKIEEWRSRAAKFEEMCGLVMGMFTRLSNCANRTILYDMYSYVWDIKSIMSMVKSFVQWLGCRSHSSAQFLIGDQEPWAFRGGLAGEFQPPPLTPTSKVYTIRPYFPKDEASVYKICREMYDDGVGLPFQSQPDLIGDKLVGGLLSLSLDYCFVLEDEDGICGYALGTVDVTPFIKKCKISWIPFMQEKYTKPNGDKELSEAEKIMLSFHEEQEVLPETFLANFPSLIKMDIHKKVTDPSVAKSMMACLLSSLKANGSRGAFCEVRPDDKRILEFYSKLGCFEIAKMEGFPKDVVILGRSL

SEQ ID NO: 793 - protein, 968 aa, Homo sapiens
MDSTLTASEIRQRFIDFFKRNEHTYVHSSATIPLDDPTLLFANAGMNQFKPIFLNTIDPSHPMAKLSRAANTQKCIRAGGKHNDLDDVGKDVYHHTFFEMLGSWSFGDYFKELACKMALELLTQEFGIPIERLYVTYFGGDEAAGLEADLECKQIWQNLGLDDTKILPGNMKDNFWEMGDTGPCGPCSEIHYDRIGGRDAAHLVNQDDPNVLEIWNLVFIQYNREADGILKPLPKKSIDTGMGLERLVSVLQNKMSNYDTDLFVPYFEAIQKGTGARPYTGKVGAEDADGIDMAYRVLADHARTITVALADGGRPDNTGRGYVLRRILRRAVRYAHEKLNASRGFFATLVDVVVQSLGDAFPELKKDPDMVKDIINEEEVQFLKTLSRGRRILDRKIQSLGDSKTIPGDTAWLLYDTYGFPVDLTGLIAEEKGLVVDMDGFEEERKLAQLKSQGKGAGGEDLIMLDIYAIEELRARGLEVTDDSPKYNYHLDSSGSYVFENTVATVMALRREKMFVEEVSTGQECGVVLDKTCFYAEQGGQIYDEGYLVKVDDSSEDKTEFTVKNAQVRGGYVLHIGTIYGDLKVGDQVWLFIDEPRRRPIMSNHTATHILNFALRSVLGEADQKGSLVAPDRLRFDFTAKGAMSTQQIKKAEEIANEMIEAAKAVYTQDCPLAAAKAIQGLRAVFDETYPDPVRVVSIGVPVSELLDDPSGPAGSLTSVEFCGGTHLRNSSHAGAFVIVTEEAIAKGIRRIVAVTGAEAQKALRKAESLKKCLSVMEAKVKAQTAPNKDVQREIADLGEALATAVIPQWQKDELRETLKSLKKVMDDLDRASKADVQKRVLEKTKQFIDSNPNQPLVILEMESGASAKALNEALKLFKMHSPQTSAMLFTVDNEAGKITCLCQVPQNAANRGLKASEWVQQVSGLMDGKGGGKDVSAQATGKNVGCLQEALQLATSFAQLRLGDVKN

SEQ ID NO: 794 - protein, 192 aa, Homo sapiens
MEAKVKAQTAPNKDVQREIADLGEALATAVIPQWQKDELRETLKSLKKVMDDLDRASKADVQKRVLEKTKQFIDSNPNQPLVILEMESGASAKALNEALKLFKMHSPQTSAMLFTVDNEAGKITCLCQVPQNAANRGLKASEWVQQVSGLMDGKGGGKDVSAQATGKNVGCLQEALQLATSFAQLRLGDVKN

SEQ ID NO: 795 - protein, 968 aa, Homo sapiens
MDSTLTASEIRQRFIDFFKRNEHTYVHSSATIPLDDPTLLFANAGMNQFKPIFLNTIDPSHPMAKLSRAANTQKCIRAGGKQNDLDDVGKDVYHHTFFEMLGSWSFGDYFKELACKMALELLTQEFGIPIERLYVTYFGGDEAAGLEADLECKQIWQNLGLDDTKILPGNMKDNFWEMGDTGPCGPCSEIHYDRIGGRDAAHLVNQDDPNVLEIWNLVFIQYNREADGILKPLPKKSIDTGMGLERLVSVLQNKMSNYDTDLFVPYFEAIQKGTGARPYTGKVGAEDADGIDMAYRVLADHARTITVALADGGRPDNTGRGYVLRRILRRAVRYAHEKLNASRGFFATLVDVVVQSLGDAFPELKKDPDMVKDIINEEEVQFLKTLSRGRRILDRKIQSLGDSKTIPGDTAWLLYDTYGFPVDLTGLIAEEKGLVVDMDGFEEERKLAQLKSQGKGAGGEDLIMLDIYAIEELRARGLEVTDDSPKYNYHLDSSGSYVFENTVATVMALRREKMFVEEVSTGQECGVVLDKTCFYAEQGGQIYDEGYLVKVDDSSEDKTEFTVKNAQVRGGYVLHIGTIYGDLKVGDQVWLFIDEPRRRPIMSNHTATHILNFALRSVLGEADQKGSLVAPDRLRFDFTAKGAMSTQQIKKAEEIANEMIEAAKAVYTQDCPLAAAKAIQGLRAVFDETYPDPVRVVSIGVPVSELLDDPSGPAGSLTSVEFCGGTHLRNSSHAGAFVIVTEEAIAKGIRRIVAVTGAEAQKALRKAESLKKCLSVMEAKVKAQTAPNKDVQREIADLGEALATAVIPQWQKDELRETLKSLKKVMDDLDRASKADVQKRVLEKTKQFIDSNPNQPLVILEMESGASAKALNEALKLFKMHSPQTSAMLFTVDNEAGKITCLCQVPQNAANRGLKASEWVQQVSGLMDGKGGGKDVSAQATGKNVGCLQEALQLATSFAQLRLGDVKN

SEQ ID NO: 796 - protein, 134 aa, Homo sapiens
MLFTTVQMKLKWYIYVADILAHEIHVLEKHTNMNLTQLKVLELDTLVDNLSIDPSSGDIWVGCHPNGQKLFVYDPNNPPSSEVLRIQNILSEKPTVTTVYANNGSVLQGSSVASVYDGKLLIGTLYHRALYCEL

SEQ ID NO: 797 - protein, 375 aa, Homo sapiens
MAPPTELLARPERGSAPGSRAMGRLVAVGLLGIALALLGERLLALRNRLKASREVESVDLPHCHLIKGIEAGSEDIDILPNGLAFFSVGLKFPGLHSFAPDKPGGILMMDLKEEKPRARELRISRGFDLASFNPHGISTFIDNDDTVYLFVVNHPEFKNTVEIFKFEEAENSLLHLKTVKHELLPSVNDITAVGPAHFYATNDHYFSDPFLKYLETYLNLHWANVVYYSPNEVKVVAEGFDSANGINISPDDKYIYVADILAHEIHVLEKHTNMNLTQLKVLELDTLVDNLSIDPSSGDIWVGCHPNGQKLFVYDPNNPPSSEVLRIQNILSEKPTVTTVYANNGSVLQGSSVASVYDGKLLIGTLYHRALYCEL

SEQ ID NO: 798 - protein, 266 aa, Homo sapiens
MMDLKEEKPRARELRISRGFDLASFNPHGISTFIDNDDTVYLFVVNHPEFKNTVEIFKFEEAENSLLHLKTVKHELLPSVNDITAVGPAHFYATNDHYFSDPFLKYLETYLNLHWANVVYYSPNEVKVVAEGFDSANGINISPDDKYIYVADILAHEIHVLEKHTNMNLTQLKVLELDTLVDNLSIDPSSGDIWVGCHPNGQKLFVYDPNNPPSSEVLRIQNILSEKPTVTTVYANNGSVLQGSSVASVYDGKLLIGTLYHRALYC

SEQ ID NO: 799 - protein, 363 aa, Homo sapiens
MAPPTELLARPERGSAPGSRAMGRLVAVGLLGIALALLGERLLALRNRLKASREVESVDLPHCHLIKGIEAGSEDIDILPNGLAFFSVGLKFPGLHSFAPDKPGGILMMDLKEEKPRARELRISRGFDLASFNPHGISTFIDNEFKNTVEIFKFEEAENSLLHLKTVKHELLPSVNDITAVGPAHFYATNDHYFSDPFLKYLETYLNLHWANVVYYSPNEVKVVAEGFDSANGINISPDDKYIYVADILAHEIHVLEKHTNMNLTQLKVLELDTLVDNLSIDPSSGDIWVGCHPNGQKLFVYDPNNPPSSEVLRIQNILSEKPTVTTVYANNGSVLQGSSVASVYDGKLLIGTLYHRALYCEL

SEQ ID NO: 800 - protein, 599 aa, Homo sapiens
MADKLTRIAIVNHDKCKPKKCRQECKKSCPVVRMGKLCIEVTPQSKIAWISETLCIGCGICIKKCPFGALSIVNLPSNLEKETTHRYCANAFKLHRLPIPRPGEVLGLVGTNGIGKSTALKILAGKQKPNLGKYDDPPDWQEILTYFRGSELQNYFTKILEDDLKAIIKPQYVDQIPKAAKGTVGSILDRKDETKTQAIVCQQLDLTHLKERNVEDLSGGELQRFACAVVCIQKADIFMFDEPSSYLDVKQRLKAAITIRSLINPDRYIIVVEHDLSVLDYLSDFICCLYGVPSAYGVVTMPFSVREGINIFLDGYVPTENLRFRDASLVFKVAETANEEEVKKMCMYKYPGMKKKMGEFELAIVAGEFTDSEIMVMLGENGTGKTTFIRMLAGRLKPDEGGEVPVLNVSYKPQKISPKSTGSVRQLLHEKIRDAYTHPQFVTDVMKPLQIENIIDQEVQTLSGGELQRVALALCLGKPADVYLIDEPSAYLDSEQRLMAARVVKRFILHAKKTAFVVEHDFIMATYLADRVIVFDGVPSKNTVANSPQTLLAGMNKFLSQLEITFRRDPNNYRPRINKLNSIKDVEQKKSGNYFFLDD

SEQ ID NO: 801 - protein, 599 aa, Homo sapiens; identical to SEQ ID NO: 800

SEQ ID NO: 802 - protein, 599 aa, Homo sapiens
MADKLTRIAIVNHDKCKPKKCRQECKKSCPVVRMGKLCIEVTPQSKIAWISETLCIGCGICIKKCPFGALSIVNLPSNLEKETTHRYCANAFKLHRLPIPRPGEVLGLVGTNGIGKSAALKILAGKQKPNLGKYDDPPDWQEILTYFRGSELQNYFTKILEDDLKAIIKPQYVARFLRLAKGTVGSILDRKDETKTQAIVCQQLDLTHLKERNVEDLSGGELQRFACAVVCIQKADIFMFDEPSSYLDVKQRLKAAITIRSLINPDRYIIVVEHDLSVLDYLSDFICCLYGVPSAYGVVTMPFSVREGINIFLDGYVPTENLRFRDASLVFKVAETANEEEVKKMCMYKYPGMKKKMGEFELAIVAGEFTDSEIMVMLGENGTGKTTFIRMLAGRLKPDEGGEVPVLNVSYKPQKISPKSTGSVRQLLHEKIRDAYTHPQFVTDVMKPLQIENIIDQEVQTLSGGELQRVRLRLCLGKPADVYLIDEPSAYLDSEQRLMAARVVKRFILHAKKTAFVVEHDFIMATYLADRVIVFDGVPSKNTVANSPQTLLAGMNKFLSQLEITFRRDPNNYRPRINKLNSIKDVEQKKSGNYFFLDD

SEQ ID NO: 803 - protein, 183 aa, Homo sapiens
MRLLSFVVLALFAVTQAEEGARLLASKSLLNRYAVEGRDLTLQYNIYNVGSSAALDVELSDDSFPPEDFGIVSGMLNVKWDRIAPASNVSHTVVLRPLKAGYFNFTSATITYLAQEDGPVVIGSTSAPGQGGILAQREFDRRFSPHFLDWAAFGVMTLPSIGIPLLLWYSSKRKYDTPKTKKN

SEQ ID NO: 804 - protein, 183 aa, Homo sapiens; identical to SEQ ID NO: 803

SEQ ID NO: 805 - protein, 183 aa, Homo sapiens; identical to SEQ ID NO: 803

SEQ ID NO: 806 - protein, 806 aa, Homo sapiens
MASGADSKGDDLSTAILKQKNRPNRLIVDEAINEDNSVVSLSQPKMDELQLFRGDTVLLKGKKRREAVCIVLSDDTCSDEKIRMNRVVRNNLRVRLGDVISIQPCPDVKYGKRIHVLPIDDTVEGITGNLFEVYLKPYFLEAYRPIRKGDIFLVRGGMRAVEFKVVETDPSPYCIVAPDTVIHCEGEPIKREDEEESLNEVGYDDIGGCRKQLAQIKEMVELPLRHPALFKAIGVKPPRGILLYGPPGTGKTLIARAVANETGAFFFLINGPEIMSKLAGESESNLRKAFEEAEKNAPAIIFIDELDAIAPKREKTHGEVERRIVSQLLTLMDGLKQRAHVIVMAATNRPNSIDPALRRFGRFDREVDIGIPDATGRLEILQIHTKNMKLADDVDLEQVANETHGHVGADLAALCSEAALQAIRKKMDLIDLEDETIDAEVMNSLAVTMDDFRWALSQSNPSALRETVVEVPQVTWEDIGGLEDVKRELQELVQYPVEHPDKFLKFGMTPSKGVLFYGPPGCGKTLLAKAIANECQANFISIKGPELLTMWFGESEANVREIFDKARQAAPCVLFFDELDSIAKARGGNIGDGGGAADRVINQILTEMDGMSTKKNVFIIGATNRPDIIDPAILRPGRLDQLIYIPLPDEKSRVAILKANLRKSPVAKDVDLEFLAKMTNGFSGADLTEICQRACKLAIRESIESEIRRERERQTNPSAMEVEEDDPVPEIRRDHFEEAMRFARRSVSDNDIRKYEMFAQTLQQSRGFGSFRFPSGNQGGAGPSQGSGGGTGGSVYTEDNDDDLYG

SEQ ID NO: 807 - protein, 806 aa, Homo sapiens; identical to SEQ ID NO: 806

SEQ ID NO: 808 - protein, 632 aa, Homo sapiens [sequence omitted]

SEQ ID NO: 809 - protein, 805 aa, Homo sapiens
ASGADSKGDDLSTAILKQKNRPNRLIVDEAINEDNSVVSLSQPKMDELQLFRGDTVLLKGKKRREAVCIVLSDDTCSDEKIRMNRVVRNNLRVRLGDVISIQPCPDVKYGKRIHVLPIDDTVEGITGNLFEVYLKPYFLEAYRPIRKGDIFLVRGGMRAVEFKVVETDPSPYCIVAPDTVIHCEGEPIKREDEEESLNEVGYDDIGGCRKQLAQIKEMVELPLRHPALFKAIGVKPPRGILLYGPPGTGKTLIARAVANETGAFFFLINGPEIMSKLAGESESNLRKAFEEAEKNAPAIIFIDELDAIAPKREKTHGEVERRIVSQLLTLMDGLKQRAHVIVMAATNRPNSIDPALRRFGRFDREVDIGIPDATGRLEILQIHTKNMKLADDVDLEQVANETHGHVGADLAALCSEAALQAIRKKMDLIDLEDETIDAEVMNSLAVTMDDFRWALSQSNPSALRETVVEVPQVTWEDIGGLEDVKRELQELVQYPVEHPDKFLKFGMTPSKGVLFYGPPGCGKTLLAKAIANECQANFISIKGPELLTMWFGESEANVREIFDKARQAAPCVLFFDELDSIAKARGGNIGDGGGAADRVINQILTEMDGMSTKKNVFIIGATNRPDIIDPAILRPGRLDQLIYIPLPDEKSRVAILKANLRKSPVAKDVDLEFLAKMTNGFSGADLTEICQRACKLAIRESIESEIRRERERQTNPSAMEVEEDDPVPEIRRDHFEEAMRFARRSVSDNDIRKYEMFAQTLQQSRGFGSFRFPSGNQGGAGPSQGSGGGTGGSVYTEDNDDDLYG

SEQ ID NO: 810 - protein, 527 aa, Homo sapiens [sequence omitted]

SEQ ID NO: 811 - protein, 642 aa, Homo sapiens [sequence omitted]

SEQ ID NO: 812 - protein, 302 aa, Homo sapiens [sequence omitted]

SEQ ID NO: 813 - protein, 202 aa, Homo sapiens [sequence omitted]

SEQ ID NO: 814 - protein, 202 aa, Homo sapiens
MLESMIKKPRPTRAEGSDVANAVLDGADCIMLSGETAKGDYPLEAVRMQHLIAREAEAAMFHRKLFEELVRASSHSTDLMEAMAMGSVEASYKCLAAALIVLTESGRSAHQVARYRPRAPIIAVTRNPQTARQAHLYRGIFPVLCKDPVQEAWAEDVDLRVNFAMNVGKARGFFKKGDVVIVLTGWRPGSGFTNTMRVVPVP

SEQ ID NO: 815 - protein, 531 aa, Homo sapiens
MDGIVPDIAVGTKRGSDELFSTCVTNGPFIMSSNSASAANGNDSKKFKGDSRSAGVPSRVIHIRKLPIDVTEGEVISLGLPFGKVTNLLMLKGKNQAFIEMNTEEAANTMVNYYTSVTPVLRGQPIYIQFSNHKELKTDSSPNQARAQAALQAVNSVQSGNLALAASAAAVDAGMAMAGQSPVLRIIVENLFYPVTLDVLHQIFSKFGTVLKIITFTKNNQFQALLQYADPVSAQHAKLSLDGQNIYNACCTLRIDFSKLTSLNVKYNNDKSRDYTRPDLPSGDSQPSLDQTMAAAFGLSVPNVHGALAPLAIPSAAAAAAAAGRIAIPGLAGAGNSVLLVSNLNPERVTPQSLFILFGVYGDVQRVKILFNKKENALVQMADGNQAQLAMSHLNGHKLHGKPIRITLSKHQNVQLPREGQEDQGLTKDYGNSPLHRFKKPGSKNFQNIFPPSATLHLSNIPPSVSEEDLKVLFSSNGGVVKGFKFFQKDRKMALIQMGSVEEAVQALIDLHNHDLGENHHLRVSFSKSTI

SEQ ID NO: 816 - protein, 520 aa, Homo sapiens
MSSNSASAANGNDSKKFKGDSRSAGVPSRVIHIRKLPIDVTEGEVISLGLPFGKVTNLLMLKGKNQAFIEMNTEEAANTMVNYYTSVTPVLRGQPIYIQFSNHKELKTDSSPNQARAQAALQAVNSVQSGNLALAASAAAVDAGMAMAGQSPVLRIIVENLFYPVTLDVLHQIFSKFGTVLKIITFTKNNQFQALLQYADPVSAQHAKLSLDGQNIYNACCTLRIDFSKLTSLNVKYNNDKSRDYTRPDLPSGDSQPSLDQTMAAAFASPYAGAGFPPTFAIPQAAGLSVPNVHGALAPLAIPSAAAAAAAAGRIAIPGLAGAGNSVLLVSNLNPERVTPQSLFILFGVYGDVQRVKILFNKKENALVQMADGNQAQLAMSHLNGHKLHGKPIRITLSKHQNVQLPREGQEDQGLTKDYGNSPLHRFKKPGSKNFQNIFPPSATLHLSNIPPSVSEEDLKVLFSSNGGVVKGFKFFQKDRKMALIQMGSVEEAVQALIDLHNHDLGENHHLRVSFSKSTI

SEQ ID NO: 817 - protein, 557 aa, Homo sapiens
MDGIVPDIAVGTKRGSDELFSTCVTNGPFIMSSNSASAANGNDSKKFKGDSRSAGVPSRVIHIRKLPIDVTEGEVISLGLPFGKVTNLLMLKGKNQAFIEMNTEEAANTMVNYYTSVTPVLRGQPIYIQFSNHKELKTDSSPNQARAQAALQAVNSVQSGNLALAASAAAVDAGMAMAGQSPVLRIIVENLFYPVTLDVLHQIFSKFGTVLKIITFTKNNQFQALLQYADPVSAQHAKLSLDGQNIYNACCTLRIDFSKLTSLNVKYNNDKSRDYTRPDLPSGDSQPSLDQTMAAAFGAPGIISASPYAGAGFPPTFAIPQAAGLSVPNVHGALAPLAIPSAAAAAAAAGRIAIPGLAGAGNSVLLVSNLNPERVTPQSLFILFGVYGDVQRVKILFNKKENALVQMADGNQAQLAMSHLNGHKLHGKPIRITLSKHQNVQLPREGQEDQGLTKDYGNSPLHRFKKPGSKNFQNIFPPSATLHLSNIPPSVSEEDLKVLFSSNGGVVKGFKFFQKDRKMALIQMGSVEEAVQALIDLHNHDLGENHHLRVSFSKSTI

SEQ ID NO: 818 - protein, 550 aa, Homo sapiens
MDGIVPDIAVGTKRGSDELFSTCVTNGPFIMSSNSASAANGNDSKKFKGDSRSAGVPSRVIHIRKLPIDVTEGEVISLGLPFGKVTNLLMLKGKNQAFIEMNTEEAANTMVNYYTSVTPVLRGQPIYIQFSNHKELKTDSSPNQARAQAALQAVNSVQSGNLALAASAAAVDAGMAMAGQSPVLRIIVENLFYPVTLDVLHQIFSKFGTVLKIITFTKNNQFQALLQYADPVSAQHAKLSLDGQNIYNACCTLRIDFSKLTSLNVKYNNDKSRDYTRPDLPSGDSQPSLDQTMAAAFASPYAGAGFPPTFAIPQAAGLSVPNVHGALAPLAIPSAAAAAAAAGRIAIPGLAGAGNSVLLVSNLNPERVTPQSLFILFGVYGDVQRVKILFNKKENALVQMADGNQAQLAMSHLNGHKLHGKPIRITLSKHQNVQLPREGQEDQGLTKDYGNSPLHRFKKPGSKNFQNIFPPSATLHLSNIPPSVSEEDLKVLFSSNGGVVKGFKFFQKDRKMALIQMGSVEEAVQALIDLHNHDLGENHHLRVSFSKSTI

SEQ ID NO: 819 - protein, 527 aa, Homo sapiens
MSSNSASAANGNDSKKFKGDSRSAGVPSRVIHIRKLPIDVTEGEVISLGLPFGKVTNLLMLKGKNQAFIEMNTEEAANTMVNYYTSVTPVLRGQPIYIQFSNHKELKTDSSPNQARAQAALQAVNSVQSGNLALAASAAAVDAGMAMAGQSPVLRIIVENLFYPVTLDVLHQIFSKFGTVLKIITFTKNNQFQALLQYADPVSAQHAKLSLDGQNIYNACCTLRIDFSKLTSLNVKYNNDKSRDYTRPDLPSGDSQPSLDQTMAAAFGAPGIISASPYAGAGFPPTFAIPQAAGLSVPNVHGALAPLAIPSAAAAAAAAGRIAIPGLAGAGNSVLLVSNLNPERVTPQSLFILFGVYGDVQRVKILFNKKENALVQMADGNQAQLAMSHLNGHKLHGKPIRITLSKHQNVQLPREGQEDQGLTKDYGNSPLHRFKKPGSKNFQNIFPPSATLHLSNIPPSVSEEDLKVLFSSNGGVVKGFKFFQKDRKMALIQMGSVEEAVQALIDLHNHDLGENHHLRVSFSKSTI

SEQ ID NO: 820 - protein, 531 aa, Homo sapiens; identical to SEQ ID NO: 815

SEQ ID NO: 821 - protein, 501 aa, Homo sapiens
MSSNSASAANGNDSKKFKGDSRSAGVPSRVIHIRKLPIDVTEGEVISLGLPFGKVTNLLMLKGKNQAFIEMNTEEAANTMVNYYTSVTPVLRGQPIYIQFSNHKELKTDSSPNQARAQAALQAVNSVQSGNLALAASAAAVDAGMAMAGQSPVLRIIVENLFYPVTLDVLHQIFSKFGTVLKIITFTKNNQFQALLQYADPVSAQHAKLSLDGQNIYNACCTLRIDFSKLTSLNVKYNNDKSRDYTRPDLPSGDSQPSLDQTMAAAFGLSVPNVHGALAPLAIPSAAAAAAAAGRIAIPGLAGAGNSVLLVSNLNPERVTPQSLFILFGVYGDVQRVKILFNKKENALVQMADGNQAQLAMSHLNGHKLHGKPIRITLSKHQNVQLPREGQEDQGLTKDYGNSPLHRFKKPGSKNFQNIFPPSATLHLSNIPPSVSEEDLKVLFSSNGGVVKGFKFFQKDRKMALIQMGSVEEAVQALIDLHNHDLGENHHLRVSFSKSTI

SEQ ID NO: 822 - protein, 1027 aa, Homo sapiens
LFFRVVLAKLNGRYGDSHVPLSPPSSTFCTRAVHLLQLMNLFDASLSLRVHSLQGSLLVLYILWIWTNVRISTIIVSYRTVSQPKWGDWPQFAYLRDMTYPYMVASIRAVRTAGRWCVSNACEQNPHLDGGTCTQLALNPGYLFLNQQLGKCDRVNFWVTSRFILQRREVDSVICFSKGCKWNHEYQEQNTGNNLYVCKHLLLSRLWPLCIMLATFFMRRMSSISACDFFFFFFFFFFFFDRVLLCRLGWSAMVHGHGLSLVNFCIFTRNRVLSCCPGSQTPGFKQSAHLDLPKCWDYRCEPPRLATIPWSKKSKRLSASVQFRLRKNFFTCKIYITNLAAALRAPIPELPLLSLAQRLPPGRPLLGTMARGGRLGLALGLLLALVLAPRVLRAKPTVRKERVVRPDSELGERPPEDNQSFQYDHEAFLGKEDSKNFDELTPDESKERLGKIVDRIDNDGYGFVTTEELKTWIKRVQKRYIFDNVAKVWKDYDRDKDDNISWEEYKQATYGYYTETPQSFMILQIITPLKRCCHVMREDSKLQTSMVTQLLRRSSLPFCILKSLNIRKLWLWKPWRTSTRTGMGLWIRMSILRICFPMRRMALSQTGFYQNGSSLTNSGITRTGSTKMRFATGSSLKIMIMHRLRPGIWYMSQTKTRMRSLKRKYWRTGTCLLEAKLPITGKISQKIMMSFDRHSPEYGRLSAFCYCLGLLLQLSNLQQLSHKKQVYTSDWGIKIVFRSVFTGKWTSLVFQDFSQNTKPWIAILAGDILVQHDLKLFFFSIKTRGTKLEKALFFRSVGGRQYEVTAVYFNYQIFYICHCIVGKSLSESGIILGKLISEQVYFRFFLFDFILVITYCKWCINLHAFSSMDLLICTVNPCLCLFFYKAIKKDNVKKKGMRGKDECQTFEELNDKHIYLRKLSYANEVGLIFEIVNRNTMHFLNDHLEGGGILGKPNGVEFWIMSHPVQIHDPQTCPPTTAYTMEGQGDTLSCGLNWQTQPVQIEISPCKEEVNEIKDPPKEKKKKLYHP

SEQ ID NO: 823 - protein, 331 aa, Homo sapiens
MARGGRGRRLGLALGLLLALVLAPRVLRAKPTVRKERVVRPDSELGERPPEDNQSFQYDHEAFLGKEDSKTFDQLTPDESKERLGKIVDRIDNDGDGFVTTEELKTWIKRVQKRYIFDNVAKVWKDYDRDKDDKISWEEYKQATYGYYLGNPAEFHDSSDHHTFKKMLPRDERRFKAADLNGDLTATREEFTAFLHPEEFEHMKEIVVLETLEDIDKNGDGFVDQDEYIADMFSHEENGPEPDWVLSEREQFNEFRDLNKDGKLDKDEIRHWILPQDYDHAQAEARHLVYESDKNKDEKLTKEEILENWNMFVGSQATNYGEDLTKNHDEL

SEQ ID NO: 824 - protein, 331 aa, Homo sapiens; identical to SEQ ID NO: 823

SEQ ID NO: 825 - protein, 331 aa, Homo sapiens; identical to SEQ ID NO: 823

SEQ ID NO: 826 - protein, 2639 aa, Homo sapiens
MSSSHSRAGQSAAGAAPGGGVDTRDAEMPATEKDLAEDAPWKKIQQNTFTRWCNEHLKCVSKRIANLQTDLSDGLRLIALLEVLSQKKMHRKHNQRPTFRQMQLENVSVALEFLDRESIKLVSIDSKAIVDGNLKLILGLIWTLILHYSISMPMWDEEEDEEAKKQTPKQRLLGWIQNKLPQLPITNFSRDWQSGRALGALVDSCAPGLCPDWDSWDASKPVTNAREAMQQADDWLGIPQVITPEEIVDPNVDEHSVMTYLSQFPKAKLKPGAPLRPKLNPKKARAYGPGIEPTGNMVKKRAEFTVETRSAGQGEVLVYVEDPAGHQEEAKVTANNDKNRTFSVWYVPEVTGTHKVTVLFAGQHIAKSPFEVYVDKSQGDASKVTAQGPGLEPSGNIANKTTYFEIFTAGAGTGEVEVVIQDPMGQKGTVEPQLEARGDSTYRCSYQPTMEGVHTVHVTFAGVPIPRSPYTVTVGQACNPSACRAVGRGLQPKGVRVKETADFKVYTKGAGSGELKVTVKGPKGEERVKQKDLGDGVYGFEYYPMVPGTYIVTITWGGQNIGRSPFEVKVGTECGNQKVRAWGPGLEGGVVGKSADFVVEAIGDDVGTLGFSVEGPSQAKIECDDKGDGSCDVRYWPQEAGEYAVHVLCNSEDIRLSPFMADIRDAPQDFHPDRVKARGPGLEKTGVAVNKPAEFTVDAKHGGKAPLRVQVQDNEGCPVEALVKDNGNGTYSCSYVPRKPVKHTAMVSWGGVSIPNSPFRVNVGAGSHPNKVKVYGPGVAKTGLKAHEPTYFTVDCAEAGQGDVSIGIKCAPGVVGPAEADIDFDIIRNDNDTFTVKYTPRGAGSYTIMVLFADQATPTSPIRVKVEPSHDASKVKAEGPGLSRTGVELGKPTHFTVNAKAAGKGKLDVQFSGLTKGDAVRDVDIIDHHDNTYTVKYTPVQQGPVGVNVTYGGDPIPKSPFSVAVSPSLDLSKIKVSGLGEKVDVGKDQEFTVKSKGAGGQGKVASKIVGPSGAAVPCKVEPGLGADNSVVRFLPREEGPYEVEVTYDGVPVPGSPFPLEAVAPTKPSKVKAFGPGLQGGSAGSPARFTIDTKGAGTGGLGLTVEGPCEAQLECLDNGDGTCSVSYVPTEPGDYNINILFADTHIPGSPFKAHVVPCFDASKVKCSGPGLERATAGEVGQFQVDCSSAGSAELTIEICSEAGLPAEVYIQDHGDGTHTITYIPLCPGAYTVTIKYGGQPVPNFPSKLQVEPAVDTSGVQCYGPGIEGQGVFREATTEFSVDARALTQTGGPHVKARVANPSGNLTETYVQDRGDGMYKVEYTPYEEGLHSVDVTYDGSPVPSSPFQVPVTEGCDPSRVRVHGPGIQSGTTNKPNKFTVETRGAGTGGLGLAVEGPSEAKMSCMDNKDGSCSVEYIPYEAGTYSLNVTYGGHQVPGSPFKVPVHDVTDASKVKCSGPGLSPGMVRANLPQSFQVDTSKAGVAPLQVKVQGPKGLVEPVDVVDNADGTQTVNYVPSREGPYSISVLYGDEEVPRSPFKVKVLPTHDASKVKASGPGLNTTGVPASLPVEFTIDAKDAGEGLLAVQITDPEGKPKKTHIQDNHDGTYTVAYVPDVTGRYTILIKYGGDEIPFSPYRVRAVPTGDASKCTVTGAGIGPTIQIGEETVITVDTKAAGKGKVTCTVCTPDGSEVDVDVVENEDGTFDIFYTAPQPGKYVICVRFGGEHVPNSPFQVTALAGDQPSVQPPLRSQQLAPQYTYAQGGQQTWAPERPLVGVNGLDVTSLRPFDLVIPFTIKKGEITGEVRMPSGKVAQPTITDNKDGTVTVRYAPSEAGLHEMDIRYDNMHIPGSPLQFYVDYVNCGHVTAYGPGLTHGVVNKPATFTVNTKDAGEGGLSLAIEGPSKAEISCTDNQDGTCSVSYLPVLPGDYSILVKYNEQHVPGSPFTARVTGDDSMRMSHLKVGSAADIPINISETDLSLLTATVVPPSGREEPCLLKRLRNGHVGISFVPKETGEHLVHVKKNGQHVASSPIPVVISQSEIGDASRVRVSGQGLHEGHTFEPAEFIIDTRDAGYGGLSLSIEGPSKVDINTEDLEDGTCRVTYCPTEPGNYIINIKFADQHVPGSPFSVKVTGEGRVKESITRRRRAPSVANVGSHCDLSLKIPEISIQDMTAQVTSPSGKTHEAEIVEGENHTYCIRFVPAEMGTHTVSVKYKGQHVPGSPFQFTVGPLGEGGAHKVRAGGPGLERAEAGVPAEFSIWTREAGAGGLAIAVEGPSKAEISFEDRKDGSCGVAYVVQEPGDYEVSVKFNEEHIPDSPFVVPVASPSGDARRLTVSSLQESGLKVNQPASFAVSLNGAKGAIDAKVHSPSGALEECYVTEIDQDKYAVRFIPRENGVYLIDVKFNGTHIPGSPFKIRVGEPGHGGDPGLVSAYGAGLEGGVTGNPAEFVVNTSNAGAGALSVTIDGPSKVKMDCQECPEGYRVTYTPMAPGSYLISIKYGGPYHIGGSPFKAKVTGPRLVSNHSLHETSSVFVDSLTKATCAPQHGAPGPGPADASKVVAKGLGLSKAYVGQKSSFTVDCSKAGNNMLLVGVHGPRTPCEEILVKHVGSRLYSVSYLLKDKGEYTLVVKWGDEHIPGSPYRVVVP

SEQ ID NO: 827 - protein, 838 aa, Homo sapiens
MPSGKVAQPTITDNKDGTVTVRYAPSEAGLHEMDIRYDNMHIPGSPLQFYVDYVNCGHVTAYGPGLTHGVVNKPATFTVNTKDAGEGGLSLAIEGPSKAEISCTDNQDGTCSVSYLPVLPGDYSILVKYNEQHVPGSPFTARVTGDDSMRMSHLKVGSAADIPINISETDLSLLTATVVPPSGREEPCLLKRLRNGHVGISFVPKETGEHLVHVKKNGQHVASSPIPVVISQSEIGDASRVRVSGQGLHEGHTFEPAEFIIDTRDAGYGGLSLSIEGPSKVDINTEDLEDGTCRVTYCPTEPGNYIINIKFADQHVPGSPFSVKVTGEGRVKESITRRRRAPSVANVGSHCDLSLKIPEISIQDMTAQVTSPSGKTHEAEIVEGENHTYCIRFVPAEMGTHTVSVKYKGQHVPGSPFQFTVGPLGEGGAHKVRAGGPGLERAEAGVPAEFSIWTREAGAGGLAIAVEGPSKAEISFEDRKDGSCGVAYVVQEPGDYEVSVKFNEEHIPDSPFVVPVASPSGDARRLTVSSLQESGLKVNQPASFAVSLNGAKGAIDAKVHSPSGALEECYVTEIDQDKYAVRFIPRENGVYLIDVKFNGTHIPGSPFKIRVGEPGHGGDPGLVSAYGAGLEGGVTGNPAEFVVNTSNAGAGALSVTIDGPSKVKMDCQECPEGYRVTYTPMAPGSYLISIKYGGPYHIGGSPFKAKVTGPRLVSNHSLHETSSVFVDSLTKATCAPQHGAPGPGPADASKVVAKGLGLSKAYVGQKSSFTVDCSKAGNNMLLVGVHGPRTPCEEILVKHVGSRLYSVSYLLKDKGEYTLVVKWGDEHIPGSPYRVVVP

SEQ ID NO: 828 - protein, 2647 aa, Homo sapiens
MSSSHSRAGQSAAGAAPGGGVDTRDAEMPATEKDLAEDAPWKKIQQNTFTRWCNEHLKCVSKRIANLQTDLSDGLRLIALLEVLSQKKMHRKHNQRPTFRQMQLENVSVALEFLDRESIKLVSIDSKAIVDGNLKLILGLIWTLILHYSISMPMWDEEEDEEAKKQTPKQRLLGWIQNKLPQLPITNFSRDWQSGRALGALVDSCAPGLCPDWDSWDASKPVTNAREAMQQADDWLGIPQVITPEEIVDPNVDEHSVMTYLSQFPKAKLKPGAPLRPKLNPKKARAYGPGIEPTGNMVKKRAEFTVETRSAGQGEVLVYVEDPAGHQEEAKVTANNDKNRTFSVWYVPEVTGTHKVTVLFAGQHIAKSPFEVYVDKSQGDASKVTAQGPGLEPSGNIANKTTYFEIFTAGAGTGEVEVVIQDPMGQKGTVEPQLEARGDSTYRCSYQPTMEGVHTVHVTFAGVPIPRSPYTVTVGQACNPSACRAVGRGLQPKGVRVKETADFKVYTKGAGSGELKVTVKGPKGEERVKQKDLGDGVYGFEYYPMVPGTYIVTITWGGQNIGRSPFEVKVGTECGNQKVRAWGPGLEGGVVGKSADFVVEAIGDDVGTLGFSVEGPSQAKIECDDKGDGSCDVRYWPQEAGEYAVHVLCNSEDIRLSPFMADIRDAPQDFHPDRVKARGPGLEKTGVAVNKPAEFTVDAKHGGKAPLRVQVQDNEGCPVEALVKDNGNGTYSCSYVPRKPVKHTAMVSWGGVSIPNSPFRVNVGAGSHPNKVKVYGPGVAKTGLKAHEPTYFTVDCAEAGQGDVSIGIKCAPGVVGPAEADIDFDIIRNDNDTFTVKYTPRGAGSYTIMVLFADQATPTSPIRVKVEPSHDASKVKAEGPGLSRTGVELGKPTHFTVNAKAAGKGKLDVQFSGLTKGDAVRDVDIIDHHDNTYTVKYTPVQQGPVGVNVTYGGDPIPKSPFSVAVSPSLDLSKIKVSGLGEKVDVGKDQEFTVKSKGAGGQGKVASKIVGPSGAAVPCKVEPGLGADNSVVRFLPREEGPYEVEVTYDGVPVPGSPFPLEAVAPTKPSKVKAFGPGLQGGSAGSPARFTIDTKGAGTGGLGLTVEGPCEAQLECLDNGDGTCSVSYVPTEPGDYNINILFADTHIPGSPFKAHVVPCFDASKVKCSGPGLERATAGEVGQFQVDCSSAGSAELTIEICSEAGLPAEVYIQDHGDGTHTITYIPLCPGAYTVTIKYGGQPVPNFPSKLQVEPAVDTSGVQCYGPGIEGQGVFREATTEFSVDARALTQTGGPHVKARVANPSGNLTETYVQDRGDGMYKVEYTPYEEGLHSVDVTYDGSPVPSSPFQVPVTEGCDPSRVRVHGPGIQSGTTNKPNKFTVETRGAGTGGLGLAVEGPSEAKMSCMDNKDGSCSVEYIPYEAGTYSLNVTYGGHQVPGSPFKVPVHDVTDASKVKCSGPGLSPGMVRANLPQSFQVDTSKAGVAPLQVKVQGPKGLVEPVDVVDNADGTQTVNYVPSREGPYSISVLYGDEEVPRSPFKVKVLPTHDASKVKASGPGLNTTGVPASLPVEFTIDAKDAGEGLLAVQITDPEGKPKKTHIQDNHDGTYTVAYVPDVTGRYTILIKYGGDEIPFSPYRVRAVPTGDASKCTVTVSIGGHGLGAGIGPTIQIGEETVITVDTKAAGKGKVTCTVCTPDGSEVDVDVVENEDGTFDIFYTAPQPGKYVICVRFGGEHVPNSPFQVTALAGDQPSVQPPLRSQQLAPQYTYAQGGQQTWAPERPLVGVNGLDVTSLRPFDLVIPFTIKKGEITGEVRMPSGKVAQPTITDNKDGTVTVRYAPSEAGLHEMDIRYDNMHIPGSPLQFYVDYVNCGHVTAYGPGLTHGVVNKPATFTVNTKDAGEGGLSLAIEGPSKAEISCTDNQDGTCSVSYLPVLPGDYSILVKYNEQHVPGSPFTARVTGDDSMRMSHLKVGSAADIPINISETDLSLLTATVVPPSGREEPCLLKRLRNGHVGISFVPKETGEHLVHVKKNGQHVASSPIPVVISQSEIGDASRVRVSGQGLHEGHTFEPAEFIIDTRDAGYGGLSLSIEGPSKVDINTEDLEDGTCRVTYCPTEPGNYIINIKFADQHVPGSPFSVKVTGEGRVKESITRRRRAPSVANVGSHCDLSLKIPEISIQDMTAQVTSPSGKTHEAEIVEGENHTYCIRFVPAEMGTHTVSVKYKGQHVPGSPFQFTVGPLGEGGAHKVRAGGPGLERAEAGVPAEFSIWTREAGAGGLAIAVEGPSKAEISFEDRKDGSCGVAYVVQEPGDYEVSVKFNEEHIPDSPFVVPVASPSGDARRLTVSSLQESGLKVNQPASFAVSLNGAKGAIDAKVHSPSGALEECYVTEIDQDKYAVRFIPRENGVYLIDVKFNGTHIPGSPFKIRVGEPGHGGDPGLVSAYGAGLEGGVTGNPAEFVVNTSNAGAGALSVTIDGPSKVKMDCQECPEGYRVTYTPMAPGSYLISIKYGGPYHIGGSPFKAKVTGPRLVSNHSLHETSSVFVDSLTKATCAPQHGAPGPGPADASKVVAKGLGLSKAYVGQKSSFTVDCSKAGNNMLLVGVHGPRTPCEEILVKHVGSRLYSVSYLLKDKGEYTLVVKWGHEHIPGSPYRVVVP

SEQ ID NO: 829 - protein, 331 aa, Homo sapiens
MWSRSQVYEVSVKFNEEHIPDSPFVVPVASPSGDARRLTVSSLQESGLKVNQPASFAVSLNGAKGAIDAKVHSPSGALEECYVTEIDQDKYAVRFIPRENGVYLIDVKFNGTHIPGSPFKIRVGEPGHGGDPGLVSAYGAGLEGGVTGNPAEFVVNTSNAGAGALSVTIDGPSKVKMDCQECPEGYRVTYTPMAPGSYLISIKYGGPYHIGGSPFKAKVTGPRLVSNHSLHETSSVFVDSLTKATCAPQHGAPGPGPADASKVVAKGLGLSKAYVGQKSSFTVDCSKAGNNMLLVGVHGPRTPCEEILVKHVGSRLYSVSYLRSPASPASR

SEQ ID NO: 830 - protein, 2647 aa, Homo sapiens
MSSSHSRAGQSAAGAAPGGGVDTRDAEMPATEKDLAEDAPWKKIQQNTFTRWCNEHLKCVSKRIANLQTDLSDGLRLIALLEVLSQKKMHRKHNQRPTFRQMQLENVSVALEFLDRESIKLVSIDSKAIVDGNLKLILGLIWTLILHYSISMPMWDEEEDEEAKKQTPKQRLLGWIQNKLPQLPITNFSRDWQSGRALGALVDSCAPGLCPDWDSWDASKPVTNAREAMQQADDWLGIPQVITPEEIVDPNVDEHSVMTYLSQFPKAKLKPGAPLRPKLNPKKARAYGPGIEPTGNMVKKRAEFTVETRSAGQGEVLVYVEDPAGHQEEAKVTANNDKNRTFSVWYVPEVTGTHKVTVLFAGQHIAKSPFEVYVDKSQGDASKVTAQGPGLEPSGNIANKTTYFEIFTAGAGTGEVEVVIQDPMGQKGTVEPQLEARGDSTYRCSYQPTMEGVHTVHVTFAGVPIPRSPYTVTVGQACNPSACRAVGRGLQPKGVRVKETADFKVYTKGAGSGELKVTVKGPKGEERVKQKDLGDGVYGFEYYPMVPGTYIVTITWGGQNIGRSPFEVKVGTECGNQKVRAWGPGLEGGVVGKSADFVVEAIGDDVGTLGFSVEGPSQAKIECDDKGDGSCDVRYWPQEAGEYAVHVLCNSEDIRLSPFMADIRDAPQDFHPDRVKARGPGLEKTGVAVNKPAEFTVDAKHGGKAPLRVQVQDNEGCPVEALVKDNGNGTYSCSYVPRKPVKHTAMVSWGGVSIPNSPFRVNVGAGSHPNKVKVYGPGVAKTGLKAHEPTYFTVDCAEAGQGDVSIGIKCAPGVVGPAEADIDFDIIRNDNDTFTVKYTPRGAGSYTIMVLFADQATPTSPIRVKVEPSHDASKVKAEGPGLSRTGVELGKPTHFTVNAKAAGKGKLDVQFSGLTKGDAVRDVDIIDHHDNTYTVKYTPVQQGPVGVNVTYGGDPIPKSPFSVAVSPSLDLSKIKVSGLGEKVDVGKDQEFTVKSKGAGGQGKVASKIVGPSGAAVPCKVEPGLGADNSVVRFLPREEGPYEVEVTYDGVPVPGSPFPLEAVAPTKPSKVKAFGPGLQGGSAGSPARFTIDTKGAGTGGLGLTVEGPCEAQLECLDNGDGTCSVSYVPTEPGDYNINILFADTHIPGSPFKAHVVPCFDASKVKCSGPGLERATAGEVGQFQVDCSSAGSAELTIEICSEAGLPAEVYIQDHGDGTHTITYIPLCPGAYTVTIKYGGQPVPNFPSKLQVEPAVDTSGVQCYGPGIEGQGVFREATTEFSVDARALTQTGGPHVKARVANPSGNLTETYVQDRGDGMYKVEYTPYEEGLHSVDVTYDGSPVPSSPFQVPVTEGCDPSRVRVHGPGIQSGTTNKPNKFTVETRGAGTGGLGLAVEGPSEAKMSCMDNKDGSCSVEYIPYEAGTYSLNVTYGGHQVPGSPFKVPVHDVTDASKVKCSGPGLSPGMVRANLPQSFQVDTSKAGVAPLQVKVQGPKGLVEPVDVVDNADGTQTVNYVPSREGPYSISVLYGDEEVPRSPFKVKVLPTHDASKVKASGPGLNTTGVPASLPVEFTIDAKDAGEGLLAVQITDPEGKPKKTHIQDNHDGTYTVAYVPDVTGRYTILIKYGGDEIPFSPYRVRAVPTGDASKCTVTVSIGGHGLGAGIGPTIQIGEETVITVDTKAAGKGKVTCTVCTPDGSEVDVDVVENEDGTFDIFYTAPQPGKYVICVRFGGEHVPNSPFQVTALAGDQPSVQPPLRSQQLAPQYTYAQGGQQTWAPERPLVGVNGLDVTSLRPFDLVIPFTIKKGEITGEVRMPSGKVAQPTITDNKDGTVTVRYAPSEAGLHEMDIRYDNMHIPGSPLQFYVDYVNCGHVTAYGPGLTHGVVNKPATFTVNTKDAGEGGLSLAIEGPSKAEISCTDNQDGTCSVSYLPVLPGDYSILVKYNEQHVPGSPFTARVTGDDSMRMSHLKVGSAADIPINISETDLSLLTATVVPPSGREEPCLLKRLRNGHVGISFVPKETGEHLVHVKKNGQHVASSPIPVVISQSEIGDASRVRVSGQGLHEGHTFEPAEFIIDTRDAGYGGLSLSIEGPSKVDINTEDLEDGTCRVTYCPTEPGNYIINIKFADQHVPGSPFSVKVTGEGRVKESITRRRRAPSVANVGSHCDLSLKIPEISIQDMTAQVTSPSGKTHEAEIVEGENHTYCIRFVPAEMGTHTVSVKYKGQHVPGSPFQFTVGPLGEGGAHKVRAGGPGLERAEAGVPAEFSIWTREAGAGGLAIAVEGPSKAEISFEDRKDGSCGVAYVVQEPGDYEVSVKFNEEHIPDSPFVVPVASPSGDARRLTVSSLQESGLKVNQPASFAVSLNGAKGAIDAKVHSPSGALEECYVTEIDQDKYAVRFIPRENGVYLIDVKFNGTHIPGSPFKIRVGEPGHGGDPGLVSAYGAGLEGGVTGNPAEFVVNTSNAGAGALSVTIDGPSKVKMDCQECPEGYRVTYTPMAPGSYLISIKYGGPYHIGGSPFKAKVTGPRLVSNHSLHETSSVFVDSLTKATCAPQHGAPGPGPADASKVVAKGLGLSKAYVGQKSSFTVDCSKAGNNMLLVGVHGPRTPCEEILVKHVGSRLYSVSYLLKDKGEYTLVVKWGDEHIPGSPYRVVVP

SEQ ID NO: 831 - protein, 676 aa, Homo sapiens
MAAAKVALTKRADPAELRTIFLKYASIEKNGEFFMSPNDFVTRYLNIFGESQPNPKTVELLSGVVDQTKDGLISFQEFVAFESVLCAPDALFMVAFQLFDKAGKGEVTFEDVKQVFGQTTIHQHIPFNWDSEFVQLHFGKERKRHLTYAEFTQFLLEIQLEHAKQAFVQRDNARTGRVTAIDFRDIMVTIRPHVLTPFVEECLVAAAGGTTSHQVSFSYFNGFNSLLNNMELIRKIYSTLAGTRKDVEVTKEEFVLAAQKFGQVTPMEVDILFQLADLYEPRGRMTLADIERIAPLEEGTLPFNLAEAQRQQKASGDSARPVLLQVAESAYRFGLGSVAGAVGATAVYPIDLVKTRMQNQRSTGSFVGELMYKNSFDCFKKVLRYEGFFGLYRGLLPQLLGVAPEKAIKLTVNDFVRDKFMHKDGSVPLAAEILAGGCAGGSQVIFTNPLEIVKIRLQVAGEITTGPRVSALSVVRDLGFFGIYKGAKACFLRDIPFSAIYFPCYAHVKASFANEDGQVSPGSLLLAGAIAGMPAASLVTPADVIKTRLQVAARAGQTTYSGVIDCFRKILREEGPKALWKGAGARVFRSSPQFGVTLLTYELLQRWFYIDFGGVKPMGSEPVPKSRINLPAPNPDHVGGYKLAVATFAGIENKFGLYLPLFKPSVSTSKAIGGGP

SEQ ID NO: 832 - protein, 224 aa, Homo sapiens
HTCPPCPAPELLGGPSVFLFPPKPKDTLMISRTPEVTCVVVDVSHEDPQVKFNWYVDGVQVHNAKTKPREQQYNSTYRVVSVLTVLHQNWLDGKEYKCKVSNKALPAPIEKTISKAKGQPREPQVYTLPPSREEMTKNQVSLTCLVKGFYPSDIAVEWESNGQPENNYKTTPPVLDSDGSFFLYSKLTVDKSRWQQGNVFSCSVMHEALHNHYTQKSLSLSPGK

SEQ ID NO: 833 - protein, 428 aa, Homo sapiens
PLVLQESGPGLVKPSEALSLTCTVSGDSINTILYYWSWIRQPPGKGLEWIGYIYYSGSTYGNPSLKSRVTISVNTSKNQFYSKLSSVTAADTAVYYCARVPLVVNPWGQGTLVTVSSASTKGPSVFPLAPSSKSTSGGTAALGCLVKDYFPQPVTVSWNSGALTSGVHTFPAVLQSSGLYSLSSVVTVPSSSLGTQTYICNVNHKPSNTKVDKRVAPELLGGPSVFLFPPKPKDTLMISRTPEVTCVVVDVSHEDPQVKFNWYVDGVQVHNAKTKPREQQYNSTYRVVSVLTVLHQNWLDGKEYKCKVSNKALPAPIEKTISKAKGQPREPQVYTLPPSREEMTKNQVSLTCLVKGFYPSDIAVEWESNGQPENNYKTTPPVLDSDGSFFLYSKLTVDKSRWQQGNVFSCSVMHEALHNHYTQKSLSL

SEQ ID NO: 834 - protein, 206 aa, Homo sapiens
PSVFLFPPKPKDTLMISRTPEVTCVVVDVSHEDPQVKFNWYVDGVQVHNAKTKPREQQYNSTYRVVSVLTVLHQNWLDGKEYKCKVSNKALPAPIEKTISKAKGQPREPQVYTLPPSREEMTKNQVSLTCLVKGFYPSDIAVEWESNGQPENNYKTTPPVLDSDGSFFLYSKLTVDKSRWQQGNVFSCSVMHEALHNHYTQKSLSL

SEQ ID NO: 835 - protein, 224 aa, Homo sapiens
THTCPPCPAPELLGGPSVFLFPPKPKDTLMISRTPEVTCVVVDVSHEDPQVKFNWYVDGVQVHNAKTKPREQQYNSTYRVVSVLTVLHQNWLDGKEYKCKVSNKALPAPIEKTISKAKGQPREPQVYTLPPSREEMTKNQVSLTCLVKGFYPSDIAVEWESNGQPENNYKTTPPVLDSDGSFFLYSKLTVDKSRWQQGNVFSCSVMHEALHNHYTQKSLSLSPG

SEQ ID NO: 836 - protein, 225 aa, Homo sapiens
THTCPPCPAPELLGGPSVFLFPPKPKDTLMISRTPEVTCVVVDVSHEDPQVKFNWYVDGVQVHNAKTKPREQQYNSTYRVVSVLTVLHQNWLDGKEYKCKVSNKALPAPIEKTISKAKGQPREPQVYTLPPSREEMTKNQVSLTCLVKGFYPSDIAVEWESNGQPENNYKTTPPVLDSDGSFFLYSKLTVDKSRWQQGNVFSCSVMHEALHNHYTQKSLSLSPGK

SEQ ID NO: 837 - protein, 455 aa, Homo sapiens
EVQLVQSGGGVVQPGRSLRLSCSSSGFIFSSYAMYWVRQAPGKGLEWVAIIWDDGSDQHYADSVKGRFTISRNDSKNTLFLQMDSLRPEDTGVYFCARDGGHGFCSSASCFGPDYWGQGTPVTVSSASTKGPSVFPLAPSSKSTSGGTAALGCLVKDYFPQPVTVSWNSGALTSGVHTFPAVLQSSGLYSLSSVVTVPSSSLGTQTYICNVNHKPSNTKVDKRVEPKSCDKTHTCPPCPAPELLGGPSVFLFPPKPKDTLMISRTPEVTCVVVDVSHEDPQVKFNWYVDGVQVHNAKTKPREQQYNSTYRVVSVLTVLHQNWLDGKEYKCKVSNKALPAPIEKTISKAKGQPREPQVYTLPPSREEMTKNQVSLTCLVKGFYPSDIAVEWESNGQPENNYKTTPPVLDSDGSFFLYSKLTVDKSRWQQGNVFSCSVMHEALHNHYTQKSLSLSPG

SEQ ID NO: 838 - protein, 224 aa, Homo sapiens
HTCPPCPAPELLGGPSVFLFPPKPKDTLMISRTPEVTCVVVDVSHEDPQVKFNWYVDGVEVHNAKTKPREEQYNSTYRVVSVLTVLHQNWLDGKEYKCKVSNKALPAPIEKTISKAKGQPREPQVYTLPPSREEMTKNQVSLTCLVKGFYPSDIAVEWESNGQPENNYKTTPPVLDSDGSFFLYSKLTVDKSRWQQGNVFSCSVMHEALHNHYTQKSLSLSPGK

SEQ ID NO: 839 - protein, 223 aa, Homo sapiens
TCPPCPAPELLGGPSVFLFPPKPKDTLMISRTPEVTCVVVDVSHEDPQVKFNWYVDGVQVHNAKTKPREQQYNSTYRVVSVLTVLHQNWLDGKEYKCKVSNKALPAPIEKTISKAKGQPREPQVYTLPPSREEMTKNQVSLTCLVKGFYPSDIAVEWESNGQPENNYKTTPPVLDSDGSFFLYSKLTVDKSRWQQGNVFSCSVMHEALHNHYTQKSLSLSPGK

SEQ ID NO: 840 - protein, 485 aa, Homo sapiens
MTLWILPKFKAVDFSPSLAAYTHTWLLPRFLEILIQCGHCKRLAPEYEAAATRLKGIVPLAKVDCTANTNTCNKYGVSGYPTLKIFRDGEEAGAYDGPRTADGIVSHLKKQAGPASVPLRTEEEFKKFISDKDASIVGFFDDSFSEAHSEFLKAASNLRDNYRFAHTNVESLVNEYDDNGEGIILFRPSHLTNKFEDKTVAYTEQKMTSGKIKKFIQENIFGICPHMTEDNKDLIQGKDLLIAYYDVDYEKNAKGSNYWRNRVMMVAKKFLDAGHKLNFAVASRKTFSHELSDFGLESTAGEIPVVAIRTAKGEKFVMQEEFSRDGKALERFLQDYFDGNLKRYLKSEPIPESNDGPVKVVVAENFDEIVNNENKDVLIEFYAPWCGHCKNLEPKYKELGEKLSKDPNIVIAKMDATANDVPSPYEVRGFPTIYFSPANKKLNPKKYEGGRELSDFISYLQREATNPPVIQEEKPKKKKKAQEDL

SEQ ID NO: 841 - protein, 505 aa, Homo sapiens [sequence omitted]

SEQ ID NO: 842 - protein, 505 aa, Homo sapiens
MRLRRLALFPGVALLLAAARLAAASDVLELTDDNFESRISDTGSAGLMLVEFFAPWCGHCKRLAPEYEAAATRLKGIVPLAKVDCTANTNTCNKYGVSGYPTLKIFRDGEEAGAYDGPRTADGIVSHLKKQAGPASVPLRTEEEFKKFISDKDASIVGFFDDSFSEAHSEFLKAASNLRDNYRFAHTNVESLVNEYDDNGEGIILFRPSHLTNKFEDKTVAYTEQKMTSGKIKKFIQENIFGICPHMTEDNKDLIQGKDLLIAYYDVDYEKNAKGSNYWRNRVMMVAKKFLDAGHKLNFAVASRKTFSHELSDFGLESTAGEIPVVAIRTAKGEKFVMQEEFSRDGKALERFLQDYFDGNLKRYLKSEPIPESNDGPVKVVVAENFDEIVNNENKDVLIEFYAPWCGHCKNLEPKYKELGEKLSKDPNIVIAKMDATANDVPSPYEVRGFPTIYFSPANKKLNPKKYEGGRELSDFISYLQREATNPPVIQEEKPKKKKKAQEDL

SEQ ID NO: 843 - protein, 480 aa, Homo sapiens
MRLRRLALFPGVALLLAAARLAAASDFFAPWCGHCKRLAPEYEAAATRLKGIVPLAKVDCTANTNTCNKYGVSGYPTLKIFRDGEEAGAYDGPRTADGIVSHLKKQAGPASVPLRTEEEFKKFISDKDASIVGFFDDSFSEAHSEFLKAASNLRDNYRFAHTNVESLVNEYDDNGEGIILFRPSHLTNKFEDKTVAYTEQKMTSGKIKKFIQENIFGICPHMTEDNKDLIQGKDLLIAYYDVDYEKNAKGSNYWRNRVMMVAKKFLDAGHKLNFAVASRKTFSHELSDFGLESTAGEIPVVAIRTAKGEKFVMQEEFSRDGKALERFLQDYFDGNLKRYLKSEPIPESNDGPVKVVVAENFDEIVNNENKDVLIEFYAPWCGHCKNLEPKYKELGEKLSKDPNIVIAKMDATANDVPSPYEVRGFPTIYFSPANKKLNPKKYEGGRELSDFISYLQREATNPPVIQEEKPKKKKKAQEDL

SEQ ID NO: 844 - protein, 505 aa, Homo sapiens; identical to SEQ ID NO: 842

SEQ ID NO: 845 - protein, 734 aa, Homo sapiens [sequence omitted]

SEQ ID NO: 846 - protein, 415 aa, Homo sapiens
MMLGPEGGEGFVVKLRGLPWSCSVEDVQNFLSDCTIHDGAAGVHFIYTREGRQSGEAFVELGSEDDVKMALKKDRESMGHRYIEVFKSHRTEMDWVLKHSGPNSADSANDGFVRLRGLPFGCTKEEIVQFFSGLEIVPNGITLPVDPEGKITGEAFVQFASQELAEKALGKHKERIGHRYIEVFKSSQEEVRSYSDPPLKFMSVQRPGPYDRPGTARRYIGIVKQAGLERMRPGAYSTGYGGYEEYSGLSDGYGFTTDLFGRDLSYCLSGMYDHRYGDSEFTVQSTTGHCVHMRGLPYKATENDIYNFFSPLNPVRVHIEIGPDGRVTGEADVEFATHEEAVAAMSKDRANMQHRYIELFLNSTTGASNGAYSSQVMQGMGVSAAQATYSGLESQSVSGCYGAGYSGQNSMGGYD

SEQ ID NO: 847 - protein, 414 aa, Homo sapiens [sequence omitted]

SEQ ID NO: 848 - protein, 415 aa, Homo sapiens; identical to SEQ ID NO: 846

SEQ ID NO: 849 - protein, 415 aa, Homo sapiens; identical to SEQ ID NO: 846

SEQ ID NO: 850 - protein, 415 aa, Homo sapiens; identical to SEQ ID NO: 846

SEQ ID NO: 851 - protein, 415 aa, Homo sapiens; identical to SEQ ID NO: 846

SEQ ID NO: 852 - protein, 415 aa, Homo sapiens; identical to SEQ ID NO: 846

SEQ ID NO: 853 - protein, 491 aa, Homo sapiens
MASRCWRWWGWSAWPRTRLPPAGSTPSFCHHFSTQEKTPQICVVGSGPAGFYTAQHLLKHPQAHVDIYEKQPVPFGLVRFGVAPDHPEVKNVINTFTQTAHSGRCAFWGNVEVGRDVTVPELREAYHAVVLSYGAEDHRALEIPGEELPGVCSARAFVGWYNGLPENQELEPDLSCDTAVILGQGNVALDVARILLTPPEHLERTDITKAALGVLRQSRVKTVWLVGRRGPLQVAFTIKELREMIQLPGARPILDPVDFLGLQDKIKEVPRPRKRLTELLLRTATEKPGPAEAARQASASRAWGLRFFRSPQQVLPSPDGRRAAGVRLAVTRLEGVDEATRAVPTGDMEDLPCGLVLSSIGYKSRPVDPSVPFDSKLGVIPNVEGRVMDVPGLYCSGWVKRGPTGVIATTMTDSFLTGQMLLQDLKAGLLPSGPRPGYAAIQALLSSRGVRPVSFSDWEKLDAEEVARGQGTGKPREKLVDPQEMLRLLGH

SEQ ID NO: 854 - protein, 244 aa, Homo sapiens
LGTDPLAGCCSQPWLRAAGAGGAGRRGLGPGCLPPGAPREKTPQICVVGSGPAGFYTAQHLLKQHPQAHVDIYEKQPVPFGLVRFGVAPDHPEVKTAHSGRCAFWGNVEVGRDVTVPELREAYHAVVLSYGAEDHRALEIPGEELPGVCSARAFVGWYNGLPENQELEPDLSCDTAVILGQGNVALDVARILLTPPEHLERTDITKAALGVLRQSRVKTVWLVGRRGPLQVAFTIKRSPARGSG

SEQ ID NO: 855 - protein, 65 aa, Homo sapiens
MGARGGLRALSRGRSRAGAGLEKGFCHHFSTQEKTPQICVVGSGPAGFYTAQHLLKGAPSYWLCS

SEQ ID NO: 856 - protein, 497 aa, Homo sapiens
MASRCWRWWGWSAWPRTRLPPAGSTPSFCHHFSTQEKTPQICVVGSGPAGFYTAQHLLKHPQAHVDIYEKQPVPFGLVRFGVAPDHPEVKNVINTFTQTAHSGRCAFWGNVEVGRDVTVPELREAYHAVVLSYGAEDHRALEIPGEELPGVCSARAFVGWYNGLPENQELEPDLSCDTAVILGQGNVALDVARILLTPPEHLEALLLCQRTDITKAALGVLRQSRVKTVWLVGRRGPLQVAFTIKELREMIQLPGARPILDPVDFLGLQDKIKEVPRPRKRLTELLLRTATEKPGPAEAARQASASRAWGLRFFRSPQQVLPSPDGRRAAGVRLAVTRLEGVDEATRAVPTGDMEDLPCGLVLSSIGYKSRPVDPSVPFDSKLGVIPNVEGRVMDVPGLYCSGWVKRGPTGVIATTMTDSFLTGQMLLQDLKAGLLPSGPRPGYAAIQALLSSRGVRPVSFSDWEKLDAEEVARGQGTGKPREKLVDPQEMLRLLGH

SEQ ID NO: 857 - protein, 491 aa, Homo sapiens
MASRCWRWWGWSAWPRTRLPPAGSTPSFCHHFSTQEKTPQICVVGSGPAGFYTAQHLLKHPQAHVDIYEKQPVPFGLVRFGVAPDHPEVKNVINTFTQTAHSGRCAFWGNVEVGRDVTVPELQEAYHAVVLSYGAEDHRALEIPGEELPGVCSARAFVGWYNGLPENQELEPDLSCDTAVILGQGNVALDVARILLTPPEHLERTDITKAALGVLRQSRVKTVWLVGRRGPLQVAFTIKELREMIQLPGARPILDPVDFLGLQDKIKEVPRPRKRLTELLLRTATEKPGPAEAARQASASRAWGLRFFRSPQQVLPSPDGRRAAGVRLAVTRLEGVDEATRAVPTGDMEDLPCGLVLSSIGYKSRPVDPSVPFDSKLGVIPNVEGRVMDVPGLYCSGWVKRGPTGVIATTMTDSFLTGQMLLQDLKAGLLPSGPRPGYAAIQALLSSRGVRPVSFSDWEKLDAEEVARGQGTGKPREKLVDPQEMLRLLGH

SEQ ID NO: 858 - protein, 484 aa, Homo sapiens
SKRPCKCQSLEEQEKEDAGFCHHFSTQEKTPQICVVGSGPAGFYTAQHLLKQHPQAHVDIYEKQPVPFGLVRFGVAPDHPEVKNVINTFTQTAHSGRCAFWGNVEVGRDVTVPELREAYHAVVLSYGAEDHRALEIPGEELPGVCSARAFVGWYNGLPENQELEPDLSCDTAVILGQGNVALDVARILLTPPEHLERTDITKAALGVLRQSRVKTVWLVGRRGPLQVAFTIKELREMIQLPGARPILDPVDFLGLQDKIKEVPRPRKRLTELLLRTATEKPGPAEAARQASASRAWGLRFFRSPQQVLPSPDGRRAAGVRLAVTRLEGVDEATRAVPTGDMEDLPCGLVLSSIGYKSRPVDPSVPFDSKLGVIPNVEGRVMDVPGLYCSGWVKRGPTGVIATTMTDSFLTGQMLLQDLKAGLLPSGPRPGYAAIQALLSSRGVRPVSFSDWEKLDAEEVARGQGTGKPREKLVDPQEMLRLLGH

SEQ ID NO: 859 - protein, 268 aa, Homo sapiens
MFLVNSFLKGGGGGGGGGGGLGGGLGNVLGGLISGAGGGGGGGGGGGGGGGGGGGGTAMRILGGVISAISEAAAQYNPEPPPPRTHYSNIEANESEEVRQFRRLFAQLAGDDMEVSATELMNILNKVVTRHPDLKTDGFGIDTCRSMVAVMDSDTTGKLGFEEFKYLWNNIKRWQAIYKQFDTDRSGTICSSELPGAFEAAGFHLNEHLYNMIIRRYSDESGNMDFDNFISCLVRLDAMFRAFKSLDKDGTGQIQVNIQEWLQLTMYS

SEQ ID NO: 860 - protein, 243 aa, Homo sapiens
MAKVEQVLSLEPQHELKFRGPFTDVVTTNLKLGNPTDRNVCFKVKTTAPRRYCVRPNSGIIDAGASINVSVMLQPFDYDPNEKSKHKFMVQSMFAPTDTSDMEAVWKEAKPEDLMDSKLRCVFELPAENDKPHDVEINKIISTTASKTETPIVSKSLSSSLDDTEVKKVMEECKRLQGEVQRLREENKQFKEEDGLRMRKTVQSNSPISALAPTGKEEGLSTRLLALVVLFFIVGVIIGKIAL

SEQ ID NO: 861 - protein, 243 aa, Homo sapiens; identical to SEQ ID NO: 860

SEQ ID NO: 862 - protein, 243 aa, Homo sapiens; identical to SEQ ID NO: 860

SEQ ID NO: 863 - protein, 340 aa, Homo sapiens [sequence omitted]

SEQ ID NO: 864 - protein, 340 aa, Homo sapiens [sequence omitted]

SEQ ID NO: 865 - protein, 340 aa, Homo sapiens [sequence omitted]

SEQ ID NO: 866 - protein, 340 aa, Homo sapiens [sequence omitted]

SEQ ID NO: 867 - protein, 340 aa, Homo sapiens [sequence omitted]

SEQ ID NO: 868 - protein, 2432 aa, Homo sapiens
MLGLLVQFCTSHKEMDVSALLDFYMKNILMSKVKPPKYLLDSCAPLLRYLSHSEFKDLILPTIQKSLLRSPENVIETISSLLASVTLDLSQYAMDIVKGLAGHLKSNSPRLMDEAVLALRNLARQCSDSSAMESLTKHLFAILGGSEGKLTVVAQKMSVLSGIGSVSHHVVSGPSSQVLNGIVAELFIPFLQQEVHEGTLVHAVSVLALWCNRFTMEVPKKLTEWFKKAFSLKTSTSAVRHAYLQCMLASYRGDTLLQALDLLPLLIQTVEKAASQSTQVPTITEGVAAALLLLKLSVADSQAEAKLSSFWQLIVDEKKQVFTSEKFLVMASEDALCTVLHLTERLFLDHPHRLTGNKVQQYHRALVAVLLSRTWHVRRQAQQTVRKLLSSLGGFKLAHGLLEELKTVLSSHKVLPLEALVTDAGEVTEAGKAYVPPRVLQEALCVISGVPGLKGDVTDTEQLAQEMLIISHHPSLGPWLRWSSMNAMGSLSVLSPDRVLPQLISTITASVQNPALRLVTREEFAIMQTPAGELYDKSIIQSAQQDSIKKANMKRENKAYSFKEQIIELELKEEIKKKKGIKEEVQLTSKQKEMLQAQLDREAQVRRRLQELDGELEAALGLLDIILAKNPSGLTQYIPVLVDSFLPLLKSPLAAPRIKNPFLSLAACVMPSRLKALGTLVSHVTLRLLKPECVLDKSWCQEELSVAVKRAVMLLHTHTITSRVGKGEPGAAPLSAPAFSLVFPFLKMVLTEMPHHSEEEEEWMAQILQILTVQAQLRASPNTPPGRVDENGPELLPRVAMLRLLTWVIGTGSPRLQVLASDTLTTLCASSSGDDGCAFAEQEEVDVLLCALQSPCASVRETVLRGLMELHMVLPAPDTDEKNGLNLLRRLWVVKFDKEEEIRKLAERLWSMMGLDLQPDLCSLLIDDVIYHEAAVRQAGAEALSQAVARYQRQAAEVMGRLMEIYQEKLYRPPPVLDALGRVISESPPDQWEARCGLALALNKLSQYLDSSQVKPLFQFFVPDALNDRHPDVRKCMLDAALATLNTHGKENVNSLLPVFEEFLKNAPNDASYDAVRQSVVVLMGSLAKHLDKSDPKVKPIVAKLIAALSTPSQQVQESVASCLPPLVPAIKEDAGGMIQRLMQQLLESDKYAERKGAAYGLAGLVKGLGILSLKQQEMMAALTDAIQDKKNFRRREGALFAFEMLCTMLGKLFEPYVVHVLPHLLLCFGDGNQYVREAADDCAKAVMSNLSAHGVKLVLPSLLAALEEESWRTKAGSVELLGAMAYCAPKQLSSCLPNIVPKLTEVLTDSHVKVQKAGQQALRQIGSVIRNPEILAIAPVLLDALTDPSRKTQKCLQTLLDTKFVHFIDAPSLALIMPIVQRAFQDRSTDTRKMAAQIIGNMYSLTDQKDLAPYLPSVTPGLKASLLDPVPEVRTVSAKALGAMVKGMGESCFEDLLPWLMETLTYEQSSVDRSGAAQGLAEVMAGLGVEKLEKLMPEIVATASKVDIAPHVRDGYIMMFNYLPITFGDKFTPYVGPIIPCILKALADENEFVRDTALRAGQRVISMYAETAIALLLPQLEQGLFDDLWRIRFSSVQLLGDLLFHISGVTGKMTTETASEDDNFGTAQSNKAIITALGVERRNRVLAGLYMGRSDTQLVVRQASLHVWKIVVSNTPRTLREILPTLFGLLLGFLASTCADKRTIAARTLGDLVRKLGEKILPEIIPILEEGLRSQKSDERQGVCIGLSEIMKSTSRDAVLYFSESLVPTARKALCDPLEEVREAAAKTFEQLHSTIGHQALEDILPFLLKQLDDEEVSEFALDGLKQVMAIKSRVVLPYLVPKLTTPPVNTRVLAFLSSVAGDALTRHLGVILPAVMLALKEKLGTPDEQLEMANCQAVILSVEDDTGHRIIIEDLLEATRSPEVGMRQAAAIILNIYCSRSKADYTSHLRSLVSGLIRLFNDSSPVVLEESWDALNAITKKLDAGNQLALIEELHKEIRLIGNESKGEHVPGFCLPKKGVTSILPVLREGVLTGSPEQKEEAAKALGLVIRLTSADALRPSVVSITGPLIRILGDRFSWNVKAALLETLSLLLAKVGIALKPFLPQLQTTFTKALQDSNRGVRLKAADALGKLISIHIKVDPLFTELLNGIRAMEDPGVRDTMLQALRFVIQGAGAKVDAVIRKNIVSLLLSMLGHDEDNTRISSAGCLGELCAFLTEEELSAVLQQCLLADVSGIDWMVRHGRSLALSVAVNVAPGRLCAGRYSSDVQEMILSSATADRIPIAVSGVRGMGFLMRHHIETGGGQLPAKLSSLFVKCLQNPSSDIRLVAEKMIWWANKDPLPPLDPQAIKPILKALLDNTKDKNTVVRAYSDQAIVNLLKMRQGEEVFQSLSKILDVASLEVLNEVNRRSLKKLASQADSTEQVDDTILT

SEQ ID NO: 869 - protein, 2671 aa, Homo sapiens
MAADTQVSETLKRFAGKVTTASVKERREILSELGKCVAGKDLPEGAVKGLCKLFCLTLHRYRDAASRRALQAAIQQLAEAQPEATAKNLLHSLQSSGIGSKAGVPSKSSGSAALLALTWTCLLVRIVFPSRAKRQGDIWNKLVEVQCLLLLEVLGGSHKHAVDGAVKKLTKLWKENPGLVEQYLSAILSLEPNQNYAGMLGLLVQFCTSHKEMDVVSQHKSALLDFYMKNILMSKVKPPKYLLDSCAPLLRYLSHSEFKDLILPTIQKSLLRSPENVIETISSLLASVTLDLSQYAMDIVKGLAGHLKSNSPRLMDEAVLALRNLARQCSDSSAMESLTKHLFAILGGSEGKLTVVAQKMSVLSGIGSVSHHVVSGPSSQVLNGIVAELFIPFLQQEVHEGTLVHAVSVLALWCNRFTMEVPKKLTEWFKKAFSLKTSTSAVRHAYLQCMLASYRGDTLLQALDLLPLLIQTVEKAASQSTQVPTITEGVAAALLLLKLSVADSQAEAKLSSFWQLIVDEKKQVFTSEKFLVMASEDALCTVLHLTERLFLDHPHRLTGNKVQQYHRALVAVLLSRTWHVRRQAQQTVRKLLSSLGGFKLAHGLLEELKTVLSSHKVLPLEALVTDAGEVTEAGKAYVPPRVLQEALCVISGVPGLKGDVTDTEQLAQEMLIISHHPSLVAVQSGLWPALLARMKIDPEAFITRHLDQIIPRMTTQSPLNQSSMNAMGSLSVLSPDRVLPQLISTITASVQNPALRLVTREEFAIMQTPAGELYDKSIIQSAQQDSIKKANMKRENKAYSFKEQIIELELKEEIKKKKGIKEEVQLTSKQKEMLQAQLDREAQVRRRLQELDGELEAALGLLDIILAKNPSGLTQYIPVLVDSFLPLLKSPLAAPRIKNPFLSLAACVMPSRLKALGTLVSHVTLRLLKPECVLDKSWCQEELSVAVKRAVMLLHTHTITSRVGKGEPGAAPLSAPAFSLVFPFLKMVLTEMPHHSEEEEEWMAQILQILTVQAQLRASPNTPPGRVDENGPELLPRVAMLRLLTWVIGTGSPRLQVLASDTLTTLCASSSGDDGCAFAEQEEVDVLLCALQSPCASVRETVLRGLMELHMVLPAPDTDEKNGLNLLRRLWVVKFDKEEEIRKLAERLWSMMGLDLQPDLCSLLIDDVIYHEAAVRQAGAEALSQAVARYQRQAAEVMGRLMEIYQEKLYRPPPVLDALGRVISESPPDQWEARCGLALALNKLSQYLDSSQVKPLFQFFVPDALNDRHPDVRKCMLDAALATLNTHGKENVNSLLPVFEEFLKNAPNDASYDAVRQSVVVLMGSLAKHLDKSDPKVKPIVAKLIAALSTPSQQVQESVASCLPPLVPAIKEDAGGMIQRLMQQLLESDKYAERKGAAYGLAGLVKGLGILSLKQQEMMAALTDAIQDKKNFRRREGALFAFEMLCTMLGKLFEPYVVHVLPHLLLCFGDGNQYVREAADDCAKAVMSNLSAHGVKLVLPSLLAALEEESWRTKAGSVELLGAMAYCAPKQLSSCLPNIVPKLTEVLTDSHVKVQKAGQQALRQIGSVIRNPEILAIAPVLLDALTDPSRKTQKCLQTLLDTKFVHFIDAPSLALIMPIVQRAFQDRSTDTRKMAAQIIGNMYSLTDQKDLAPYLPSVTPGLKASLLDPVPEVRTVSAKALGAMVKGMGESCFEDLLPWLMETLTYEQSSVDRSGAAQGLAEVMAGLGVEKLEKLMPEIVATASKVDIAPHVRDGYIMMFNYLPITFGDKFTPYVGPIIPCILKALADENEFVRDTALRAGQRVISMYAETAIALLLPQLEQGLFDDLWRIRFSSVQLLGDLLFHISGVTGKMTTETASEDDNFGTAQSNKAIITALGVERRNRVLAGLYMGRSDTQLVVRQASLHVWKIVVSNTPRTLREILPTLFGLLLGFLASTCADKRTIAARTLGDLVRKLGEKILPEIIPILEEGLRSQKSDERQGVCIGLSEIMKSTSRDAVLYFSESLVPTARKALCDPLEEVREAAAKTFEQLHSTIGHQALEDILPFLLKQLDDEEVSEFALDGLKQVMAIKSRVVLPYLVPKLTTPPVNTRVLAFLSSVAGDALTRHLGVILPAVMLALKEKLGTPDEQLEMANCQAVILSVEDDTGHRIIIEDLLEATRSPEVGMRQAAAIILNIYCSRSKADYTSHLRSLVSGLIRLFNDSSPVVLEESWDALNAITKKLDAGNQLALIEELHKEIRLIGNESKGEHVPGFCLPKKGVTSILPVLREGVLTGSPEQKEEAAKALGLVIRLTSADALRPSVVSITGPLIRILGDRFSWNVKAALLETLSLLLAKVGIALKPFLPQLQTTFTKALQDSNRGVRLKAADALGKLISIHIKVDPLFTELLNGIRAMEDPGVRDTMLQALRFVIQGAGAKVDAVIRKNIVSLLLSMLGHDEDNTRISSAGCLGELCAFLTEEELSAVLQQCLLADVSGIDWMVRHGRSLALSVAVNVAPGRLCAGRYSSDVQEMILSSATADRIPIAVSGVRGMGFLMRHHIETGGGQLPAKLSSLFVKCLQNPSSDIRLVAEKMIWWANKDPLPPLDPQAIKPILKALLDNTKDKNTVVRAYSDQAIVNLLKMRQGEEVFQSLSKILDVASLEVLNEVNRRSLKKLASQADSTEQVDDTILT

SEQ ID NO: 870 - protein, 2432 aa, Homo sapiens; identical to SEQ ID NO: 868

SEQ ID NO: 871 - protein, 2432 aa, Homo sapiens; identical to SEQ ID NO: 868

SEQ ID NO: 872 - protein, 2468 aa, Homo sapiens
MLGLLVQFCTSHKEMDVSALLDFYMKNILMSKVKPPKYLLDSCAPLLRYLSHSEFKDLILPTIQKSLLRSPENVIETISSLLASVTLDLSQYAMDIVKGLAGHLKSNSPRLMDEAVLALRNLARQCSDSSAMESLTKHLFAILGGSEGKLTVVAQKMSVLSGIGSVSHHVVSGPSSQVLNGIVAELFIPFLQQEVHEGTLVHAVSVLALWCNRFTMEVPKKLTEWFKKAFSLKTSTSAVRHAYLQCMLASYRGDTLLQALDLLPLLIQTVEKAASQSTQVPTITEGVAAALLLLKLSVADSQAEAKLSSFWQLIVDEKKQVFTSEKFLVMASEDALCTVLHLTERLFLDHPHRLTGNKVQQYHRALVAVLLSRTWHVRRQAQQTVRKLLSSLGGFKLAHGLLEELKTVLSSHKVLPLEALVTDAGEVTEAGKAYVPPRVLQEALCVISGVPGLKGDVTDTEQLAQEMLIISHHPSLVAVQSGLWPALLARMKIDPEAFITRHLDQIIPRMTTQSPLNQSSMNAMGSLSVLSPDRVLPQLISTITASVQNPALRLVTREEFAIMQTPAGELYDKSIIQSAQQDSIKKANMKRENKAYSFKEQIIELELKEEIKKKKGIKEEVQLTSKQKEMLQAQLDREAQVRRRLQELDGELEAALGLLDIILAKNPSGLTQYIPVLVDSFLPLLKSPLAAPRIKNPFLSLAACVMPSRLKALGTLVSHVTLRLLKPECVLDKSWCQEELSVAVKRAVMLLHTHTITSRVGKGEPGAAPLSAPAFSLVFPFLKMVLTEMPHHSEEEEEWMAQILQILTVQAQLRASPNTPPGRVDENGPELLPRVAMLRLLTWVIGTGSPRLQVLASDTLTTLCASSSGDDGCAFAEQEEVDVLLCALQSPCASVRETVLRGLMELHMVLPAPDTDEKNGLNLLRRLWVVKFDKEEEIRKLAERLWSMMGLDLQPDLCSLLIDDVIYHEAAVRQAGAEALSQAVARYQRQAAEVMGRLMEIYQEKLYRPPPVLDALGRVISESPPDQWEARCGLALALNKLSQYLDSSQVKPLFQFFVPDALNDRHPDVRKCMLDAALATLNTHGKENVNSLLPVFEEFLKNAPNDASYDAVRQSVVVLMGSLAKHLDKSDPKVKPIVAKLIAALSTPSQQVQESVASCLPPLVPAIKEDAGGMIQRLMQQLLESDKYAERKGAAYGLAGLVKGLGILSLKQQEMMAALTDAIQDKKNFRRREGALFAFEMLCTMLGKLFEPYVVHVLPHLLLCFGDGNQYVREAADDCAKAVMSNLSAHGVKLVLPSLLAALEEESWRTKAGSVELLGAMAYCAPKQLSSCLPNIVPKLTEVLTDSHVKVQKAGQQALRQIGSVIRNPEILAIAPVLLDALTDPSRKTQKCLQTLLDTKFVHFIDAPSLALIMPIVQRAFQDRSTDTRKMAAQIIGNMYSLTDQKDLAPYLPSVTPGLKASLLDPVPEVRTVSAKALGAMVKGMGESCFEDLLPWLMETLTYEQSSVDRSGAAQGLAEVMAGLGVEKLEKLMPEIVATASKVDIAPHVRDGYIMMFNYLPITFGDKFTPYVGPIIPCILKALADENEFVRDTALRAGQRVISMYAETAIALLLPQLEQGLFDDLWRIRFSSVQLLGDLLFHISGVTGKMTTETASEDDNFGTAQSNKAIITALGVERRNRVLAGLYMGRSDTQLVVRQASLHVWKIVVSNTPRTLREILPTLFGLLLGFLASTCADKRTIAARTLGDLVRKLGEKILPEIIPILEEGLRSQKSDERQGVCIGLSEIMKSTSRDAVLYFSESLVPTARKALCDPLEEVREAAAKTFEQLHSTIGHQALEDILPFLLKQLDDEEVSEFALDGLKQVMAIKSRVVLPYLVPKLTTPPVNTRVLAFLSSVAGDALTRHLGVILPAVMLALKEKLGTPDEQLEMANCQAVILSVEDDTGHRIIIEDLLEATRSPEVGMRQAAAIILNIYCSRSKADYTSHLRSLVSGLIRLFNDSSPVVLEESWDALNAITKKLDAGNQLALIEELHKEIRLIGNESKGEHVPGFCLPKKGVTSILPVLREGVLTGSPEQKEEAAKALGLVIRLTSADALRPSVVSITGPLIRILGDRFSWNVKAALLETLSLLLAKVGIALKPFLPQLQTTFTKALQDSNRGVRLKAADALGKLISIHIKVDPLFTELLNGIRAMEDPGVRDTMLQALRFVIQGAGAKVDAVIRKNIVSLLLSMLGHDEDNTRISSAGCLGELCAFLTEEELSAVLQQCLLADVSGIDWMVRHGRSLALSVAVNVAPGRLCAGRYSSDVQEMILSSATADRIPIAVSGVRGMGFLMRHHIETGGGQLPAKLSSLFVKCLQNPSSDIRLVAEKMIWWANKDPLPPLDPQAIKPILKALLDNTKDKNTVVRAYSDQAIVNLLKMRQGEEVFQSLSKILDVASLEVLNEVNRRSLKKLASQADSTEQVDDTILT

SEQ ID NO: 873 - protein, 247 aa, Homo sapiens
MIVRVTNRDIICQIAYARIEGDMIVCAAYAHELPKYGVKVGLTNYAAAYCTGLLLARRLLNRFGMDKIYEGQVEVTGDEYNVESIDGQPGAFTCYLDAGLARTTTGNKVFGALKGAVDGGLSIPHSTKRFPGYDSESKEFNAEVHRKHIMGQNVADYMRYLMEEDEDAYKKQFSQYIKNSVTPDMMEEMYKKAHAAIRENPVYEKKPKKEVKKKRWNRPKMSLAQKKDRVAQKKASFLRAQERAAES

SEQ ID NO: 874 - protein, 101 aa, Homo sapiens
MGFVKVVKNKAYFKRYQVKFRRRREGKTDYYARKRLVIQDKNKYNTPKYRMIVRVTNRDIICQIAYARIEGDMIVCAAYAHELPKYGVKVGLTNYAAAKWR

SEQ ID NO: 875 - protein, 343 aa, Homo sapiens
ASSPPWHRWACRSLSSRGRGSLFRWMGFVKVVKNKAYFNRYQVKFRRRREGKTDYYARKRLVIQDKNKYNTPKYRMIVRVTDRDIICQIAYARIEGDMIVCAAYAHELPKYGVKVGPTNYAAAYCTGLLLARRLLDRFGMDKIYDGQVEVTGDKYNVESTDGQPGAFTCCMDAGLARTTTGNKVFGALKGAVDGGLSVPHSTKFPGYDSESKEFNAGVHQKHFMGQNVADYMRYLMEEDDDAYKKQFSQYIKNSVTPDMMEEMYKKAHAAIRENPVYEKKPKKEVKKERWNLPKMPLAQKKDQVAQKKASFLRAQERAAESTKQFSMMIFQIQTINLGPAKKK

SEQ ID NO: 876 - protein, 297 aa, Homo sapiens [sequence omitted]

SEQ ID NO: 877 - protein, 178 aa, Homo sapiens [sequence omitted]

SEQ ID NO: 878 - protein, 140 aa, Homo sapiens
WACRSLLSHGCGSLFCRMGFVKVVKNKAYFKRYQVKFRRRQEGKTGYYARKYLEIQDKNKYNTPKYRIVVHLTNRDIISQIAYARIEGDMIVCAAYAHELPKYGVKVGLTNYAAEYCTGLLLARRLLNRFGTDNIYEGQV

SEQ ID NO: 879 - protein, 526 aa, Homo sapiens
MRCALALSALLLLLSTPPLLPSSPSPSPSPSQNATQTTTDSSNKTAPTPASSVTIMATDTAQQSTVPTSKANEILASVKATTLGVSSDSPGTTTLAQQVSGPVNTTVARGGGSGNPTTTIESPKSTKSADTTTVATSTATAKPNTTSSQNGAEDTTNSGGKSSHSVTTDLTSTKAEHLTTPHPTSPLSPRQPTSTHPVATPTSSGHDHLMKISSSSSTVAIPGYTFTSPGMTTTLPSSVISQRTQQTSSQMPASSTAPSSQETVQPTSPATALRTPTLPETMSSSPTAASTTHRYPKTPSPTVAHESNWAKCEDLETQTQSEKQLVLNLTGNTLCAGGASDEKLISLICRAVKATFNPAQDKCGIRLASVPGSQTVVVKEITIHTKLPAKDVYERLKDKWDELKEAGVSDMKLGDQGPPEEAEDRFSMPLIITIVCMASFLLLVAALYGCCHQRLSQRKDQQRLTEELQTVENGYHDNPTLEVMETSSEMQEKKVVSLNGELGDSWIVPLDNLTKDDLDEEEDTHL

SEQ ID NO: 880 - protein, 1498 aa, Homo sapiens
FWRGVLIDVGLMGKYDFIVSSNPGFNIRIIFSFVDVRHFKNSYCKEVKILFSLKETEKVFPSLSVGLVLPTIKALRSAWRRKKRLRCQRDFVRFLKIMEIIWFCKMSCPVFLRHCLQINVFLLERGLVMEHHVVHQTLLLEIVTSLYKIPWCQKVIFLKTLQCKCCLWIKKRTTSKKQMTSSFLSIQWDRKMLEQFSKKLKACLFLRKRYICKMQARRMLLLRRLEFHPVELIQLQPWLQQLLLPLQPQLRRCRVIWKQKSILLQNYLVNYRRLINTCNVLQSSKQAFRGNKRNYIVMITKSKMCLWSSTGILKSYNNNKIFRLILLVLHSRLVVFSLLVCPPPEQWKSIPNQNTLILVAVIHLYITHLLPNKHLKKLKIRVLINRNLLWRHQHLADLLLYLFQGMMNYQRGKIFWKKKKIWKCHVTEEMDYWNKFIIMILQEKVNHQTPPHLGQKDGLLRKQTDFLPVKSKQLKLCRSLMMFFMTLAKKRKKQIAWSSQKNLVCSFQIFHRILLSFKQPIQQDLYKMLRRFEEYKTIKKYLKKTWKLLFVQKMELPCIRLSMLYLPTERCQRKLGSERQWMNGLKLFLQKFRGFKQPQYKMKIICYKSMESQFIRAIEALLKKDHISDLILHLLSPDHRDQKNELKALRSQEHRLTSMQQNLRRWILKNILFLCYLMAISNICSAQVEKCLLFQVHWKVIFLWQFFDKPKVIVIPCHLLELSASHTLLLLLFLHHLEKKLERNLTPLKSQKKRILLSLLCRYYPVILTAFQIVVLMSFHLCLAPKKHLLLLCKLGRLQKLRMKKRSFQELTLMKSMSYRKKKNVMKFQTLNQFWSLTEVLKLILQNIMVLHFRQLLLLFSPLLIFWIKLREKKHWKIAFNGSKKCQELSLGSFQSSNRLHLVSVFQSVRQVNHLLTLWKEQAVAPSSFLLMLVFLTQMLNILLTKLLLRPLLSCWVTEKQRSKVLLLQVFLGMLQQMKHICRQECAPHWLPHSLRLLAHLHHLLRSVFWRLQILLPVIRIMIWLFLKKYVLKKEMICLPSCLLILQQLPLLLHLLQRRQFLPQLCQIFPLINRYQAQSFPSHGVMETCHWKKRTLTHLKKNFIQELLCLWLRMKNQRVWISLLSLHLQSQFPLCHFLPAPRPLPPHRCQVLIHQHWRAHVLLSLKLKLINPSLKERFYLAVVKNWPPRFKIDCTQTLMIAYPALCMMPLKWRMILLVKGKLGCPIKNFMQMQFFLLLNKTRSQQFPSKQSIIQRTWKTVWVNLVKDKDPSQRQQRTSWDILSICSHLSLIHSLWINNVILNHYLGNLTQFQVVFMKIHVLVMVQVWENWSWSQILSWFFPQHFQHKKMMLIYQPLKIFPSTNSKIRMLSKLNTNHHKVTYVLEINLILHLHSNKFHQVIWIGHKLSLIRTSHVYFQVGKQCHSPLHRCPLPRCQCCRQTSRTALSLVSAQCRRTWSLRGQIPSEREETASTVFMPLVLKSFYLGLKPSLRLFGFAYS

SEQ ID NO: 881 - protein, 1699 aa, Homo sapiens [sequence omitted]

SEQ ID NO: 882 - protein, 196 aa, Homo sapiens [sequence omitted]

SEQ ID NO: 883 - protein, 1972 aa, Homo sapiens
LLLLTYLTLHFLIYQKCLTVHKLNCKDYMRSILVFLCIFSLLTGVGNMILRPMAATLGQKRQPPFEELKGEYCPTGLSGSPRLRLGRRATFAYSKWHIIVLGVLLTAELCLLIFHSLDFPILPIQLTSVFSFPSHCSLSFTIYMDYPSFKLLCPGRVRWLMPVILALWEAEAGGSRGQEIETILANMVKPRLYNKNPGVVAGACSPSYLGGGRRMATREVELAVGGDRATALQPGRQSETPSEKKNKKTALSCRNPVRVMCTSLNPYLEAKVSPQLSSTQFALQVVPILTKVIRSSSGNPEKLPLLPWSKGSSHGIKATSLSWDLWLGKVVEDVLLDAWHEVCYWNCCRMFQPPRVVPVMWLPPFSGISLKVWGAPASHFLEFIFPVSLSGKFLVSYRTAVGYTGAHHITTKYVMMSSDLTFPKCEAPDFIQFNACFCLKFALDTLNMRATCASTYSGFLPSVSFFFLRWSLTVSAGVQWCDHGSLQPQPSGLRSSHLSHPSSWDHRCMPPCLANLFLYIVETESPYVAADLELLGSGDPPTLASQSVGIIGVSHCVQPFPLYLVSIPQSDTVYPTDGFLKSESISSVTSPPSLSKTEVVVYMLRVESMGSNVFCTLFPRLFRETTLSGGSFLFFSEQVILKRTLPFGLFLTFLLLLEEGEVEGGALWCESPTCPLLYTFFQCRREKVSMLWVRGALRGQHRKPETKVSSVAIRGTLLRVQGHRCLLSRPRSIKTGTVPFSLQEPPKCHLVMSHSPARPCILPGSWFVHSILSSAWVSQTKRMIPGQSSDTRAQTEAESPDRRSCKLGGAEEAMEPGESLKGTISGGGKLSKEGLAKDQEGDSILIYERRLKWGLTEPDWVESKLWAGECPGDEGEWAFRAQPEGESTKLHPPSSHPSILLKSQVFRHHGGQTQHPDHRVGTPGQEEVLRVWCGNDNDDPCQCLPIHPHPHPVASSEGEEPLPWDLRCLHQDPASRWYHWPLPRVPGQYLHPHLWPVLCHHLAHPEVCSLQPEHSQITGGWWLSLPCGPEHHSAHCSLPAPDDATQGENGPLSGAGEPRGTRGSCLWPNQGHHQADPAGWTSRLLSRLCGFTAYLYPKQCCLVALLSLLCRAALLPVSGVPSHCLSSCLGAPGCSHCLHPHQSHGCHTNPCAGGQELHHPDLQTADGRRRALGPHEGPLGQNHLSHTFHHCHCGGLEPQETQPPTAGGLETLVTSGGERSLLFSTLPWVRGRVERTAPSPGAPTTHPALPWAKWPIWDRDRDFELLLLKRLHAWIPCPHYLKFSSELGSLTQSLYLILARPHPPPCQPFFWLPLPSVSLRPEELYIELAYYHWFFLLGFQPRLQAAAINPLSLHLLALLIFILGPSCPLDDSAFPCIWGGARYLFAQGAGAAKNLWFSRALVLSLEGLLGWEKCYFCFVCVCVCVCVCVCVCVLTSVNQAISPAKAPILLSELTPFLRQVEKCNVAFSTSHFPVPSVSGALGESKLGHPLAQRTPVVGTVLSGSGCLGCTGLGALPEVRLRKLIKATSGHVFPSTLPRPAEPNLGEGSGILCPRQPHTHKYPNHSDLRQQVLSHYGDLDPHHWMRSHPSHGTLWRNAGRTRAVQKVTQYQDHCIYQPDTAKIICSPQELGEECSFLPTATLPKPVLQVERCSKRRHVKPCISTDVPGSSKPYWSHPLGKAMVPVKVLATSLDISSWLPHILPPWPEQVLKTTSLPSPPPLPILISLRVFPFHLILFLFIPSCTLSRESSSFYPGMFTSKGLDPRIILNLPAPPHCLTLRTTNIMEAVPPTLTPSLAHPSKTSRDPRDSTLVLPRHGTVGKVSMGSVTDRRDPAARVLVFLPQDFPSVLLSCAVFYSPSCVFLYFSYTHAVLRVMCVLKGPLAHTFLILGLGLGLTEICFGGDGTVDFHSPTGVLVGNQNKKPLGDWKPDWSTEEQGNEKADSLNVNGLLKLTVNIHCCTVRSLNVIKSFYAP

SEQ ID NO: 884 - protein, 1566 aa, Homo sapiens [sequence omitted]

SEQ ID NO: 885 - protein, 651 aa, Homo sapiens [sequence omitted]

SEQ ID NO: 886 - protein, 528 aa, Homo sapiens
MRCALALSALLLLLSTPPLLPSSPSPSPSPSPSQNATQTTTDSSNKTAPTPASSVTIMATDTAQQSTVPTSKANEILASVKATTLGVSSDSPGTTTLAQQVSGPVNTTVARGGGSGNPTTTIESPKSTKSADTTTVATSTATAKPNTTSSQNGAEDTTNSGGKSSHSVTTDLTSTKAEHLTTPHPTSPLSPRQPTLTHPVATPTSSGHDHLMKISSSSSTVAIPGYTFTSPGMTTTLPSSVISQRTQQTSSQMPASSTAPSSQETVQPTSPATALRTPTLPETMSSSPTAASTTHRYPKTPSPTVAHESNWAKCEDLETQTQSEKQLVLNLTGNTLCAGGASDEKLISLICRAVKATFNPAQDKCGIRLASVPGSQTVVVKEITIHTKLPAKDVYERLKDKWDELKEAGVSDMKLGDQGPPEEAEDRFSMPLIITIVCMASFLLLVAALYGCCHQRLSQRKDQQRLTEELQTVENGYHDNPTLEVMETSSEMQEKKVVSLNGELGDSWIVPLDNLTKDDLDEEEDTHL

SEQ ID NO: 887 - protein, 1728 aa, Homo sapiens [sequence omitted]

SEQ ID NO: 888 - protein, 1331 aa, Homo sapiens [sequence omitted]

SEQ ID NO: 889 - protein, 231 aa, Homo sapiens [sequence omitted]

SEQ ID NO: 890 - protein, 1524 aa, Homo sapiens [sequence omitted]

SEQ ID NO: 891 - protein, 526 aa, Homo sapiens; identical to SEQ ID NO: 879

SEQ ID NO: 892 - protein, 109 aa, Homo sapiens
YFKLYSQQKYTSYQKYRQYTWRLHLQFSVPGLIWHLHFLQGYSPPCQHQLFPLSFGYLLSLLCRGLFKLGLWLWRSRFSRQLRGFSLWFVLNFGFISFSIPFTLSLGHG

SEQ ID NO: 893 - protein, 1390 aa, Homo sapiens [sequence omitted]

SEQ ID NO: 894 - protein, 337 aa, Homo sapiens [sequence omitted]

SEQ ID NO: 895 - protein, 365 aa, Homo sapiens
MALLLCFVLLCGVVDFARSLSITTPEEMIEKAKGETAYLPCKFTLSPEDQGPLDIEWLISPADNQKVDQVIILYSGDKIYDDYYPDLKGRVHFTSNDLKSGDASINVTNLQLSDIGTYQCKVKKAPGVANKKIHLVVLVKPSGARCYVDGSEEIGSDFKIKCEPKEGSLPLQYEWQKLSDSQKMPTSWLAEMTSSVISVKNASSEYSGTYSCTVRNRVGSDQCLLRLNVVPPSNKAGLIAGAIIGTLLALALIGLIIFCCRKKRREEKYEKEVHHDIREDVPPPKSRTSTARSYIGSNHSSLGSMSPSNMEGYSKTQYNQVPSEDFERTPQSPTLPPAKVAAPNLSRMGAIPVMIPAQSKDGSIV

SEQ ID NO: 896 - protein, 365 aa, Homo sapiens; identical to SEQ ID NO: 895

SEQ ID NO: 897 - protein, 89 aa, Homo sapiens
MALLLCFVLLCGVVDFARSLSITTPEEMIEKAKGETAYLPCKFTLSPEDQGPLDIEWLISPADNQKVDQVGRCATSKEPYVHCQKLHRQ

SEQ ID NO: 898 - protein, 180 aa, Homo sapiens
MIEKAKGETAYLPCKFTLSPEDQGPLDIEWLISPADNQKVDQVIILYSGDKNYDDYYPDLKGRVHFKSNDLKSGDASINVTNFQLSDIGTDQCKVKRAPGVANRKIQLVVLGKPSGTRCYVDGSEEIGSDFKLKCEPKEGSLPLQYEWQKLSDSQKMPTSWLAGKMCRLQRATRPLPEAT

SEQ ID NO: 899 - protein, 200 aa, Homo sapiens
MALLLCFVLLCGVVDFARSLSITTPEEMIEKAKGETAYLPCKFTLSPEDQGPLDIEWLISPADNQKVDQVIILYSGDKIYDDYYPDLKGRVHFTSNDLKSGDASINVTNLQLSDIGTYQCKVKKAPGVANKKIHLVVLGKMCHLQRAVRPLPEATSAVIIHPWGPCLLPTWKDIPRLSITKYQVKTLNALLRVRLSHLLR

SEQ ID NO: 900 - protein, 252 aa, Homo sapiens
MALLLCFVLLCGVVDFARSLSITTPEEMIEKAKGETAYLPCKFTLSPEDQGPLDIEWLISPADNQKVDQVIILYSGDKIYDDYYPDLKGRVHFTSNDLKSGDASINVTNLQLSDIGTYQCKVKKAPGVANKKIHLVVLVKPSGARCYVDGSEEIGSDFKIKCEPKEGSLPLQYEWQKLSDSQKMPTSWLAGKMCHLQRAVRPLPEATSAVIIHPWGPCLLPTWKDIPRLSITKYQVKTLNALLRVRLSHLLR

SEQ ID NO: 901 - protein, 1212 aa, Homo sapiens
MEPRPTAPSSGAPGLAGVGETPSAAALAAARVELPGTAVPSVPEDAAPASRDGGGVRDEGPAAAGDGLGRPLGPTPSQSRFQVDLVSENAGRAAAAAAAAAAAAAAAGAGAGAKQTPADGEASGESEPAKGSEEAKGRFRVNFVDPAASSSAEDSLSDAAGVGVDGPNVSFQNGGDTVLSEGSSLHSGGGGGSGHHQHYYYDTHTNTYYLRTFGHNTMDAVPRIDHYRHTAAQLGEKLLRPSLAELHDELEKEPFEDGFANGEESTPTRDAVVTYTAESKGVVKFGWIKGVLVRCMLNIWGVMLFIRLSWIVGQAGIGLSVLVIMMATVVTTITGLSTSAIATNGFVRGGGAYYLISRSLGPEFGGAIGLIFAFANAVAVAMYVVGFAETVVELLKEHSILMIDEINDIRIIGAITVVILLGISVAGMEWEAKAQIVLLVILLLAIGDFVIGTFIPLESKKPKGFFGYKSEIFNENFGPDFREEETFFSVFAIFFPAATGILAGANISGDLADPQSAIPKGTLLAILITTLVYVGIAVSVGSCVVRDATGNVNDTIVTELTNCTSAACKLNFDFSSCESSPCSYGLMNNFQVMSMVSGFTPLISAGIFSATLSSALASLVSAPKIFQALCKDNIYPAFQMFAKGYGKNNEPLRGYILTFLIALGFILIAELNVIAPIISNFFLASYALINFSVFHASLAKSPGWRPAFKYYNMWISLLGAILCCIVMFVINWWAALLTYVIVLGLYIYVTYKKPDVNWGSSTQALTYLNALQHSIRLSGVEDHVKNFRPQCLVMTGAPNSRPALLHLVHDFTKNVGLMICGHVHMGPRRQAMKEMSIDQAKYQRWLIKNKMKAFYAPVHADDLREGAQYLMQAAGLGRMKPNTLVLGFKKDWLQADMRDVDMYINLFHDAFDIQYGVVVIRLKEGLDISHLQGQEELLSSQEKSPGTKDVVVSVEYSKKSDLDTSKPLSEKPITHKVEEEDGKTATQPLLKKESKGPIVPLNVADQKLLEASTQFQKKQGKNTIDVWWLFDDGGLTLLIPYLLTTKKKWKDCKIRVFIGGKINRIDHDRRAMATLLSKFRIDFSDIMVLGDINTKPKKENIIAFEEIIEPYRLHEDDKEQDIADKMKEDEPWRITDNELELYKTKTYRQIRLNELLKEHSSTANIIVMSLPVARKGAVSSALYMAWLEALSKDLPPILLVRGNHQSVLTFYS

SEQ ID NO: 902 - protein, 1212 aa, Homo sapiens; identical to SEQ ID NO: 901

SEQ ID NO: 903 - protein, 1150 aa, Homo sapiens
MEPRPTAPSSGAPGLAGVGETPSAAALAAARVELPGTAVPSVPEDAAPASRDGGGVRDEGPAAAGDGLGRPLGPTPSQSRFQVDLVSENAGRAAAAAAAAAAAAAAAGAGAGAKQTPADGEASGESEPAKGSEEAKGRFRVNFVDPAASSSAEDSLSDAAGVGVDGPNVSFQNGGDTVLSEGSSLHSGGGGGSGHHQHYYYDTHTNTYYLRTFGHNTMDAVPRIDHYRHTAAQLGEKLLRPSLAELHDELEKEPFEDGFANGEESTPTRDAVVTYTAESKGVVKFGWIKGVLVRCMLNIWGVMLFIRLSWIVGQAGIGLSVLVIMMATVVTTITGLSTSAIATNGFVRGGGAYYLISRSLGPEFGGAIGLIFAFANAVAVAMYVVGFAETVVELLKEHSILMIDEINDIRIIGAITVVILLGISVAGMEWEAKAQIVLLVILLLAIGDFVIGTFIPLESKKPKGFFGYKSEIFNENFGPDFREEETFFSVFAIFFPAATGILAGANISGDLADPQSAIPKGTLLAILITTLVYVGIAVSVGSCVVRDATGNVNDTIVTELTNCTSAACKLNFDFSSCESSPCSYGLMNNFQVMSMVSGFTPLISAGIFSATLSSALASLVSAPKIFQALCKDNIYPAFQMFAKGYGKNNEPLRGYILTFLIALGFILIAELNVIAPIISNFFLASYALINFSVFHASLAKSPGWRPAFKYYNMWISLLGAILCCIVMFVINWWAALLTYVIVLGLYIYVTYKKPDVNWGSSTQALTYLNALQHSIRLSGVEDHVKNFRPQCLVMTGAPNSRPALLHLVHDFTKNVGLMICGHVHMGPRRQAMKEMSIDQAKYQRWLIKNKMKAFYAPVHADDLREGAQYLMQAAGLGRMKPNTLVLGFKKDWLQADMRDVDMYINLFHDAFDIQYGVVVIRLKEGLDISHLQGQEELLSSQEKSPGTKDVVVSVEYSKKSDLDTSKPLSEKPITHKVEEEDGKTATQPLLKKESKGPIVPLNVADQKLLEASTQFQKKQGKNTIDVWWLFDDGGLTLLIPYLLTTKKKWKDCKIRVFIGGKINRIDHDRRAMATLLSKFRIDFSDIMVLGDINTKPKKENIIAFEEIIEPYRLHEDDKEQDIADKMKEDEPWRITDNELELYKTKFYEPC

SEQ ID NO: 904 - protein, 1212 aa, Homo sapiens; identical to SEQ ID NO: 901

SEQ ID NO: 905 - protein, 260 aa, Homo sapiens
MSLQSRLSGRLAQLRAAGQLLVPPRPRPGHLAGATRTRSSTCGPPAFLGVFGRRARTSAGVGAWGAAAVGRTAGVRTWAPLAMAAKVDLSTSTDWKEAKSFLKGLSDKQREEHYFCKDFVRLKKIPTWKEMAKGVAVKVEEPRYKKDKQLNEKISLLRSDITKLEVDAIVNAANSSLLGGGGVDGCIHRAAGPLLTDECRTLQSCKTGKAKITGGYRLPAKCESPTRPQLWGADRAPVCHWDIRGAAPTGVLGNSSGGPS

SEQ ID NO: 906 - protein, 1101 aa, Homo sapiens
MSAKAISEQTGKELLYKFICTTSAIQNRFKYARVTPDTDWARLLQDHPWLLSQNLVVKPDQLIKRRGKLGLVGVNLTLDGVKSWLKPRLGQEATVGKATGFLKNFLIEPFVPHSQAEEFYVCIYATREGDYVLFHHEGGVDVGDVDAKAQKLLVGVDEKLNPEDIKKHLLVHAPEDKKEILASFISGLFNFYEDLYFTYLEINPLVVTKDGVYVLDLAAKVDATADYICKVKWGDIEFPPPFGREAYPEEAYIADLDAKSGASLKLTLLNPKGRIWTMVAGGGASVVYSDTICDLGGVNELANYGEYSGAPSEQQTYDYAKTILSLMTREKHPDGKILIIGGSIANFTNVAATFKGIVRAIRDYQGPLKEHEVTIFVRRGGPNYQEGLRVMGEVGKTTGIPIHVFGTETHMTAIVGMALGHRPIPNQPPTAAHTANFLLNASGSTSTPAPSRTASFSESRADEVAPAKKAKPAMPQDSVPSPRSLQGKSTTLFSRHTKAIVWGMQTRAVQGMLDFDYVCSRDEPSVAAMVYPFTGDHKQKFYWGHKEILIPVFKNMADAMRKHPEVDVLINFASLRSAYDSTMETMNYAQIRTIAIIAEGIPEALTRKLIKKADQKGVTIIGPATVGGIKPGCFKIGNTGGMLDNILASKLYRPGSVAYVSRSGGMSNELNNIISRTTDGVYEGVAIGGDRYPGSTFMDHVLRYQDTPGVKMIVVLGEIGGTEEYKICRGIKEGRLTKPIVCWCIGTCATMFSSEVQFGHAGACANQASETAVAKNQALKEAGVFVPRSFDELGEIIQSVYEDLVANGVIVPAQEVPPPTVPMDYSWARELGLIRKPASFMTSICDERGQELIYAGMPITEVFKEEMGIGGVLGLLWFQKRLPKYSCQFIEMCLMVTADHGPAVSGAHNTIICARAGKDLVSSLTSGLLTIGDRFGGALDAAAKMFSKAFDSGIIPMEFVNKMKKEGKLIMGIGHRVKSINNPDMRVQILKDYVRQHFPATPLLDYALEVEKITTSKKPNLILNVDGLIGVAFVDMLRNCGSFTREEADEYIDIGALNGIFVLGRSMGFIGHYLDQKRLKQGLYRHPWDDISYVLPEHMSM

SEQ ID NO: 907 - protein, 628 aa, Homo sapiens
MPQDSVPSPRSLQGKSTTLFSRHTKAIVWGMQTRAVQGMLDFDYVCSRDEPSVAAMVYPFTGDHKQKFYWGHKEILIPVFKNMADAMRKHPEVDVLINFASLRSAYDSTMETMNYAQIRTIAIIAEGIPEALTRKLIKKADQKGVTIIGPATVGGIKPGCFKIGNTGGMLDNILASKLYRPGSVAYVSRSGGMSNELNNIISRTTDGVYEGVAIGGDRYPGSTFMDHVLRYQDTPGVKMIVVLGEIGGTEEYKICRGIKEGRLTKPIVCWCIGTCATMFSSEVQFGHAGACANQASETAVAKNQALKEAGVFVPRSFDELGEIIQSVYEDLVANGVIVPAQEVPPPTVPMDYSWARELGLIRKPASFMTSICDERGQELIYAGMPITEVFKEEMGIGGVLGLLWFQKRLPKYSCQFIEMCLMVTADHGPAVSGAHNTIICARAGKDLVSSLTSGLLTIGDRFGGALDAAAKMFSKAFDSGIIPMEFVNKMKKEGKLIMGIGHRVKSINNPDMRVQILKDYVRQHFPATPLLDYALEVEKITTSKKPNLILNVDGLIGVAFVDMLRNCGSFTREEADEYIDIGALNGIFVLGRSMGFIGHYLDQKRLKQGLYRHPWDDISYVLPEHMSM

SEQ ID NO: 908 - protein, 1101 aa, Homo sapiens [sequence omitted]

SEQ ID NO: 909 - protein, 1091 aa, Homo sapiens
MSAKAISEQTGKELLYKFICTTSAIQNRFKYARVTPDTDWARLLQDHPWLLSQNLVVKPDQLIKRRGKLGLVGVNLTLDGVKSWLKPRLGQEATVGKATGFLKNFLIEPFVPHSQAEEFYVCIYATREGDYVLFHHEGGVDVGDVDAKAQKLLVGVDEKLNPEDIKKHLLVHAPEDKKEILASFISGLFNFYEDLYFTYLEINPLVVTKDGVYVLDLAAKVDATADYICKVKWGDIEFPPPFGREAYPEEAYIADLDAKSGASLKLTLLNPKGRIWTMVAGGGASVVYSDTICDLGGVNELANYGEYSGAPSEQQTYDYAKTILSLMTREKHPDGKILIIGGSIANFTNVAATFKGIVRAIRDYQGPLKEHEVTIFVRRGGPNYQEGLRVMGEVGKTTGIPIHVFGTETHMTAIVGMALGHRPIPNQPPTAAHTANFLLNASGSTSTPAPSRTASFSESRADEVAPAKKAKPAMPQGKSTTLFSRHTKAIVWGMQTRAVQGMLDFDYVCSRDEPSVAAMVYPFTGDHKQKFYWGHKEILIPVFKNMADAMRKHPEVDVLINFASLRSAYDSTMETMNYAQIRTIAIIAEGIPEALTRKLIKKADQKGVTIIGPATVGGIKPGCFKIGNTGGMLDNILASKLYRPGSVAYVSRSGGMSNELNNIISRTTDGVYEGVAIGGDRYPGSTFMDHVLRYQDTPGVKMIVVLGEIGGTEEYKICRGIKEGRLTKPIVCWCIGTCATMFSSEVQFGHAGACANQASETAVAKNQALKEAGVFVPRSFDELGEIIQSVYEDLVANGVIVPAQEVPPPTVPMDYSWARELGLIRKPASFMTSICDERGQELIYAGMPITEVFKEEMGIGGVLGLLWFQKRLPKYSCQFIEMCLMVTADHGPAVSGAHNTIICARAGKDLVSSLTSGLLTIGDRFGGALDAAAKMFSKAFDSGIIPMEFVNKMKKEGKLIMGIGHRVKSINNPDMRVQILKDYVRQHFPATPLLDYALEVEKITTSKKPNLILNVDGLIGVAFVDMLRNCGSFTREEADEYIDIGALNGIFVLGRSMGFIGHYLDQKRLKQGLYRHPWDDISYVLPEHMSM

SEQ ID NO: 910 - protein, 1091 aa, Homo sapiens; identical to SEQ ID NO: 909

SEQ ID NO: 911 - protein, 1101 aa, Homo sapiens; identical to SEQ ID NO: 906

SEQ ID NO: 912 - protein, 1091 aa, Homo sapiens; identical to SEQ ID NO: 909

SEQ ID NO: 913 - protein, 804 aa, Homo sapiens
MMDQARSAFSNLFGGEPLSYTRFSLARQVDGDNSHVEMKLAVDEEENADNNTKANVTKPKRCSGSICYGTIAVIVFFLIGFMIGYLGYCKGVEPKTECERLAGTESPVREEPGEDFPAARRLYWDDLKRKLSEKLDSTDFTGTIKLLNENSYVPREAGSQKDENLALYVENQFREFKLSKVWRDQHFVKIQVKDSAQNSVIIVDKNGRLVYLVENPGGYVAYSKAATVTGKLVHANFGTKKDFEDLYTPVNGSIVIVRAGKITFAEKVANAESLNAIGVLIYMDQTKFPIVNAELSFFGHAHLGTGDPYTPGFPSFNHTQFPPSRSSGLPNIPVQTISRAAAEKLFGNMEGDCPSDWKTDSTCRMVTSESKNVKLTVSNVLKEIKILNIFGVIKGFVEPDHYVVVGAQRDAWGPGAAKSGVGTALLLKLAQMFSDMVLKDGFQPSRSIIFASWSAGDFGSVGATEWLEGYLSSLHLKAFTYINLDKAVLGTSNFKVSASPLLYTLIEKTMQNMESSSVFLQHSGWSAMVRSWLTAASTSWVQAILLPQPPEELGLQVKHPVTGQFLYQDSNWASKVEKLTLDNAAFPFLAYSGIPAVSFCFCEDTDYPYLGTTMDTYKELIERIPELNKVARAAAEVAGQFVIKLTHDVELNLDYERYNSQLLSFVRDLNQYRADIKEMGLSLQWLYSARGDFFRATSRLTTDFGNAEKTDRFVMKKLNDRVMRVEYHFLSPYVSPKESPFRHVFWGSGSHTLPALLENLKLRKQNNGAFNETLFRNQLALATWTIQGAANALSGDVWDIDNEF

SEQ ID NO: 914 - protein, 760 aa, Homo sapiens
MMDQARSAFSNLFGGEPLSYTRFSLARQVDGDNSHVEMKLAVDEEENADNNTKANVTKPKRCSGSICYGTIAVIVFFLIGFMIGYLGYCKGVEPKTECERLAGTESPVREEPGEDFPAARRLYWDDLKRKLSEKLDSTDFTSTIKLLNENSYVPREAGSQKDENLALYVENQFREFKLSKVWRDQHFVKIQVKDSAQNSVIIVDKNGRLVYLVENPGGYVAYSKAATVTGKLVHANFGTKKDFEDLYTPVNGSIVIVRAGKITFAEKVANAESLNAIGVLIYMDQTKFPIVNAELSFFGHAHLGTGDPYTPGFPSFNHTQFPPSRSSGLPNIPVQTISRAAAEKLFGNMEGDCPSDWKTDSTCRMVTSESKNVKLTVSNVLKEIKILNIFGVIKGFVEPDHYVVVGAQRDAWGPGAAKSGVGTALLLKLAQMFSDMVLKDGFQPSRSIIFASWSAGDFGSVGATEWLEGYLSSLHLKAFTYINLDKAVLGTSNFKVSASPLLYTLIEKTMQNVKHPVTGQFLYQDSNWASKVEKLTLDNAAFPFLAYSGIPAVSFCFCEDTDYPYLGTTMDTYKELIERIPELNKVARAAAEVAGQFVIKLTHDVELNLDYERYNSQLLSFVRDLNQYRADIKEMGLSLQWLYSARGDFFRATSRLTTDFGNAEKTDRFVMKKLNDRVMRVEYHFLSPYVSPKESPFRHVFWGSGSHTLPALLENLKLRKQNNGAFNETLFRNQLALATWTIQGAANALSGDVWDIDNEF

SEQ ID NO: 915 - protein, 760 aa, Homo sapiens
MMDQARSAFSNLFGGEPLSYTRFSLARQVDGDNSHVEMKLAVDEEENADNNTKANVTKPKRCSGSICYGTIAVIVFFLIGFMIGYLGYCKGVEPKTECERLAGTESPVREEPGEDFPAARRLYWDDLKRKLSEKLDSTDFTGTIKLLNENSYVPREAGSQKDENLALYVENQFREFKLSKVWRDQHFVKIQVKDSAQNSVIIVDKNGRLVYLVENPGGYVAYSKAATVTGKLVHANFGTKKDFEDLYTPVNGSIVIVRAGKITFAEKVANAESLNAIGVLIYMDQTKFPIVNAELSFFGHAHLGTGDPYTPGFPSFNHTQFPPSRSSGLPNIPVQTISRAAAEKLFGNMEGDCPSDWKTDSTCRMVTSESKNVKLTVSNVLKEIKILNIFGVIKGFVEPDHYVVVGAQRDAWGPGAAKSGVGTALLLKLAQMFSDMVLKDGFQPSRSIIFASWSAGDFGSVGATEWLEGYLSSLHLKAFTYINLDKAVLGTSNFKVSASPLLYTLIEKTMQNVKHPVTGQFLYQDSNWASKVEKLTLDNAAFPFLAYSGIPAVSFCFCEDTDYPYLGTTMDTYKELIERIPELNKVARAAAEVAGQFVIKLTHDVELNLDYERYNSQLLSFVRDLNQYRADIKEMGLSLQWLYSARGDFFRATSRLTTDFGNAEKTDRFVMKKLNDRVMRVEYHFLSPYVSPKESPFRHVFWGSGSHTLPALLENLKLRKQNNGAFNETLFRNQLALATWTIQGAANALSGDVWDIDNEF

SEQ ID NO: 916 - protein, 760 aa, Homo sapiens; identical to SEQ ID NO: 915

SEQ ID NO: 917 - protein, 679 aa, Homo sapiens
MIGYLGYCKGVEPKTECERLAGTESPVREEPGEDFPAARRLYWDDLKRKLSEKLDSTDFTGTIKLLNENSYVPREAGSQKDENLALYVENQFREFKLSKVWRDQHFVKIQVKDSAQNSVIIVDKNGRLVYLVENPGGYVAYSKAATVTGKLVHANFGTKKDFEDLYTPVNGSIVIVRAGKITFAEKVANAESLNAIGVLIYMDQTKFPIVNAELSFFGHAHLGTGDPYTPGFPSFNHTQFPPSRSSGLPNIPVQTISRAAAEKLFGNMEGDCPSDWKTDSTCRMVTSESKNVKLTVSNVLKEIKILNIFGVIKGFVEPDHYVVVGAQRDAWGPGAAKSGVGTALLLKLAQMFSDMVLKDGFQPSRSIIFASWSAGDFGSVGATEWLEGYLSSLHLKAFTYINLDKAVLGTSNFKVSASPLLYTLIEKTMQNVKHPVTGQFLYQDSNWASKVEKLTLDNAAFPFLAYSGIPAVSFCFCEDTDYPYLGTTMDTYKELIERIPELNKVARAAAEVAGQFVIKLTHDVELNLDYERYNSQLLSFVRDLNQYRADIKEMGLSLQWLYSARGDFFRATSRLTTDFGNAEKTDRFVMKKLNDRVMRVEYHFLSPYVSPKESPFRHVFWGSGSHTLPALLENLKLRKQNNGAFNETLFRNQLALATWTIQGAANALSGDVWDIDNEF

SEQ ID NO: 918 - protein, 70 aa, Homo sapiens
LQCYNCPNPTADCKTAVNCSSDFDACLITKAGLQVYNKCWKFEHCNFNDVTTRLRENELTYYCCKKDLCN

SEQ ID NO: 919 - protein, 77 aa, Homo sapiens
LQCYNCPNPTADCKTAVNCSSDFDACLITKAGLQVYNKCWKFEHCNFNDVTTRLRENELTYYCCKKDLCNFNEQLEN

SEQ ID NO: 920 - protein, 601 aa, Homo sapiens
MVHAEHVEGEDLQQEDGPTGEPQQEDDEFLMATDVDDRFETLEPEVSHEETEHSYHVEETVSQDCNQDMEEMMSEQENPDSSEPVVEDERLHHDTDDVTYQVYEEQAVYEPLENEGIEITEVTAPPEDNPVEDSQVIVEEVSIFPVEEQQEVPPETNRKTDDPEQKAKVKKKKPKLLNKFDKTIKAELDAAEKLRKRGKIEEAVNAFKELVRKYPQSPRARYGKAQCEDDLAEKRRSNEVLRGAIETYQEVASLPDVPADLLKLSLKRRSDRQQFLGHMRGSLLTLQRLVQLFPNDTSLKNDLGVGYLLIGDNDNAKKVYEEVLSVTPNDGFAKVHYGFILKAQNKIAESIPYLKEGIESGDPGTDDGRFYFHLGDAMQRVGNKEAYKWYELGHKRGHFASVWQRSLYNVNGLKAQPWWTPKETGYTELVKSLERNWKLIRDEGLAVMDKAKGLFLPEDENLREKGDWSQFTLWQQGRRNENACKGAPKTCTLLEKFPETTGCRRGQIKYSIMHPGTHVWPHTGPTNCRLRMHLGLVIPKEGCKIRCANETKTWEEGKVLIFDDSFEHEVWQDASSFRLIFIVDVWHPELTPQQRRSLPAI

SEQ ID NO: 921 - protein, 227 aa, Homo sapiens
MAGVGAGPLRAMGRQALLLLALCATGAQGLYFHIGETEKRCFIEEIPDETMVIGNYRTQMWDKQKEVFLPSTPGLGMHVEVKDPDGKVVLSRQYGSEGRFTFTSHTPGDHQICLHSNSTRMALFAGGKLRVHLDIQVGEHANNYPEIAAKDKLTELQLRARQLLDQVEQIQKEQDYQRYREERFRLTSESTNQRVLWWSIAQTVILILTGIWQMRHLKSFFEAKKLV

SEQ ID NO: 922 - protein, 227 aa, Homo sapiens; identical to SEQ ID NO: 921

SEQ ID NO: 923 - protein, 186 aa, Homo sapiens
MAGVGAGPLRAMGRQALLLLALCATGAQGLYFHIGETEKRCFIEEIPDETMVIGNYRTQMWDKQKEVFLPSTPGLGMHVEVKDPDGKVVLSRQYGSEGRFTFTSHTPGDHQICLHSNSTRMALFAGGKLRVHLDIQVGEHANNYPEIAAKDKLTELQLRARQLLDQVEQIQKEQDYQRASAYLLVI

SEQ ID NO: 924 - protein, 458 aa, Homo sapiens [sequence omitted]

SEQ ID NO: 925 - protein, 229 aa, Homo sapiens
IRCQLYCRLCRHPQQRPAFLKAAENFTLLVKNNIWYPKFNFSKRNILPNITTTYLKSCIYDAKTDPFCPIFRLGKIVENAGHSFQDMAVEGGIMGIQVNWDCNLDRAASLCLPRYSFRRLDTRDVEHNVSPGYNFRFAKYYRDLAGNEQRTLIKAYGIRFDIIVFGKAGKFDIIPTMINIGSGLALLGMATVLCDIIVLYCMKKRLYYREKKYKYVEDYEQGLASELDQ

SEQ ID NO: 926 - protein, 388 aa, Homo sapiens
MAGCCSALAAFLFEYDTPRIVLIRSRKVGLMNRAVQLLILAYVIGWVFVWEKGYQETDSVVSSVTTKVKGVAVTNTSKLGFRIWDVADYVIPAQEENSLFVMTNVILTMNQTQGLCPEIPDATTVCKSDASCTAGSAGTHSNGVSTGRCVAFNGSVKTCEVAAWCPVEDDTHVPQPAFLKAAENFTLLVKNNIWYPKFNFSKRNILPNITTTYLKSCIYDAKTDPFCPIFRLGKIVENAGHSFQDMAVEGGIMGIQVNWDCNLDRAASLCLPRYSFRRLDTRDVEHNVSPGYNFRFAKYYRDLAGNEQRTLIKAYGIRFDIIVFGKAGKFDIIPTMINIGSGLALLGMATVLCDIIVLYCMKKRLYYREKKYKYVEDYEQGLASELDQ

SEQ ID NO: 927 - protein, 388 aa, Homo sapiens
MAGCCAALAAFLFEYDTPRIVLIRSRKVGLMNRAVQLLILAYVIGWVFVWEKGYQETDSVVSSVTTKVKGVAVTNTSKLGFRIWDVADYVIPAQEENSLFVMTNVILTMNQTQGLCPEIPDATTVCKSDASCTAGSAGTHSNGVSTGRCVAFNGSVKTCEVAAWCPVEDDTHVPQPAFLKAAENFTLLVKNNIWYPKFNFSKRNILPNITTTYLKSCIYDAKTDPFCPIFRLGKIVENAGHSFQDMAVEGGIMGIQVNWDCNLDRAASLCLPRYSFRRLDTRDVEHNVSPGYNFRFAKYYRDLAGNEQRTLIKAYGIRFDIIVFGKAGKFDIIPTMINIGSGLALLGMATVLCDIIVLYCMKKRLYYREKKYKYVEDYEQGLASELDQ

SEQ ID NO: 928 - protein, 89 aa, Homo sapiens
YQLRPAFLKAAENFTLLVKNNIWYPKFNFSKRNILPNITTTYLKSCIYDAKTDPFCPIFRLGKIVENAGHSFQDMAVEVLLPPPRYTGR

SEQ ID NO: 929 - protein, 287 aa, Homo sapiens
MTNVILTMNQTQGLCPEIPDATTVCKSDASCTAGSAGTHSNGVSTGRCVAFNGSVKTCEVAAWCPVEDDTHVPQPAFLKAAENFTLLVKNNIWYPKFNFSKRNILPNITTTYLKSCIYDAKTDPFCPIFRLGKIVENAGHSFQDMAVEGGIMGIQVNWDCNLDRAASLCLPRYSFRRLDTRDVEHNVSPGYNFRFAKYYRDLAGNEQRTLIKAYGIRFDIIVFGKAGKFDIIPTMINIGSGLALLGMATVLCDIIVLYCMKKRLYYREKKYKYVEDYEQGLASELDQ

SEQ ID NO: 930 - protein, 287 aa, Homo sapiens; identical to SEQ ID NO: 929

SEQ ID NO: 931 - protein, 2035 aa, Homo sapiens
MDLRPELPTTLGPVSLRQLGLEHTRYPCLDLGAMLLYTLTFWLLLRQFVKEKLLKWAESPAALTEVTVADTEPTRTQTLLQSLGELVKGVYAKYWIYVCAGMFIVVSFAGRLVVYKIVYMFLFLLCLTLFQVYYSLWRKLLKAFWWLVVAYTMLVLIAVYTFQFQDFPAYWRNLTGFTDEQLGDLGLEQFSVSELFSSILVPGFFLLACILQLHYFHRPFMQLTDMEHVSLPGTRLPRWAHRQDAVSGTPLLREEQQEHQQQQQEEEEEEDSRDEGLGVATPHQATQVPEGAAKWGLVAERLLELAAGFSDVLSRVQVFLRRLLELHVFKLVALYTVWVALKEVSVMNLLLVVLWAFALPYPRFRPMASCLSTVWTCVIIVCKMLYQLKVVNPQEYSSNCTEPFPNSTNLLPTEISQSLLYRGPVDPANWFGVRKGFPNLGYIQNHLQVLLLLVFEAIVYRRQEHYRRQHQLAPLPAQAVFASGTRQQLDQDLLGCLKYFINFFFYKFGLEICFLMAVNVIGQRMNFLVTLHGCWLVAILTRRHRQAIARLWPNYCLFLALFLLYQYLLCLGMPPALCIDYPWRWSRAVPMNSALIKWLYLPDFFRAPNSTNLISDFLLLLCASQQWQVFSAERTEEWQRMAGVNTDRLEPLRGEPNPVPNFIHCRSYLDMLKVAVFRYLFWLVLVVVFVTGATRISIFGLGYLLACFYLLLFGTALLQRDTRARLVLWDCLILYNVTVIISKNMLSLLACVFVEQMQTGFCWVIQLFSLVCTVKGYYDPKEMMDRDQDCLLPVEEAGIIWDSVCFFFLLLQRRVFLSHYYLHVRADLQATALLASRGFALYNAANLKSIDFHRRIEEKSLAQLKRQMERIRAKQEKHRQGRVDRSRPQDTLGPKDPGLEPGPDSPGGSSPPRRQWWRPWLDHATVIHSGDYFLFESDSEEEEEAVPEDPRPSAQSAFQLAYQAWVTNAQAVLRRRQQEQEQARQEQAGQLPTGGGPSQEVEPAEGPEEAAAGRSHVVQRVLSTAQFLWMLGQALVDELTRWLQEFTRHHGTMSDVLRAERYLLTQELLQGGEVHRGVLDQLYTSQAEATLPGPTEAPNAPSTVSSGLGAEEPLSSMTDDMGSPLSTGYHTRSGSEEAVTDPGEREAGASLYQGLMRTASELLLDRRLRIPELEEAELFAEGQGRALRLLRAVYQCVAAHSELLCYFIIILNHMVTASAGSLVLPVLVFLWAMLSIPRPSKRFWMTAIVFTEIAVVVKYLFQFGFFPWNSHVVLRRYENKPYFPPRILGLEKTDGYIKYDLVQLMALFFHRSQLLCYGLWDHEEDSPSKEHDKSGEEEQGAEEGPGVPAATTEDHIQVEARVGPTDGTPEPQVELRPRDTRRISLRFRRRKKEGPARKGAAAIEAEDREEEEGEEEKEAPTGREKRPSRSGGRVRAAGRRLQGFCLSLAQGTYRPLRRFFHDILHTKYRAATDVYALMFLADVVDFIIIIFGFWAFGKHSAATDITSSLSDDQVPEAFLVMLLIQFSTMVVDRALYLRKTVLGKLAFQVALVLAIHLWMFFILPAVTERMFNQNVVAQLWYFVKCIYFALSAYQIRCGYPTRILGNFLTKKYNHLNLFLFQGFRLVPFLVELRAVMDWVWTDTTLSLSSWMCVEDIYANIFIIKCSRETEKKYPQPKGQKKKKIVKYGMGGLIILFLIAIIWFPLLFMSLVRSVVGVVNQPIDVTVTLKLGGYEPLFTMSAQQPSIIPFTAQAYEELSRQFDPQPLAMQFISQYSPEDIVTAQIEGSSGALWRISPPSRAQMKRELYNGTADITLRFTWNFQRDLAKGGTVEYANEKHMLALAPNSTARRQLASLLEGTSDQSVVIPNLFPKYIRAPNGPEANPVKQLQPNEEADYLGVRIQLRREQGAGATGFLEWWVIELQECRTDCNLLPMVIFSDKVSPPSLGFLAGYGIMGLYVSIVLVIGKFVRGFFSEISHSIMFEELPCVDRILKLCQDIFLVRETRELELEEELYAKLIFLYRSPETMIKWTREKE

SEQ ID NO: 932 - protein, 2416 aa, Homo sapiens [sequence omitted]

SEQ ID NO: 933 - protein, 2391 aa, Homo sapiens [sequence omitted]

SEQ ID NO: 934 - protein, 2103 aa, Homo sapiens [sequence omitted]

SEQ ID NO: 935 - protein, 1168 aa, Homo sapiens
MERIRAKQEKHRQGRVDRSRPQDTLGPKDPGLEPGPDSPGGSSPPRRQWWRPWLDHATVIHSGDYFLFESDSEEEEEAVPEDPRPSAQSAFQLAYQAWVTNAQAVLRRRQQEQEQARQEQAGQLPTGGGPSQEVEPAEGPEEAAAGRSHVVQRVLSTAQFLWMLGQALVDELTRWLQEFTRHHGTMSDVLRAERYLLTQELLQGGEVHRGVLDQLYTSQAEATLPGPTEAPNAPSTVSSGLGAEEPLSSMTDDMGSPLSTGYHTRSGSEEAVTDPGEREAGASLYQGLMRTASELLLDRRLRIPELEEAELFAEGQGRALRLLRAVYQCVAAHSELLCYFIIILNHMVTASAGSLVLPVLVFLWAMLSIPRPSKRFWMTAIVFTEIAVVVKYLFQFGFFPWNSHVVLRRYENKPYFPPRILGLEKTDGYIKYDLVQLMALFFHRSQLLCYGLWDHEEDSPSKEHDKSGEEEQGAEEGPGVPAATTEDHIQVEARVGPTDGTPEPQVELRPRDTRRISLRFRRRKKEGPARKGAAAIEAEDREEEEGEEEKEAPTGREKRPSRSGGRVRAAGRRLQGFCLSLAQGTYRPLRRFFHDILHTKYRAATDVYALMFLADVVDFIIIIFGFWAFGKHSAATDITSSLSDDQVPEAFLVMLLIQFSTMVVDRALYLRKTVLGKLAFQVALVLAIHLWMFFILPAVTERMFNQNVVAQLWYFVKCIYFALSAYQIRCGYPTRILGNFLTKKYNHLNLFLFQGFRLVPFLVELRAVMDWVWTDTTLSLSSWMCVEDIYANIFIIKCSRETEKKYPQPKGQKKKKIVKYGMGGLIILFLIAIIWFPLLFMSLVRSVVGVVNQPIDVTVTLKLGGYEPLFTMSAQQPSIIPFTAQAYEELSRQFDPQPLAMQFISQYSPEDIVTAQIEGSSGALWRISPPSRAQMKRELYNGTADITLRFTWNFQRDLAKGGTVEYANEKHMLALAPNSTARRQLASLLEGTSDQSVVIPNLFPKYIRAPNGPEANPVKQLQPNEEADYLGVRIQLRREQGAGATGFLEWWVIELQECRTDCNLLPMVIFSDKVSPPSLGFLAGYGIMGLYVSIVLVIGKFVRGFFSEISHSIMFEELPCVDRILKLCQDIFLVRETRELELEEELYAKLIFLYRSPETMIKWTREKE

SEQ ID NO: 936 - protein, 1403 aa, Homo sapiens [sequence omitted]

SEQ ID NO: 937 - protein, 389 aa, Homo sapiens
MPTSSSSNAAERQRRFMKICPFSSKSSIVLALKFRSLIHFEKYPQPKGQKKKKIVKYGMGGLIILFLIAIIWFPLLFMSLVRSVVGVVNQPIDVTVTLKLGGYEPLFTMSAQQPSIIPFTAQAYEELSRQFDPQPLAMQFISQYSPEDIVTAQIEGSSGALWRISPPSRAQMKRELYNGTADITLRFTWNFQRDLAKGGTVEYANEKHMLALAPNSTARRQLASLLEGTSDQSVVIPNLFPKYIRAPNGPEANPVKQLQPNEEADYLGVRIQLRREQGAGATGFLEWWVIELQECRTDCNLLPMVIFSDKHHGAVRVHRAGHRQVRARILQRDLALHYVRGAAVRGPHPQALPGHLPGAGDSGAGAGGGVVRQAHLPLPLTGDHDQVDS

SEQ ID NO: 938 - protein, 2561 aa, Homo sapiens [sequence omitted]

SEQ ID NO: 939 - protein, 160 aa, Homo sapiens
MQPASAKWYDRRDYVFIEFCVEDSKDVNVNFEKSKLTFSCLGGSDNFKHLNEIDLFHCIDPNDSKHKRTDRSILCCLRKGESGQSWPRLTKERAKLNWLSVDFNNWKDWEDDSDEDMSNFDRFSEMMNNMGGDEDVDLPEVDGADDDSQDSDDEKMPDLE

SEQ ID NO: 940 - protein, 160 aa, Homo sapiens; identical to SEQ ID NO: 939

SEQ ID NO: 941 - protein, 164 aa, Homo sapiens
MFYLRQPASAKWYDRRDYVFIEFCVEDSKDVNVNFEKSKLTFSCLGGSDNFKHLNEIDLFHCIDPNDSKHKRTDRSILCCLRKGESGQSWPRLTKERAKLNWLSVDFNNWKDWEDDSDEDMSNFDRFSEMMNNMGGDEDVDLPEVDGADDDSQDSDDEKMPDLE

SEQ ID NO: 942 - protein, 130 aa, Homo sapiens
MQPASAKWYDRRDYVFIEFCVEDSKDVNVNFEKSKLTFSCLGGSDNFKHLNEIDLFHCIDPNDSKHKRTDRSILCCLRKGESGQSWPRLTKERAKMMNNMGGDEDVDLPEVDGADDDSQDSDDEKMPDLE

SEQ ID NO: 943 - protein, 160 aa, Homo sapiens; identical to SEQ ID NO: 939

SEQ ID NO: 944 - protein, 165 aa, Homo sapiens
MFYLRQPASAKWYDRRDYVFIEFCVEDSKDVNVNFEKSKLTFSCLGGSDNFKHLNEIDLFHCIDPNDSKHKRTDRSILCCLRKGESGQSWPRLTKERAKLNWLSVDFNNWKDWEDDSDEDMSNFDRFSEMMNNMGGDEDVDLPEVDGADDVSLKILFSVYFHTIK

SEQ ID NO: 945 - protein, 160 aa, Homo sapiens; identical to SEQ ID NO: 939

SEQ ID NO: 946 - protein, 314 aa, Homo sapiens
PRAPGRSLHPPAPGTVDSTTLSSALSAPKQPGTAQRPACRHGKSLSHLPLHSSKEDAYDGVTSENMRNGLVNSEVHNEDGRNGDVSQFPYVEFTGRDSVTCPTCQGTGRIPRGQENQLVALIPYSDQRLRPRRTKLYVMASVFVCLLLSGLAVFFLFPRSIDVKYIGVKSAYVSYDVQKRTIYLNITNTLNITNNNYYSVEVENITAQVQFSKTVIGKARLNNISIIGPLDMKQIDYTVPTVIAEEMSYMYDFCTLISIKVHNIVLMMQVTVTTTYFGHSEQISQERYQYVDCGRNTTYQLGQSEYLNVLQPQQ

SEQ ID NO: 947 - protein, 274 aa, Homo sapiens
MGKSLSHLPLHSSKEDAYDGVTSENMRNGLVNSEVHNEDGRNGDVSQFPYVEFTGRDSVTCPTCQGTGRIPRGQENQLVALIPYSDQRLRPRRTKLYVMASVFVCLLLSGLAVFFLFPRSIDVKYIGVKSAYVSYDVQKRTIYLNITNTLNITNNNYYSVEVENITAQVQFSKTVIGKARLNNISIIGPLDMKQIDYTVPTVIAEEMSYMYDFCTLISIKVHNIVLMMQVTVTTTYFGHSEQISQERYQYVDCGRNTTYQLGQSEYLNVLQPQQ

SEQ ID NO: 948 - protein, 738 aa, Homo sapiens
MTSSGPGPRFLLLLPLLLPPAASASDRPRGRDPVNPEKLLVITVATAETEGYLRFLRSAEFFNYTVRTLGLGEEWRGGDVARTVGGGQKVRWLKKEMEKYADREDMIIMFVDSYDVILAGSPTELLKKFVQSGSRLLFSAESFCWPEWGLAEQYPEVGTGKRFLNSGGFIGFATTIHQIVRQWKYKDDDDDQLFYTRLYLDPGLREKLSLNLDHKSRIFQNLNGALDEVVLKFDRNRVRIRNVAYDTLPIVVHGNGPTKLQLNYLGNYVPNGWTPEGGCGFCNQDRRTLPGGQPPPRVFLAVFVEQPTPFLPRFLQRLLLLDYPPDRVTLFLHNNEVFHEPHIADSWPQLQDHFSAVKLVGPEEALSPGEARDMAMDLCRQDPECEFYFSLDADAVLTNLQTLRILIEENRKVIAPMLSRHGKLWSNFWGALSPDEYYARSEDYVELVQRKRVGVWNVPYISQAYVIRGDTLRMELPQRDVFSGSDTDPDMAFCKSFRDKGIFLHLSNQHEFGRLLATSRYDTEHLHPDLWQIFDNPVDWKEQYIHENYSRALEGEGIVEQPCPDVYWFPLLSEQMCDELVAEMEHYGQWSGGRHEDSRLAGGYENVPTVDIHMKQVGYEDQWLQLLRTYVGPMTESLFPGYHTKARAVMNFVVRYRPDEQPSLRPHHDSSTFTLNVALNHKGLDYEGGGCRFLRYDCVISSPRKGWALLHPGRLTHYHEGLPTTWGTRYIMVSFVDP

SEQ ID NO: 949 - protein, 738 aa, Homo sapiens; identical to SEQ ID NO: 948

SEQ ID NO: 950 - protein, 738 aa, Homo sapiens; identical to SEQ ID NO: 948

SEQ ID NO: 951 - protein, 5405 aa, Homo sapiens; identical to SEQ ID NO: 440

SEQ ID NO: 952 - protein, 334 aa, Homo sapiens
MTRNRAQMLANQSKQGPPPSEKECAPTPAPVTRAKARGSEEDDAQAQHPRKRRFQRFTQQLQQQLNTSTQQTREVIQQTLAAIVDAIKLDAIEPYHSDRANPYFEYLQIRKKIEEKRKILCCITPQAPQCYAEYVTYTGSYLLDGKPLSKLHIPVVSAGPGRATAFSLWDASGAPSHGFLQPVLSHSWPLTSLDLLPPEETQPHFCCGGKSRKLPSCSADPRSFLQLVRARPRSPDLPLTLGAPRSHSCGAPPSRRSLSPLHSPSTRTASREPPPVSPAPAPPPSPLDPRGFPEPPYLHDESLPPPPPLGFWDSRAAAPLGQLGPRPPASPCST

SEQ ID NO: 953 - protein, 493 aa, Homo sapiens
MALFGALFLALLAGAHAEFPGCKIRVTSKALELVKQEGLRFLEQELETITIPDLRGKEGHFYYNISEVKVTELQLTSSELDFQPQQELMLQITNASLGLRFRRQLLYWFFYDGGYINASAEGVSIRTGLELSRDPAGRMKVSNVSCQASVSRMHAAFGGTFKKVYDFLSTFITSGMRFLLNQQICPVLYHAGTVLLNSLLDTVPVRSSVDELVGIDYSLMKDPVASTSNLDMDFRGAFFPLTERNWSLPNRAVEPQLQEEERMVYVAFSEFFFDSAMESYFRAGALQLLLVGDKVPHDLDMLLRATYFGSIVLLSPAVIDSPLKLELRVLAPPRCTIKPSGTTISVTASVTIALVPPDQPEVQLSSMTMDARLSAKMALRGKALRTQLDLRRFRIYSNHSALESLALIPLQAPLKTMLQIGVMPMLNERTWRGVQIPLPEGINFVHEVVTNHAGFLTIGADLHFAKGLREVIEKNRPADVRASTAPTPSTAAV

SEQ ID NO: 954 - protein, 493 aa, Homo sapiens; identical to SEQ ID NO: 953

SEQ ID NO: 955 - protein, 493 aa, Homo sapiens; identical to SEQ ID NO: 953

SEQ ID NO: 956 - protein, 493 aa, Homo sapiens; identical to SEQ ID NO: 953

SEQ ID NO: 957 - protein, 462 aa, Homo sapiens [sequence omitted]

SEQ ID NO: 958 - protein, 493 aa, Homo sapiens; identical to SEQ ID NO: 953

SEQ ID NO: 959 - protein, 441 aa, Homo sapiens
MALFGALFLALLAGAHAEFPGCKIRVTSKALELVKQEGLRFLEQELETITIPDLRGKEGHFYYNISEVKVTELQLTSSELDFQPQQELMLQITNASLGLRFRRQLLYWFLKVYDFLSTFITSGMRFLLNQQICPVLYHAGTVLLNSLLDTVPVRSSVDELVGIDYSLMKDPVASTSNLDMDFRGAFFPLTERNWSLPNRAVEPQLQEEERMVYVAFSEFFFDSAMESYFRAGALQLLLVGDKVPHDLDMLLRATYFGSIVLLSPAVIDSPLKLELRVLAPPRCTIKPSGTTISVTASVTIALVPPDQPEVQLSSMTMDARLSAKMALRGKALRTQLDLRRFRIYSNHSALESLALIPLQAPLKTMLQIGVMPMLNERTWRGVQIPLPEGINFVHEVVTNHAGFLTIGADLHFAKGLREVIEKNRPADVRASTAPTPSTAAV

SEQ ID NO: 960 - protein, 513 aa, Homo sapiens
MGLSGSDNSCDPTPPPGPLAMALFGALFLALLAGAHAEFPGCKIRVTSKALELVKQEGLRFLEQELETITIPDLRGKEGHFYYNISEVKVTELQLTSSELDFQPQQELMLQITNASLGLRFRRQLLYWFFYDGGYINASAEGVSIRTGLELSRDPAGRMKVSNVSCQASVSRMHAAFGGTFKKVYDFLSTFITSGMRFLLNQQICPVLYHAGTVLLNSLLDTVPVRSSVDELVGIDYSLMKDPVASTSNLDMDFRGAFFPLTERNWSLPNRAVEPQLQEEERMVYVAFSEFFFDSAMESYFRAGALQLLLVGDKVPHDLDMLLRATYFGSIVLLSPAVIDSPLKLELRVLAPPRCTIKPSGTTISVTASVTIALVPPDQPEVQLSSMTMDARLSAKMALRGKALRTQLDLRRFRIYSNHSALESLALIPLQAPLKTMLQIGVMPMLNERTWRGVQIPLPEGINFVHEVVTNHAGFLTIGADLHFAKGLREVIEKNRPADVRASTAPTPSTAAV

SEQ ID NO: 961 - protein, 186 aa, Homo sapiens
MAAGIVASRRLRDLLTRRLTGSNYPGLSISLRLTGSSAQEAASGVALGEAPDHSYESLRVTSAQKHVLHVQLNRPNKRNAMNKVFWREMVECFNKISRDADCRAVVISGAGKMFTAGIDLMDMASDILQPKGDDVARISWYLRDIITRYQETFNVIERCPKPVIAAVHGGCIGGGESAAILLLGCS

SEQ ID NO: 962 - protein, 127 aa, Homo sapiens
MNKVFWREMVECFNKISRDADCRAVVISGAGKMFTAGIDLMDMASDILQPKGDDVARISWYLRDIITRYQETFNVIERCPKPVIAAVHGGCIGGGVDLVTACDIRYCAQDAFFQVKEVDVGLAADVG

SEQ ID NO: 963 - protein, 126 aa, Homo sapiens
TREMVECFNKISRDADCRAVVISGAGKMFTAGIDLMDMASDILQPKGDDVARISWYLRDIITRYQETFNVIERCPKPVIAAVHGGCIGGGVDLVTACDIRYCAQDAFFQVKEVDVGLAADVGTLQR

SEQ ID NO: 964 - protein, 328 aa, Homo sapiens [sequence omitted]

SEQ ID NO: 965 - protein, 127 aa, Homo sapiens
TREMVECFNKISRDADCRAVVISGAGKMFTAGIDLMDMASDILQPKGDDVARISWYLRDIITRYQETFNVIERCPKPVIAAVHGGCIGGGVDLVTACDIRYCAQDAFFQVKEVDVGLAADVGTLQRL

SEQ ID NO: 966 - protein, 328 aa, Homo sapiens
MAAGIVASRRLRDLLTRRLTGSNYPGLSISLRLTGSSAQEEASGVALGEAPDHSYESLRVTSAQKHVLHVQLNRPNKRNAMNKVFWREMVECFNKISRDADCRAVVISGAGKMFTAGIDLMDMASDILQPKGDDVARISWYLRDIITRYQETFNVIERCPKPVIAAVHGGCIGGGVDLVTACDIRYCAQDAFFQVKEVDVGLAADVGTLERLPKVIGNQSLVNELAFTAHKMMADEALDSGLVSRVFPDKEVMLDAALPLAPEISSKTTVLVQSTKVNLLYSRDHSVAESLNYVASWNMSMLQTQDLVKSVQPTTENKELKTVTFSKL

SEQ ID NO: 967 - protein, 369 aa, Homo sapiens
LRLQCSNEAVLVATFHPTDPTVLITCGKSHIYFWTLEGGSLSKRQGLFEKHEKPKYVLCVTFLEGGDVVTGDSGGNLYVWGKGGNRITQAVLGAHDGGVFGLCALRDGTLVSGGGRDRRVVLWGSDYSKLQEVEVPEDFGPVRTVAEGHGDTLYVGTTRNSILQGSVHTGFSLLVQGHVEELWGLATHPSRAQFVTCGQDKLVHLWSSDSHQPLWSRIIEDPARSAGFHPSGSVLAVGTVTGRWLLLDTETHDLVAIHTDGNEQISVVSFSPDGAYLAVGSHDNLVYVYTVDQGGRKVSRLGKCSGHSSFITHLDWAQDSSCFVTNSGDYEILYLEMGFHHLGQAGLELLTSGDPARCCGSCCLLGLQT

SEQ ID NO: 968 - protein, 649 aa, Homo sapiens
MSSFGAGKTKEVIFSVEDGSVKMFLRGRPVPMMIPDELAPTYSLDTRSELPSCRLKLEWVYGYRGRDCRANLYLLPTGEIVYFVASVAVLYSVEEQRQRHYLGHNDDIKCLAIHPDMVTIATGQVAGTTKEGKPLPPHVRIWDSVSLSTLHVLGLGVFDRAVCCVGFSKSNGGNLLCAVDESNDHMLSVWDWAKETKVVDVKCSNEAVLVATFHPTDPTVLITCGKSHIYFWTLEGGSLSKRQGLFEKHEKPKYVLCVTFLEGGDVVTGDSGGNLYVWGKGGNRITQAVLGAHDGGVFGLCALRDGTLVSGGGRDRRVVLWGSDYSKLQEVEVPEDFGPVRTVAEGHGDTLYVGTTRNSILQGSVHTGFSLLVQGHVEELWGLATHPSRAQFVTCGQDKLVHLWSSDSHQPLWSRIIEDPARSAGFHPSGSVLAVGTVTGRWLLLDTETHDLVAIHTDGNEQISVVSFSPDGAYLAVGSHDNLVYVYTVDQGGRKVSRLGKCSGHSSFITHLDWAQDSSCFVTNSGDYEILYWDPATCKQITSADAVRNMEWATATCVLGFGVFGIWSEGADGTDINAVARSHDGKLLASADDFGKVHLFSYPCCQPRALSHKYGGHSSHVTNVAFLWDDSMALTTGGKDTSVLQWRVV

SEQ ID NO: 969 - protein, 649 aa, Homo sapiens [sequence omitted]

SEQ ID NO: 970 - protein, 512 aa, Homo sapiens [sequence omitted]

SEQ ID NO: 971 - protein, 512 aa, Homo sapiens
MKAIIHLTLLALLSVNTATNQGNSADAVTTTETATSGPTVAAADTTETNFPETASTTANTPSFPTATSPAPPIISTHSSSTIPTPAPPIISTHSSSTIPIPTAADSESTTNVNSLATSDIITASSPNDGLITMVPSETQSNNEMSPTTEDNQSSGPPTGTALLETSTLNSTGPSNPCQDDPCADNSLCVKLHNTSFCLCLEGYYYNSSTCKKGKVFPGKISVTVSETFDPEEKHSMAYQDLHSEITSLFKDVFGTSVYGQTVILTVSTSLSPRSEMRADDKFVNVTIVTILAETTSDNEKTVTEKINKAIRSSSSNFLNYDLTLRCDYYGCNQTADDCLNGLACDCKSDLQRPNPQSPFCVASSLKCPDACNAQHKQCLIKKSGGAPECACVPGYQEDANGNCQKCAFGYSGLDCKDKFQLILTIVGTIAGIVILSMIIALIVTARSNNKTKHIEEENLIDEDFQNLKLRSTGFTNLGAEGSVFPKVRITASRDSQMQNPYSRHSSMPRPDY

SEQ ID NO: 972 - protein, 511 aa, Homo sapiens
MKAIIHLTLLALLSVNTATNQGNSADAVTTTETATSGPTVAAADTTETNFPETASTTANTPFPTATSPAPPIISTHSSSTIPTPAPPIISTHSSSTIPIPTAADSESTTNVNSLATSDIITASSPNDGLITMVPSETQSNNEMSPTTEDNQSSGPPTGTALLETSTLNSTGPSNPCQDDPCADNSLCVKLHNTSFCLCLEGYYYNSSTCKKGKVFPGKISVTVSETFDPEEKHSMAYQDLHSEITSLFKDVFGTSVYGQTVILTVSTSLSPRSEMRADDKFVNVTIVTILAETTSDNEKTVTEKINKAIRSSSSNFLNYDLTLRCDYYGCNQTADDCLNGLACDCKSDLQRPNPQSPFCVASSLKCPDACNAQHKQCLIKKSGGAPECACVPGYQEDANGNCQKCAFGYSGLDCKDKFQLILTIVGTIAGIVILSMIIALIVTARSNNKTKHIEEENLIDEDFQNLKLRSTGFTNLGAEGSVFPKVRITASRDSQMQNPYSRHSSMPRPDY

SEQ ID NO: 973 - protein, 287 aa, Homo sapiens
MEENLANRSHAELETALRDSSRVLQAMLATQLRSFDDHFQHLLNDSERTLQATFPGAFGELYTQNARAFRDLYSELRLYYRGANLHLEETLAEFWARLLERLFKQLHPQLLLPDDYLDCLGKQAEALRPFGEAPRELRLRATRAFVAARSFVQGLGVASDVVRKVAQVPLGPECSRAVMKLVYCAHCLGVPGARPCPDYCRNVLKGCLANQADLDAEWRNLLGEPPPARAAWNCLGECTTGGPGGRVVPSLELGPRDLIRDALTRARSGWCCRVEGPGCLLNVLSDV

SEQ ID NO: 974 - protein, 558 aa, Homo sapiens
MELRARGWWLLCAAAALVACARGDPASKSRSCGEVRQIYGAKGFSLSDVPQAEISGEHLRICPQGYTCCTSEMEENLANRSHAELETALRDSSRVLQAMLATQLRSFDDHFQHLLNDSERTLQATFPGAFGELYTQNARAFRDLYSELRLYYRGANLHLEETLAEFWARLLERLFKQLHPQLLLPDDYLDCLGKQAEALRPFGEAPRELRLRATRAFVAARSFVQGLGVASDVVRKVAQVPLGPECSRAVMKLVYCAHCLGVPGARPCPDYCRNVLKGCLANQADLDAEWRNLLDSMVLITDKFWGTSGVESVIGSVHTWLAEAINALQDNRDTLTAKVIQGCGNPKVNPQGPGPEEKRRRGKLAPRERPPSGTLEKLVSEAKAQLRDVQDFWISLPGTLCSEKMALSTASDDRCWNGMARGRYLPEVMGDGLANQINNPEVEVDITKPDMTIRQQIMQLKIMTNRLRSAYNGNDVDFQDASDDGSGSGSGDGCLDDLCGRKVSRKSSSSRTPLTHALPGLSEQEGQKTSAASCPQPPTFLLPLLLFLALTVARPRWR

SEQ ID NO: 975 - protein, 558 aa, Homo sapiens; identical to SEQ ID NO: 974

SEQ ID NO: 976 - protein, 558 aa, Homo sapiens; identical to SEQ ID NO: 974

SEQ ID NO: 977 - protein, 486 aa, Homo sapiens
MEENLANRSHAELETALRDSSRVLQAMLATQLRSFDDHFQHLLNDSERTLQATFPGAFGELYTQNARAFRDLYSELRLYYRGANLHLEETLAEFWARLLERLFKQLHPQLLLPDDYLDCLGKQAEALRPFGEAPRELRLRATRAFVAARSFVQGLGVASDVVRKVAQVPLGPECSRAVMKLVYCAHCLGVPGARPCPDYCRNVLKGCLANQADLDAEWRNLLDSMVLITDKFWGTSGVESVIGSVHTWLAEAINALQDNRDTLTAKVIQGCGNPKVNPQGPGPEEKRRRGKLAPRERPPSGTLEKLVSEAKAQLRDVQDFWISLPGTLCSEKMALSTASDDRCWNGMARGRYLPEVMGDGLANQINNPEVEVDITKPDMTIRQQIMQLKIMTNRLRSAYNGNDVDFQDASDDGSGSGSGDGCLDDLCGRKVSRKSSSSRTPLTHALPGLSEQEGQKTSAASCPQPPTFLLPLLLFLALTVARPRWR

SEQ ID NO: 978 - protein, 287 aa, Homo sapiens; identical to SEQ ID NO: 973

SEQ ID NO: 979 - protein, 486 aa, Homo sapiens; identical to SEQ ID NO: 977

SEQ ID NO: 980 - protein, 353 aa, Homo sapiens
MEKTLETVPLERKKREKEQFRKLFIGGLSFETTEESLRNYYEQWGKLTDCVVMRDPASKRSRGFGFVTFSSMAEVDAAMAARPHSIDGRVVEPKRAVAREESGKPGAHVTVKKLFVGGIKEDTEEHHLRDYFEEYGKIDTIEIITDRQSGKKRGFGFVTFDDHDPVDKIVLQKYHTINGHNAEVRKALSRQEMQEVQSSRSGRGGNFGFGDSRGGGGNFGPGPGSNFRGGSDGYGSGRGFGDGYNGYGGGPGGGNFGGSPGYGGGRGGYGGGGPGYGNQGGGYGGGYDNYGGGNYGSGNYNDFGNYNQQPSNYGPMKSGNFGGSRNMGGPYGGGNYGPGGSGGSGGYGGRSRY

SEQ ID NO: 981 - protein, 341 aa, Homo sapiens
MEREKEQFRKLFIGGLSFETTEESLRNYYEQWGKLTDCVVMRDPASKRSRGFGFVTFSSMAEVDAAMAARPHSIDGRVVEPKRAVAREESGKPGAHVTVKKLFVGGIKEDTEEHHLRDYFEEYGKIDTIEIITDRQSGKKRGFGFVTFDDHDPVDKIVLQKYHTINGHNAEVRKALSRQEMQEVQSSRSGRGGNFGFGDSRGGGGNFGPGPGSNFRGGSDGYGSGRGFGDGYNGYGGGPGGGNFGGSPGYGGGRGGYGGGGPGYGNQGGGYGGGYDNYGGGNYGSGNYNDFGNYNQQPSNYGPMKSGNFGGSRNMGGPYGGGNYGPGGSGGSGGYGGRSRY

SEQ ID NO: 982 - protein, 348 aa, Homo sapiens
KLKWYFPLQREKEQFRKLFIGGLSFETTEESLRNYYEQWGKLTDCVVMRDPASKRSRGFGFVTFSSMAEVDAAMAARPHSIDGRVVEPKRAVAREESGKPGAHVTVKKLFVGGIKEDTEEHHLRDYFEEYGKIDTIEIITDRQSGKKRGFGFVTFDDHDPVDKIVLQKYHTINGHNAEVRKALSRQEMQEVQSSRSGRGGNFGFGDSRGGGGNFGPGPGSNFRGGSDGYGSGRGFGDGYNGYGGGPGGGNFGGSPGYGGGRGGYGGGGPGYGNQGGGYGGGYDNYGGGNYGSGNYNDFGNYNQQPSNYGPMKSGNFGGSRNMGGPYGGGNYGPGGSGGSGGYGGRSRY

SEQ ID NO: 983 - protein, 341 aa, Homo sapiens; identical to SEQ ID NO: 981

SEQ ID NO: 984 - protein, 301 aa, Homo sapiens
MEREKEQFRKLFIGGLSFETTEESLRNYYEQWGKLTDCVVMRDPASKRSRGFGFVTFSSMAEVDAAMAARPHSIDGRVVEPKRAVAREESGKPGAHVTVKKLFVGGIKEDTEEHHLRDYFEEYGKIDTIEIITDRQSGKKRGFGFVTFDDHDPVDKIVLQKYHTINGHNAEVRKALSRQEMQEVQSSRSGRGGNFGFGDSRGGGGNFGPGPGSNFRGGSDGYGSGRGFGDGYNGYGGGPGGNYGSGNYNDFGNYNQQPSNYGPMKSGNFGGSRNMGGPYGGGNYGPGGSGGSGGYGGRSRY

SEQ ID NO: 985 - protein, 353 aa, Homo sapiens; identical to SEQ ID NO: 980

SEQ ID NO: 986 - protein, 341 aa, Homo sapiens; identical to SEQ ID NO: 981

SEQ ID NO: 987 - protein, 348 aa, Homo sapiens; identical to SEQ ID NO: 982

SEQ ID NO: 988 - protein, 353 aa, Homo sapiens; identical to SEQ ID NO: 980

SEQ ID NO: 989 - protein, 357 aa, Homo sapiens
VRDGENFRNCSFGEEKGTLEKEQFRKLFIGGLSFETTEESLRNYYEQWGKLTDCVVMRDPASKRSRGFGFVTFSSMAEVDAAMAARPHSIDGRVVEPKRAVAREESGKPGAHVTVKKLFVGGIKEDTEEHHLRDYFEEYGKIDTIEIITDRQSGKKRGFGFVTFDDHDPVDKIVLQKYHTINGHNAEVRKALSRQEMQEVQSSRSGRGGNFGFGDSRGGGGNFGPGPGSNFRGGSDGYGSGRGFGDGYNGYGGGPGGGNFGGSPGYGGGRGGYGGGGPGYGNQGGGYGGGYDNYGGGNYGSGNYNDFGNYNQQPSNYGPMKSGNFGGSRNMGGPYGGGNYGPGGSGGSGGYGGRSRY

SEQ ID NO: 990 - protein, 460 aa, Homo sapiens
MAPGRAVAGLLLLAAAGLGGVAEGPGLAFSEDVLSVFGANLSLSAAQLQHLLEQMGAASRVGVPEPGQLHFNQCLTAEEIFSLHGFSNATQITSSKFSVICPAVLQQLNFHPCEDRPKHKTRPSHSEVWGYGFLSVTIINLASLLGLILTPLIKKSYFPKILTFFVGLAIGTLFSNAIFQLIPEAFGFDPKVDSYVEKAVAVFGGFYLLFFFERMLKMLLKTYGQNGHTHFGNDNFGPQEKTHQPKALPAINGVTCYANPAVTEANGHIHFDNVSVVSLQDGKKEPSSCTCLKGPKLSEIGTIAWMITLCDALHNFIDGLAIGASCTLSLLQGLSTSIAILCEEFPHELGDFVILLNAGMSTRQALLFNFLSACSCYVGLAFGILVGNNFAPNIIFALAGGMFLYISLADMFPEMNDMLREKVTGRKTDFTFFMIQNAGMLTGFTAILLITLYAGEIELE

SEQ ID NO: 991 - protein, 476 aa, Homo sapiens
MAPGRAVAGLLLLAAAGLGGVAEGPGLAFSEDVLSVFGANLSLSAAQLQHLLEQMGAASRVGVPEPGQLHFNQCLTAEEIFSLHGFSNATQITSSKFSVICPAVLQQLNFHPCEDRPKHKTRPSHSEVWGYGFLSVTIINLASLLGLILTPLIKKSYFPKILTFFVGLAIGTLFSNAIFQLIPEAFGFDPKVDSYVEKAVAVFGGFYLLFFFERMLKMLLKTYGQNGHTHFGNDNFGPQEKTHQPKALPAINGVTCYANPAVTEANGHIHFDNVSVVSLQVYVNSIFPSLYCILYTDGKKEPSSCTCLKGPKLSEIGTIAWMITLCDALHNFIDGLAIGASCTLSLLQGLSTSIAILCEEFPHELGDFVILLNAGMSTRQALLFNFLSACSCYVGLAFGILVGNNFAPNIIFALAGGMFLYISLADMFPEMNDMLREKVTGRKTDFTFFMIQNAGMLTGFTAILLITLYAGEIELE

SEQ ID NO: 992 - protein, 460 aa, Homo sapiens; identical to SEQ ID NO: 990

SEQ ID NO: 993 - protein, 460 aa, Homo sapiens; identical to SEQ ID NO: 990

SEQ ID NO: 994 - protein, 380 aa, Homo sapiens
MLQTLYDYFWWERLWLPVNLTWADLEDRDGRVYAKASDLYITLPLALLFLIVRYFFELYVATPLAALLNIKEKTRLRAPPNATLEHFYLTSGKQPKQVEVELLSRQSGLSGRQVERWFRRRRNQDRPSLLKKFREASWRFTFYLIAFIAGMAVIVDKPWFYDMKKVWEGYPIQSTIPSQYWYYMIELSFYWSLLFSIASDVKRKDFKEQIIHHVATIILISFSWFANYIRAGTLIMALHDSSDYLLESAKMFNYAGWKNTCNNIFIVFAIVFIITRLVILPFWILHCTLVYPLELYPAFFGYYFFNSMMGVLQLLHIFWAYLILRMAHKFITGKLVEDERSDREETESSEGEEAAAGGGAKSRPLANGHPILNNNHRKND

SEQ ID NO: 995 - protein, 380 aa, Homo sapiens; identical to SEQ ID NO: 994

SEQ ID NO: 996 - protein, 380 aa, Homo sapiens; identical to SEQ ID NO: 994

SEQ ID NO: 997 - protein, 380 aa, Homo sapiens; identical to SEQ ID NO: 994

SEQ ID NO: 998 - protein, 380 aa, Homo sapiens; identical to SEQ ID NO: 994

SEQ ID NO: 999 - protein, 332 aa, Homo sapiens
MATLKDQLIYNLLKEEQTPQNKITVVGVGAVGMACAISILMKDLADELALVDVIEDKLKGEMMDLQHGSLFLRTPKIVSGKDYNVTANSKLVIITAGARQQEGESRLNLVQRNVNIFKFIIPNVVKYSPNCKLLIVSNPVDILTYVAWKISGFPKNRVIGSGCNLDSARFRYLMGERLGVHPLSCHGWVLGEHGDSSVPVWSGMNVAGVSLKTLHPDLGTDKDKEQWKEVHKQVVESAYEVIKLKGYTSWAIGLSVADLAESIMKNLRRVHPVSTMIKGLYGIKDDVFLSVPCILGQNGISDLVKVTLTSEEEARLKKSADTLWGIQKELQF

SEQ ID NO: 1000 - protein, 332 aa, Homo sapiens; identical to SEQ ID NO: 999

SEQ ID NO: 1001 - protein, 331 aa, Homo sapiens
ATLKDQLIYNLLKEEQTPQNKITVVGVGAVGMACAISILMKDLADELALVDVIEDKLKGEMMDLQHGSLFLRTPKIVSGKDYNVTANSKLVIITAGARQQEGESRLNLVQRNVNIFKFIIPNVVKYSPNCKLLIVSNPVDILTYVAWKISGFPKNRVIGSGCNLDSARFRYLMGERLGVHPLSCHGWVLGEHGDSSVPVWSGMNVAGVSLKTLHPDLGTDKDKEQWKEVHKQVVESAYEVIKLKGYTSWAIGLSVADLAESIMKNLRRVHPVSTMIKGLYGIKDDVFLSVPCILGQNGISDLVKVTLTSEEEARLKKSADTLWGIQKELQF

SEQ ID NO: 1002 - protein, 274 aa, Homo sapiens
MATLKDQLIYNLLKEEQTPQNKITVVGVGAVGMACAISILMKDLADELALVDVIEDKLKGEMMDLQHGSLFLRTPKIVSGKDYNVTANSKLVIITAGARQQEGESRLNLVQRNVNIFKFIIPNVVKYSPNCKLLIVSNPVDILTYVAWKISGFPKNRVIGSGCNLDSARFRYLMGERLGVHPLSCHGWVLGEHGDSSVPVWSGMNVAGVSLKTLHPDLGTDKDKEQWKECRYTLGDPKGAAILKSSDVISFHCLGYNRILGGGCACCPFYLICD

SEQ ID NO: 1003 - protein, 463 aa, Homo sapiens
METEQPEETFPNTETNGEFGKRPAEDMEEEQAFKRSRNTDEMVELRILLQSKNAGAVIGKGGKNIKALRTDYNASVSVPDSSGPERILSISADIETIGEILKKIIPTLEEGLQLPSPTATSQLPLESDAVECLNYQHYKGSDFDCELRLLIHQSLAGGIIGVKGAKIKELRENTQTTIKLFQECCPHSTDRVVLIGGKPDRVVECIKIILDLISESPIKGRAQPYDPNFYDETYDYGGFTMMFDDRRGRPVGFPMRGRGGFDRMPPGRGGRPMPPSRRDYDDMSPRRGPPPPPPGRGGRGGSRARNLPLPPPPPPRGGDLMAYDRRGRPGDRYDGMVGFSADETWDSAIDTWSPSEWQMAYEPQGGSGYDYSYAGGRGSYGDLGGPIITTQVTIPKDLAGSIIGKGGQRIKQIRHESGASIKIDEPLEGSEDRIITITGTQDQIQNAQYLLQNSVKQYSGKFF

SEQ ID NO: 1004 - protein, 463 aa, Homo sapiens [sequence omitted]

SEQ ID NO: 1005 - protein, 440 aa, Homo sapiens [sequence omitted]

SEQ ID NO: 1006 - protein, 463 aa, Homo sapiens [sequence omitted]

SEQ ID NO: 1007 - protein, 464 aa, Homo sapiens
METEQPEETFPNTETNGEFGKRPAEDMEEEQAFKRSRNTDEMVELRILLQSKNAGAVIGKGGKNIKALRTDYNASVSVPDSSGPERILSISADIETIGEILKKIIPTLEEGLQLPSPTATSQLPLESDAVECLNYQHYKGSDFDCELRLLIHQSLAGGIIGVKGAKIKELRENTQTTIKLFQECCPHSTDRVVLIGGKPDRVVECIKIILDLISESPIKGRAQPYDPNFYDETYDYGGFTMMFDDRRGRPVGFPMRGRGGFDRMPPGRGGRPMPPSRRDYDDMSPRRGPPPPPPGRGGRGGSRARNLPLPPPPPPRGGDLMAYDRRGRPGDRYDGMVGFSADETWDSAIDTWSPSEWQMAYEPQGGSGYDYSYAGGRGSYGDLGGPIITTQVTIPKDLAGSIIGKGGQRIKQIRHESGASIKIDEPLEGSEDRIITITGTQDQIQNAQYLLQNSVKQYADVEGF

SEQ ID NO: 1008 - protein, 464 aa, Homo sapiens; identical to SEQ ID NO: 1007

SEQ ID NO: 1009 - protein, 462 aa, Homo sapiens [sequence omitted]

SEQ ID NO: 1010 - protein, 464 aa, Homo sapiens [sequence omitted]

SEQ ID NO: 1011 - protein, 897 aa, Homo sapiens [sequence omitted]

SEQ ID NO: 1012 - protein, 463 aa, Homo sapiens; identical to SEQ ID NO: 1003

SEQ ID NO: 1013 - protein, 522 aa, Homo sapiens
MPRKKAAAAAWEEPSSGNGTARAGPRKRGGPAGRKRERPERCSSSSGGGSSGDEDGLELDGAPGGGKRAARPATAGKAGGAAVVITEPEHTKERVKLEGSKCKGQLLIFGATNWDLIGRKEVPKQQAAYRNLGQNLWGPHRYGCLAGVRVRTVVSGSCAAHSLLITTEGKLWSWGRNEKGQLGHGDTKRVEAPRLIEGLSHEVIVSAACGRNHTLALTETGSVFAFGENKMGQLGLGNQTDAVPSPAQIMYNGQPITKMACGAEFSMIMDCKGNLYSFGCPEYGQLGHNSDGKFIARAQRIEYDCELVPRRVAIFIEKTKDGQILPVPNVVVRDVACGANHTLVLDSQKRVFSWGFGGYGRLGHAEQKDEMVPRLVKLFDFPGRGASQIYAGYTCSFAVSEVGGLFFWGATNTSRESTMYPKAVQDLCGWRIRSLACGKSSIIVAADESTISWGPSPTFGELGYGDHKPKSSTAAQEVKTLDGIFSEQVAMGYSHSLVIARDESETEKEKIKKLPEYNPRTL

SEQ ID NO: 1014 - protein, 522 aa, Homo sapiens; identical to SEQ ID NO: 1013

SEQ ID NO: 1015 - protein, 522 aa, Homo sapiens; identical to SEQ ID NO: 1013

SEQ ID NO: 1016 - protein, 475 aa, Homo sapiens
MAAKSQPNIPKAKSLDGVTNDRTASQGQWGRAWEVDWFSLASVIFLLLFAPFIVYYFIMACDQYSCALTGPVVDIVTGHARLSDIWAKTPPITRKAAQLYTLWVTFQVLLYTSLPDFCHKFLPGYVGGIQEGAVTPAGVVNKYQINGLQAWLLTHLLWFANAHLLSWFSPTIIFDNWIPLLWCANILGYAVSTFAMVKGYFFPTSARDCKFTGNFFYNYMMGIEFNPRIGKWFDFKLFFNGRPGIVAWTLINLSFAAKQRELHSHVTNAMVLVNVLQAIYVIDFFWNETWYLKTIDICHDHFGWYLGWGDCVWLPYLYTLQGLYLVYHPVQLSTPHAVGVLLLGLVGYYIFRVANHQKDLFRRTDGRCLIWGRKPKVIECSYTSADGQRHHSKLLVSGFWGVARHFNYVGDLMGSLAYCLACGGGHLLPYFYIIYMAILLTHRCLRDEHRCASKYGRDWERYTAAVPYRLLPGIF

SEQ ID NO: 1017 - protein, 475 aa, Homo sapiens; identical to SEQ ID NO: 1016

SEQ ID NO: 1018 - protein, 475 aa, Homo sapiens; identical to SEQ ID NO: 1016

SEQ ID NO: 1019 - protein, 475 aa, Homo sapiens; identical to SEQ ID NO: 1016

SEQ ID NO: 1020 - protein, 727 aa, Homo sapiens
MLRIPVRRALVGLSKSPKGCVRTTATAASNLIEVFVDGQSVMVEPGTTVLQACEKVGMQIPRFCYHERLSVAGNCRMCLVEIEKAPKVVAACAMPVMKGWNILTNSEKSKKAREGVMEFLLANHPLDCPICDQGGECDLQDQSMMFGNDRSRFLEGKRAVEDKNIGPLVKTIMTRCIQCTRCIRFASEIAGVDDLGTTGRGNDMQVGTYIEKMFMSELSGNIIDICPVGALTSKPYAFTARPWETRKTESIDVMDAVGSNIVVSTRTGEVMRILPRMHEDINEEWISDKTRFAYDGLKRQRLTEPMVRNEKGLLTYTSWEDALSRVAGMLQSFQGKDVAAIAGGLVDAEALVALKDLLNRVDSDTLCTEEVFPTAGAGTDLRSNYLLNTTIAGVEEADVVLLVGTNPRFEAPLFNAWIRKSWLHNDLKVALIGSPVDLTYTYDHLGDSPKILQDIASGSHPFSQVLKEAKKPMVVLGSSALQRNDGAAILAAVSSIAQKIRMTSGVTGDWKVMNILHRIASQVAALDLGYKPGVEAIRKNPPKVLFLLGADGGCITRQDLPKDCFIIYQGHHGDVGAPIADVILPGAAYTEKSATYVNTEGRAQQTKVAVTPPGLAREDWKIIRALSEIAGMTLPYDTLDQVRNRLEEFSPNLVRYDDIEGANYFQQANELSKLVNQQLLADPLVPPQLTLKDFYMTDSISRASQTMAKCVKAVTEGAQAVEEPSIC

SEQ ID NO: 1021 - protein, 727 aa, Homo sapiens
MLRIPVRKALVGLSKSPKGCVRTTATAASNLIEVFVDGQSVMVEPGTTVLQACEKVGMQIPRFCYHERLSVAGNCRMCLVEIEKAPKVVAACAMPVMKGWNILTNSEKSKKAREGVMEFLLANHPLDCPICDQGGECDLQDQSMMFGNDRSRFLEGKRAVEDKNIGPLVKTIMTRCIQCTRCIRFASEIAGVDDLGTTGRGNDMQVGTYIEKMFMSELSGNIIDICPVGALTSKPYAFTARPWETRKTESIDVMDAVGSNIVVSTRTGEVMRILPRMHEDINEEWISDKTRFAYDGLKRQRLTEPMVRNEKGLLTYTSWEDALSRVAGMLQSFQGKDVAAIAGGLVDAEALVALKDLLNRVDSDTLCTEEVFPTAGAGTDLRSNYLLNTTIAGVEEADVVLLVGTNPRFEAPLFNARIRKSWLHNDLKVALIGSPVDLTYTYDHLGDSPKILQDIASGSHPFSQVLKEAKKPMVVLGSSALQRNDGAAILAAVSSIAQKIRMTSGVTGDWKVMNILHRIASQVAALDLGYKPGVEAIRKNPPKVLFLLGADGGCITRQDLPKDCFIIYQGHHGDVGAPIADVILPGAAYTEKSATYVNTEGRAQQTKVAVTPPGLAREDWKIIRALSEIAGMTLPYDTLDQVRNRLEEFSPNLVRYDDIEGANYFQQANELSKLVNQQLLADPLVPPQLTIKDFYMTDSISRASQTMAKCVKAVTEGAQAVEEPSIC

SEQ ID NO: 1022 - protein, 727 aa, Homo sapiens
MLRIPVRKALVGLSKSPKGCVRTTATAASNLIEVFVDGQSVMVEPGTTVLQACEKVGMQIPRFCYHERLSVAGNCRMCLVEIEKAPKVVAACAMPVMKGWNILTNSEKSKKAREGVMEFLLANHPLDCPICDQGGECDLQDQSMMFGNDRSRFLEGKRAVEDKNIGPLVKTIMTRCIQCTRCIRFASEIAGVDDLGTTGRGNDMQVGTYIEKMFMSELSGNIIDICPVGALTSKPYAFTARPWETRKTESIDVMDAVGSNIVVSTRTGEVMRILPRMHEDINEEWISDKTRFAYDGLKRQRLTEPMVRNEKGLLTYTSWEDALSRVAGMLQSFQGKDVAAIAGGLVDAEALVALKDLLNRVDSDTLCTEEVFPTAGAGTDLRSNYLLNTTIAGVEEADVVLLVGTNPRFEAPLFNARIRKSWLHNDLKVALIGSPVDLTYTYDHLGDSPKILQDIASGSHPFSQVLKEAKKPMVVLGSSALQRNDGAAILAAVSSIAQKIRMTSGVTGDWKVMNILHRIASQVAALDLGYKPGVEAIRKNPPKVLFLLGADGGCITRQDLPKDCFIIYQGHHGDVGAPIADVILPGAAYTEKSATYVNTEGRAQQTKVAVTPPGLAREDWKIIRALSEIAGMTLPYDTLDQVRNRLEEVSPNLVRYDDIEGANYFQQANELSKLVNQQLLADPLVPPQLTIKDFYMTDSISRASQTMAKCVKAVTEGAQAVEEPSIC

SEQ ID NO: 1023 - protein, 741 aa, Homo sapiens
MRIRGSSGTLSRINMLRIPVRKALVGLSKSPKGCVRTTATAASNLIEVFVDGQSVMVEPGTTVLQACEKVGMQIPRFCYHERLSVAGNCRMCLVEIEKAPKVVAACAMPVMKGWNILTNSEKSKKAREGVMEFLLANHPLDCPICDQGGECDLQDQSMMFGNDRSRFLEGKRAVEDKNIGPLVKTIMTRCIQCTRCIRFASEIAGVDDLGTTGRGNDMQVGTYIEKMFMSELSGNIIDICPVGALTSKPYAFTARPWETRKTESIDVMDAVGSNIVVSTRTGEVMRILPRMHEDINEEWISDKTRFAYDGLKRQRLTEPMVRNEKGLLTYTSWEDALSRVAGMLQSFQGKDVAAIAGGLVDAEALVALKDLLNRVDSDTLCTEEVFPTAGAGTDLRSNYLLNTTIAGVEEADVVLLVGTNPRFEAPLFNARIRKSWLHNDLKVALIGSPVDLTYTYDHLGDSPKILQDIASGSHPFSQVLKEAKKPMVVLGSSALQRNDGAAILAAVSSIAQKIRMTSGVTGDWKVMNILHRIASQVAALDLGYKPGVEAIRKNPPKVLFLLGADGGCITRQDLPKDCFIIYQGHHGDVGAPIADVILPGAAYTEKSATYVNTEGRAQQTKVAVTPPGLAREDWKIIRALSEIAGMTLPYDTLDQVRNRLEEVSPNLVRYDDIEGANYFQQANELSKLVNQQLLADPLVPPQLTIKDFYMTDSISRASQTMAKCVKAVTEGAQAVEEPSIC

SEQ ID NO: 1024 - protein, 397 aa, Homo sapiens [sequence omitted]

SEQ ID NO: 1025 - protein, 204 aa, Homo sapiens [sequence omitted]

SEQ ID NO: 1026 - protein, 200 aa, Homo sapiens
MTEWETAAPAVAETPDIKLFGKWSTDDVQINDISLQDYIAVKEKYAKYLPHSAGRYAAKRFRKAQCPIVERLTNSMMMHGRNNGKKLMTVRIVKHAFEIIHLLTGEVLVNAIINSGPREDSTRIGRAGTVRRQAVDVSPLRRVNQAIWLLCTGAREAAFRNIKTIAECLADELINAAKGSSNSYAIKKKDELERVAKSNR

SEQ ID NO: 1027 - protein, 204 aa, Homo sapiens [sequence omitted]

SEQ ID NO: 1028 - protein, 204 aa, Homo sapiens [sequence omitted]

SEQ ID NO: 1029 - protein, 338 aa, Homo sapiens
MLSALARPASAALRRSFSTSAQNNAKVAVLGASGGIGQPLSLLLKNSPLVSRLTLYDIAHTPGVAADLSHIETKAAVKGYLGPEQLPDCLKGCDVVVIPAGVPRKPGMTRDDLFNTNATIVATLTAACAQHCPEAMICVIANPVNSTIPITAEVFKKHGVYNPNKIFGVTTLDIVRANTFVAELKGLDPARVNVPVIGGHAGKTIIPLISQCTPKVDFPQDQLTALTGRIQEAGTEVVKAKAGAGSATLSMAYAGARFVFSLVDAMNGKEGVVECSFVKSQETECTYFSTPLLLGKKGIEKNLGIGKVSSFEEKMISDAIPELKASIKKGEDFVKTLK

SEQ ID NO: 1030 - protein, 338 aa, Homo sapiens [sequence omitted]

SEQ ID NO: 1031 - protein, 231 aa, Homo sapiens
MTRDDLFNTNATIVATLTAACAQHCPEAMICVIANPVNSTIPITAEVFKKHGVYNPNKIFGVTTLDIVRANTFVAELKGLDPARVNVPVIGGHAGKTIIPLISQCTPKVDFPQDQLTALTGRIQEAGTEVVKAKAGAGSATLSMAYAGARFVFSLVDAMNGKEGVVECSFVKSQETECTYFSTPLLLGKKGIEKNLGIGKVSSFEEKMISDAIPELKASIKKGEDFVKTLK

SEQ ID NO: 1032 - protein, 338 aa, Homo sapiens; identical to SEQ ID NO: 1029

SEQ ID NO: 1033 - protein, 338 aa, Homo sapiens; identical to SEQ ID NO: 1029

SEQ ID NO: 1034 - protein, 418 aa, Homo sapiens [sequence omitted]

SEQ ID NO: 1035 - protein, 254 aa, Homo sapiens
MAAASAGATRLLLLLLMAVAAPSRARGSGCRAGTGARGAGAEGREGEACGTVGLLLEHSFEIDDSANFRKRGSLLWNQQDGTLSLSQRQLSEEERGRLRDVAALNGLYRVRIPRRPGALDGLEAGGYVSSFVPACSLVESHLSDQLTLHVDVAGNVVGVSVVTHPGGCRGHEVEDVDLELFNTSVQLQPPTTAPGPETAAFIERLEMEQAQKAKNPQEQKSFFAKYWHIILGGAVLLTALRPAAPGPAPPPQEA

SEQ ID NO: 1036 - protein, 216 aa, Homo sapiens
AGAEGREGEACGTVGLLLEHSFEIDDSANFRKRGSLLWNQQDGTLSLSQRQLSEEERGRLRDVAALNGLYRVRIPRRPGALDGLEAGGYVSSFVPACSLVESHLSDQLTLHVDVAGNVVGVSVVTHPGGCRGHEVEDVDLELFNTSVQLQPPTTAPGPETAAFIERLEMEQAQKAKNPQEQKSFFAKYWHIILGGAVLLTALRPAAPGPAPPPQEA

SEQ ID NO: 1037 - protein, 356 aa, Homo sapiens
MGLLRIMMPPKLQLLAVVAFAVAMLFLENQIQKLEESRSKLERAIARHEVREIEQRHTMDGPRQDATLDEEEDMVIIYNRVPKTASTSFTNIAYDLCAKNKYHVLHINTTKNNPVMSLQDQVRFVKNITSWKEMKPGFYHGHVSYLDFAKFGVKKKPIYINVIRDPIERLVSYYYFLRFGDDYRPGLRRRKQGDKKTFDECVAEGGSDCAPEKLWLQIPFFCGHSSECWNVGSRWAMDQAKYNLINEYFLVGVTEELEDFIMLLEAALPRFFRGATELYRTGKKSHLRKTTEKKLPTKQTIAKLQQSDIWKMENEFYEFALEQFQFIRAHAVREKDGDLYILAQNFFYEKIYPKSN

SEQ ID NO: 1038 - protein, 303 aa, Homo sapiens
MLFIKFIHLEVFSMPERAIARHEVREIEQRHTMDGPRQDATLDEEEDMVIIYNRVPKTASTSFTNIAYDLCAKNKYHVLHINTTKNNPVMSLQDQVRFVKNITSWKEMKPGFYHGHVSYLDFAKFGVKKKPIYINVIRDPIERLVSYYYFLRFGDDYRPGLRRRKQGDKKTFDECVAEGGSDCAPEKLWLQIPFFCGHSSECWNVGSRWAMDQAKYNLINEYFLVGVTEELEDFIMLLEAALPRFFRGATELYRTAPDTATPSHRHGPICGSKSISSLLVKVSPVCKDSHCLGKCSRNGLSAV

SEQ ID NO: 1039 - protein, 356 aa, Homo sapiens; identical to SEQ ID NO: 1037

SEQ ID NO: 1040 - protein, 356 aa, Homo sapiens; identical to SEQ ID NO: 1037

SEQ ID NO: 1041 - protein, 1816 aa, Homo sapiens
MALSSAWRSVLPLWLLWSAACSRAASGDDNAFPFDIEGSSAVGRQDPPETSEPRVALGRLPPAAEKCNAGFFHTLSGECVPCDCNGNSNECLDGSGYCVHCQRNTTGEHCEKCLDGYIGDSIRGAPQFCQPCPCPLPHLANFAESCYRKNGAVRCICNENYAGPNCERCAPGYYGNPLLIGSTCKKCDCSGNSDPNLIFEDCDEVTGQCRNCLRNTTGFKCERCAPGYYGDARIAKNCAVCNCGGGPCDSVTGECLEEGFEPPTGCDKCVWDLTDDLRLAALSIEEGKSGVLSVSSGAAAHRHVNEINATIYLLKTKLSERENQYALRKIQINNAENTMKSLLSDVEELVEKENQASRKGQLVQKESMDTINHASQLVEQAHDMRDKIQEINNKMLYYGEEHELSPKEISEKLVLAQKMLEEIRSRQPFFTQRELVDEEADEAYELLSQAESWQRLHNETRTLFPVVLEQLDDYNAKLSDLQEALDQALNYVRDAEDMNRATAARQRDHEKQQERVREQMEVVNMSLSTSADSLTTPRLTLSELDDIIKNASGIYAEIDGAKSELQVKLSNLSNLSHDLVQEAIDHAQDLQQEANELSRKLHSSDMNGLVQKALDASNVYENIVNYVSEANETAEFALNTTDRIYDAVSGIDTQIIYHKDESENLLNQARELQAKAESSSDEAVADTSRRVGGALARKSALKTRLSDAVKQLQAAERGDAQQRLGQSRLITEEANRTTMEVQQATAPMANNLTNWSQNLQHFDSSAYNTAVNSARDAVRNLTEVVPQLLDQLRTVEQKRPASNVSASIQRIRELIAQTRSVASKIQVSMMFDGQSAVEVHSRTSMDDLKAFTSLSLYMKPPVKRPELTETADQFILYLGSKNAKKEYMGLAIKNDNLVYVYNLGTKDVEIPLDSKPVSSWPAYFSIVKIERVGKHGKVFLTVPSLSSTAEEKFIKKGEFSGDDSLLDLDPEDTVFYVGGVPSNFKLPTSLNLPGFVGCLELATLNNDVISLYNFKHIYNMDPSTSVPCARDKLAFTQSRAASYFFDGSGYAVVRDITRRGKFGQVTRFDIEVRTPADNGLILLMVNGSMFFRLEMRNGYLHVFYDFGFSSGRVHLEDTLKKAQINDAKYHEISIIYHNDKKMILVVDRRHVKSMDNEKMKIPFTDIYIGGAPPEILQSRALRAHLPLDINFRGCMKGFQFQKKDFNLLEQTETLGVGYGCPEDSLISRRAYFNGQSFIASIQKISFFDGFEGGFNFRTLQPNGLLFYYASGSDVFSISLDNGTVIMDVKGIKVQSVDKQYNDGLSHFVISSVSPTRYELIVDKSRVGSKNPTKGKIEQTQASEKKFYFGGSPISAQYANFTGCISNAYFTRVDRDVEVEDFQRYTEKVHTSLYECPIESSPLFLLHKKGKNLSKPKASQNKKGGKSKDAPSWDPVALKLPERNTPRNSHCHLSNSPRAIEHAYQYGGTANSRQEFEHLKGDFGAKSQFSIRLRTRSSHGMIFYVSDQEENDFMTLFLAHGRLVYMFNVGHKKLKIRSQEKYNDGLWHDVIFIRERSSGRLVIDGLRVLEESLPPTEATWKIKGPIYLGGVAPGKAVKNVQINSIYSFSGCLSNLQLNGASITSASQTFSVTPCFEGPMETGTYFSTEGGYVVLDESFNIGLKFEIAFEVRPRSSSGTLVHGHSVNGEYLNVHMKNGQVIVKVNNGIRDFSTSVTPKQSLCDGRWHRITVIRDSNVVQLDVDSEVNHVVGPLNPKPIDHREPVFVGGVPESLLTPRLAPSKPFTGCIRHFVIDGHPVSFSKAALVSGAVSINSCPAA

SEQ ID NO: 1042 - protein, 1791 aa, Homo sapiens
MALSSAWRSVLPLWLLWSAACSRAASGDDNAFPFDIEGSSAVGRQDPPETSEPRVALGRLPPAAEKCNAGFFHTLSGECVPCDCNGNSNECLDGSGYCVHCQRNTTGEHCEKCLDGYIGDSIRGAPQFCQPCPCPLPHLANFAESCYRKNGAVRCICNENYAGPNCERCAPGYYGNPLLIGSTCKKCDCSGNSDPNLIFEDCDEVTGQCRNCLRNTTGFKCERCAPGYYGDARIAKNCAGCDKCVWDLTDDLRLAALSIEEGKSGVLSVSSGAAAHRHVNEINATIYLLKTKLSERENQYALRKIQINNAENTMKSLLSDVEELVEKENQASRKGQLVQKESMDTINHASQLVEQAHDMRDKIQEINNKMLYYGEEHELSPKEISEKLVLAQKMLEEIRSRQPFFTQRELVDEEADEAYELLSQAESWQRLHNETRTLFPVVLEQLDDYNAKLSDLQEALDQALNHVRDAEDMNRATAARQRDHEKQQERVREQMEVVNMSLSTSADSLTTPRLTLSELDDIIKNASGIYAEIDGAKSELQVKLSNLSNLSHDLVQEAIDHAQDLQQEANELSRKLHSSDMNGLVQKALDASNVYENIVNYVSEANETAEFALNTTDRIYDAVSGIDTQIIYHKDESENLLNQARELQAKAESSSDEAVADTSRRVGGALARKSALKTRLSDAVKQLQAAERGDAQQRLGQSRLITEEANRTTMEVQQATAPMANNLTNWSQNLQHFDSSAYNTAVNSARDAVRNLTEVVPQLLDQLRTVEQKRPASNVSASIQRIRELIAQTRSVASKIQVSMMFDGQSAVEVHSRTSMDDLKAFTSLSLYMKPPVKRPELTETADQFILYLGSKNAKKEYMGLAIKNDNLVYVYNLGTKDVEIPLDSKPVSSWPAYFSIVKIERVGKHGKVFLTVPSLSSTAEEKFIKKGEFSGDDSLLDLDPEDTVFYVGGVPSNFKLPTSLNLPGFVGCLELATLNNDVISLYNFKHIYNMDPSTSVPCARDKLAFTQSRAASYFFDGSGYAVVRDITRRGKFGQVTRFDIEVRTPADNGLILLMVNGSMFFRLEMRNGYLHVFYDFGFSSGPVHLEDTLKKAQINDAKYHEISIIYHNDKKMILVVDRRHVKSMDNEKMKIPFTDIYIGGAPPEILQSRALRAHLPLDINFRGCMKGFQFQKKDFNLLEQTETLGVGYGCPEDSLISRRAYFNGQSFIASIQKISFFDGFEGGFNFRTLQPNGLLFYYASGSDVFSISLDNGTVIMDVKGIKVQSVDKQYNDGLSHFVISSVSPTRYELIVDKSRVGSKNPTKGKIEQTQASEKKFYFGGSPISAQYANFTGCISNAYFTRVDRDVEVEDFQRYTEKVHTSLYECPIESSPLFLLHKKGKNLSKPKASQNKKGGKSKDAPSWDPVALKLPERNTPRNSHCHLSNSPRAIEHAYQYGGTANSRQEFEHLKGDFGAKSQFSIRLRTRSSHGMIFYVSDQEENDFMTLFLAHGRLVYMFNVGHKKLKIRSQEKYNDGLWHDVIFIRERSSGRLVIDGLRVLEESLPPTEATWKIKGPIYLGGVAPGKAVKNVQINSIYSFSGCLSNLQLNGASITSASQTFSVTPCFEGPMETGTYFSTEGGYVVLDESFNIGLKFEIAFEVRPRSSSGTLVHGHSVNGEYLNVHMKNGQVIVKVNNGIRDFSTSVTPKQSLCDGRWHRITVIRDSNVVQLDVDSEVNHVVGPLNPKPIDHREPVFVGGVPESLLTPRLAPSKPFTGCIRHFVIDGHPVSFSKAALVSGAVSINSCPAA

SEQ ID NO: 1043 - protein, 1816 aa, Homo sapiens
MALSSAWRSVLPLWLLWSAACSRAASGDDNAFPFDIEGSSAVGRQDPPETSEPRVALGRLPPAAEKCNAGFFHTLSGECVPCDCNGNSNECLDGSGYCVHCQRNTTGEHCEKCLDGYIGDSIRGAPQFCQPCPCPLPHLANFAESCYRKNGAVRCICNENYAGPNCERCAPGYYGNPLLIGSTCKKCDCSGNSDPNLIFEDCDEVTGQCRNCLRNTTGFKCERCAPGYYGDARIAKNCAVCNCGGGPCDSVTGECLEEGFEPPTGCDKCVWDLTDDLRLAALSIEEGKSGVLSVSSGAAAHRHVNEINATIYLLKTKLSERENQYALRKIQINNAENTMKSLLSDVEELVEKENQASRKGQLVQKESMDTINHASQLVEQAHDMRDKIQEINNKMLYYGEEHELSPKEISEKLVLAQKMLEEIRSRQPFFTQRELVDEEADEAYELLSQAESWQRLHNETRTLFPVVLEQLDDYNAKLSDLQEALDQALNHVRDAEDMNRATAARQRDHEKQQERVREQMEVVNMSLSTSADSLTTPRLTLSELDDIIKNASGIYAEIDGAKSELQVKLSNLSNLSHDLVQEAIDHAQDLQQEANELSRKLHSSDMNGLVQKALDASNVYENIVNYVSEANETAEFALNTTDRIYDAVSGIDTQIIYHKDESENLLNQARELQAKAESSSDEAVADTSRRVGGALARKSALKTRLSDAVKQLQAAERGDAQQRLGQSRLITEEANRTTMEVQQATAPMANNLTNWSQNLQHFDSSAYNTAVNSARDAVRNLTEVVPQLLDQLRTVEQKRPASNVSASIQRIRELIAQTRSVASKIQVSMMFDGQSAVEVHSRTSMDDLKAFTSLSLYMKPPVKRPELTETADQFILYLGSKNAKKEYMGLAIKNDNLVYVYNLGTKDVEIPLDSKPVSSWPAYFSIVKIERVGKHGKVFLTVPSLSSTAEEKFIKKGEFSGDDSLLDLDPEDTVFYVGGVPSNFKLPTSLNLPGFVGCLELATLNNDVISLYNFKHIYNMDPSTSVPCARDKLAFTQSRAASYFFDGSGYAVVRDITRRGKFGQVTRFDIEVRTPADNGLILLMVNGSMFFRLEMRNGYLHVFYDFGFSSGPVHLEDTLKKAQINDAKYHEISIIYHNDKKMILVVDRRHVKSMDNEKMKIPFTDIYIGGAPPEILQSRALRAHLPLDINFRGCMKGFQFQKKDFNLLEQTETLGVGYGCPEDSLISRRAYFNGQSFIASIQKISFFDGFEGGFNFRTLQPNGLLFYYASGSDVFSISLDNGTVIMDVKGIKVQSVDKQYNDGLSHFVISSVSPTRYELIVDKSRVGSKNPTKGKIEQTQASEKKFYFGGSPISAQYANFTGCISNAYFTRVDRDVEVEDFQRYTEKVHTSLYECPIESSPLFLLHKKGKNLSKPKASQNKKGGKSKDAPSWDPVALKLPERNTPRNSHCHLSNSPRAIEHAYQYGGTANSRQEFEHLKGDFGAKSQFSIRLRTRSSHGMIFYVSDQEENDFMTLFLAHGRLVYMFNVGHKKLKIRSQEKYNDGLWHDVIFIRERSSGRLVIDGLRVLEESLPPTEATWKIKGPIYLGGVAPGKAVKNVQINSIYSFSGCLSNLQLNGASITSASQTFSVTPCFEGPMETGTYFSTEGGYVVLDESFNIGLKFEIAFEVRPRSSSGTLVHGHSVNGEYLNVHMKNGQVIVKVNNGIRDFSTSVTPKQSLCDGRWHRITVIRDSNVVQLDVDSEVNHVVGPLNPKPIDHREPVFVGGVPESLLTPRLAPSKPFTGCIRHFVIDGHPVSFSKAALVSGAVSINSCPAA

SEQ ID NO: 1044 - protein, 1816 aa, Homo sapiens; identical to SEQ ID NO: 1043

SEQ ID NO: 1045 - protein, 1823 aa, Homo sapiens
MALSSAWRSVLPLWLLWSAACSRAASGDDNAFPFDIEGSSAVGRQDPPETSEPRVALGRLPPAAEKCNAGFFHTLSGECVPCDCNGNSNECLDGSGYCVHCQRNTTGEHCEKCLDGYIGDSIRGAPQFCQPCPCPLPHLANFAESCYRKNGAVRCICNENYAGPNCERCAPGYYGNPLLIGSTCKKCDCSGNSDPNLIFEDCDEVTGQCRNCLRNTTGFKCERCAPGYYGDARIAKNCAVCNCGGGPCDSVTGECLEEGFEPPTGMDCPTISCDKCVWDLTDDLRLAALSIEEGKSGVLSVSSGAAAHRHVNEINATIYLLKTKLSERENQYALRKIQINNAENTMKSLLSDVEELVEKENQASRKGQLVQKESMDTINHASQLVEQAHDMRDKIQEINNKMLYYGEEHELSPKEISEKLVLAQKMLEEIRSRQPFFTQRELVDEEADEAYELLSQAESWQRLHNETRTLFPVVLEQLDDYNAKLSDLQEALDQALNHVRDAEDMNRATAARQRDHEKQQERVREQMEVVNMSLSTSADSLTTPRLTLSELDDIIKNASGIYAEIDGAKSELQVKLSNLSNLSHDLVQEAIDHAQDLQQEANELSRKLHSSDMNGLVQKALDASNVYENIVNYVSEANETAEFALNTTDRIYDAVSGIDTQIIYHKDESENLLNQARELQAKAESSSDEAVADTSRRVGGALARKSALKTRLSDAVKQLQAAERGDAQQRLGQSRLITEEANRTTMEVQQATAPMANNLTNWSQNLQHFDSSAYNTAVNSARDAVRNLTEVVPQLLDQLRTVEQKRPASNVSASIQRIRELIAQTRSVASKIQVSMMFDGQSAVEVHSRTSMDDLKAFTSLSLYMKPPVKRPELTETADQFILYLGSKNAKKEYMGLAIKNDNLVYVYNLGTKDVEIPLDSKPVSSWPAYFSIVKIERVGKHGKVFLTVPSLSSTAEEKFIKKGEFSGDDSLLDLDPEDTVFYVGGVPSNFKLPTSLNLPGFVGCLELATLNNDVISLYNFKHIYNMDPSTSVPCARDKLAFTQSRAASYFFDGSGYAVVRDITRRGKFGQVTRFDIEVRTPADNGLILLMVNGSMFFRLEMRNGYLHVFYDFGFSSGPVHLEDTLKKAQINDAKYHEISIIYHNDKKMILVVDRRHVKSMDNEKMKIPFTDIYIGGAPPEILQSRALRAHLPLDINFRGCMKGFQFQKKDFNLLEQTETLGVGYGCPEDSLISRRAYFNGQSFIASIQKISFFDGFEGGFNFRTLQPNGLLFYYASGSDVFSISLDNGTVIMDVKGIKVQSVDKQYNDGLSHFVISSVSPTRYELIVDKSRVGSKNPTKGKIEQTQASEKKFYFGGSPISAQYANFTGCISNAYFTRVDRDVEVEDFQRYTEKVHTSLYECPIESSPLFLLHKKGKNLSKPKASQNKKGGKSKDAPSWDPVALKLPERNTPRNSHCHLSNSPRAIEHAYQYGGTANSRQEFEHLKGDFGAKSQFSIRLRTRSSHGMIFYVSDQEENDFMTLFLAHGRLVYMFNVGHKKLKIRSQEKYNDGLWHDVIFIRERSSGRLVIDGLRVLEESLPPTEATWKIKGPIYLGGVAPGKAVKNVQINSIYSFSGCLSNLQLNGASITSASQTFSVTPCFEGPMETGTYFSTEGGYVVLDESFNIGLKFEIAFEVRPRSSSGTLVHGHSVNGEYLNVHMKNGQVIVKVNNGIRDFSTSVTPKQSLCDGRWHRITVIRDSNVVQLDVDSEVNHVVGPLNPKPIDHREPVFVGGVPESLLTPRLAPSKPFTGCIRHFVIDGHPVSFSKAALVSGAVSINSCPAA

SEQ ID NO: 1046 - protein, 681 aa, Homo sapiens
MTASPDYLVVLFGITAGATGAKLGSDEKELILLFWKVVDLANKKVGQLHEVLVRPDQLELTEDCKEETKIDVESLSSASQLDQALRQFNQSVSNELNIGVGTSFCLCTDGQLHVRQILHPEASKKNVLLPECFYSFFDLRKEFKKCCPGSPDIDKLDVATMTEYLNFEKSSSVSRYGASQVEDMGNIILAMISEPYNHRFSDPERVNYKFESGTCSKMELIDDNTVVRARGLPWQSSDQDIARFFKGLNIAKGGAALCLNAQGRRNGEALVRFVSEEHRDLALQRHKHHMGTRYIEVYKATGEDFLKIAGGTSNEVAQFLSKENQVIVRMRGLPFTATAEEVVAFFGQHCPITGGKEGILFVTYPDGRPTGDAFVLFACEEYAQNALRKHKDLLGKRYIELFRSTAAEVQQVLNRFSSAPLIPLPTPPIIPVLPQQFVPPTNVRDCIRLRGLPYAATIEDILDFLGEFATDIRTHGVHMVLNHQGRPSGDAFIQMKSADRAFMAAQKCHKKNMKDRYVEVFQCSAEEMNFVLMGGTLNRNGLSPPPCKLPCLSPPSYTFPAPAAVIPTEAAIYQPSVILNPRALQPSTAYYPAGTQLFMNYTAYYPSPPGSPNSLGYFPTAANLSGVPPQPGTVVRMQGLAYNTGVKEILNFFQGYQYATEDGLIHTNDQARTLPKEWVCI

SEQ ID NO: 1047 - protein, 503 aa, Homo sapiens
MTEYLNFEKSSSVSRYGASQVEDMGNIILAMISEPYNHRFSDPERVNYKFESGTCSKMELIDDNTVVRARGLPWQSSDQDIARFFKGLNIAKGGAALCLNAQGRRNGEALVRFVSEEHRDLALQRHKHHMGTRYIEVYKATGEDFLKIAGGTSNEVAQFLSKENQVIVRMRGLPFTATAEEVVAFFGQHCPITGGKEGILFVTYPDGRPTGDAFVLFACEEYAQNALRKHKDLLGKRYIELFRSTAAEVQQVLNRFSSAPLIPLPTPPIIPVLPQQFVPPTNVRDCIRLRGLPYAATIEDILDFLGEFATDIRTHGVHMVLNHQGRPSGDAFIQMKSADRAFMAAQKCHKKNMKDRYVEVFQCSAEEMNFVLMGGTLNRNGLSPPPCKLPCLSPPSYTFPAPAAVIPTEAAIYQPSVILNPRALQPSTAYYPAGTQLFMNYTAYYPSPPGSPNSLGYFPTAANLSGVPPQPGTVVRMQGLAYNTGVKEILNFFQGYQCLKDVW

SEQ ID NO: 1048 - protein, 681 aa, Homo sapiens; identical to SEQ ID NO: 1046

SEQ ID NO: 1049 - protein, 184 aa, Homo sapiens
MNCIEMGGNPLENSGFEPGAFDGLKLNYLRISEAKLTGIPKDLPETLNELHLDHNKIQAIELEDLLRYSKLYRLGLGHNQIRMIENGSLSFLPTLRELHLDNNKLARVPSGLPDLKLLQVVYLHSNNITKVGVNDFCPMGFGVKRAYYNGISLFNNPVPYWEVQPATFRCVTDRLAIQFGNYKK

SEQ ID NO: 1050 - protein, 368 aa, Homo sapiens
MWPLWRLVSLLALSQALPFEQRGFWDFTLDDGPFMMNDEEASGADTSGVLDPDSVTPTYSAMCPFGCHCHLRVVQCSDLGLKSVPKEISPDTTLLDLQNNDISELRKDDFKGLQHLYALVLVNNKISKIHEKAFSPLRKLQKLYISKNHLVEIPPNLPSSLVELRIHDNRIRKVPKGVFSGLRNMNCIEMGGNPLENSGFEPGAFDGLKLNYLRISEAKLTGIPKDLPETLNELHLDHNKIQAIELEDLLRYSKLYRLGLGHNQIRMIENGSLSFLPTLRELHLDNNKLARVPSGLPDLKLLQVVYLHSNNITKVGVNDFCPMGFGVKRAYYNGISLFNNPVPYWEVQPATFRCVTDRLAIQFGNYKK

SEQ ID NO: 1051 - protein, 368 aa, Homo sapiens; identical to SEQ ID NO: 1050

SEQ ID NO: 1052 - protein, 394 aa, Homo sapiens
MWPLWRLVSLLALSQALPFEQRGFWDFTLDDGPFMMNDEEASGADTSGVLDPDSVTPTYSAMCPFGCHCHLRVVQCSDLGLEFMLVVGVGPLGLKFMLVMGVGPLGLKSVPKEISPDTTLLDLQNNDISELRKDDFKGLQHLYALVLVNNKISKIHEKAFSPLRKLQKLYISKNHLVEIPPNLPSSLVELRIHDNRIRKVPKGVFSGLRNMNCIEMGGNPLENSGFEPGAFDGLKLNYLRISEAKLTGIPKDLPETLNELHLDHNKIQAIELEDLLRYSKLYRLGLGHNQIRMIENGSLSFLPTLRELHLDNNKLARVPSGLPDLKLLQVVYLHSNNITKVGVNDFCPMGFGVKRAYYNGISLFNNPVPYWEVQPATFRCVTDRLAIQFGNYKK

SEQ ID NO: 1053 - protein, 385 aa, Homo sapiens
MWPLWRLVSLLALSQALPFEQRGFWDFTLDDGPFMMNDEEASGADTSGVLDPDSVTPTYSAMCPFGCHCHLRVVQCSDLGLKSVPKEISPDTTLLDLQNNDISELRKDDFKGLQHLYVRSWEEPAGLQQRAGVRALVLVNNKISKIHEKAFSPLRKLQKLYISKNHLVEIPPNLPSSLVELRIHDNRIRKVPKGVFSGLRNMNCIEMGGNPLENSGFEPGAFDGLKLNYLRISEAKLTGIPKDLPETLNELHLDHNKIQAIELEDLLRYSKLYRLGLGHNQIRMIENGSLSFLPTLRELHLDNNKLARVPSGLPDLKLLQVVYLHSNNITKVGVNDFCPMGFGVKRAYYNGISLFNNPVPYWEVQPATFRCVTDRLAIQFGNYKK

SEQ ID NO: 1054 - protein, 368 aa, Homo sapiens; identical to SEQ ID NO: 1050

SEQ ID NO: 1055 - protein, 633 aa, Homo sapiens
MAHLKRLVKLHIKRHYHKKFWKLGAVIFFFIIVLVLMQREVSVQYSKEESRMERNMKNKNKMLDLMLEAVNNIKDAMPKMQIGAPVRQNIDAGERPCLQGYYTAAELKPVLDRPPQDSNAPGASGKAFKTTNLSVEEQKEKERGEAKHCFNAFASDRISLHRDLGPDTRPPECIEQKFKRCPPLPTTSVIIVFHNEAWSTLLRTVHSVLYSSPAILLKEIILVDDASVDEYLHDKLDEYVKQFSIVKIVRQRERKGLITARLLGATVATAETLTFLDAHCECFYGWLEPLLARIAENYTAVVSPDIASIDLNTFEFNKPSPYGSNHNRGNFDWSLSFGWESLPDHEKQRRKDETYPIKTPTFAGGLFSISKEYFEYIGSYDEEMEIWGGENIEMSFRVWQCGGQLEIMPCSVVGHVFRSKSPHSFPKGTQVIARNQVRLAEVWMDEYKEIFYRRNTDAAKIVKQKAFGDLSKRFEIKHRLRCKNFTWYLNNIYPEVYVPDLNPVISGYIKSVGQPLCLDVGENNQGGKPLIMYTCHGLGGNQYFEYSAQHEIRHNIQKELCLHAAQGLVQLKACTYKGHKTVVTGEQIWEIQKDQLLYNPFLKMCLSANGEHPSLVSCNPSDPLQKWILSQND

SEQ ID NO: 1056 - protein, 633 aa, Homo sapiens
MAHLKRLVKLHIKRHYHKKFWKLGAVIFFFIIVLVLMQREVSVQYSKEESRMERNMKNKNKMLDLMLEAVNNIKDAMPKMQIGAPVRQNIDAGERPCLQGYYTAAELKPVLDRPPQDSNAPGASGKAFKTTNLSVEEQKEKERGEAKHCFNAFASDRISLHRDLGPDTRPPECIEQKFKRCPPLPTTSVIIVFHNEAWSTLLRTVHSVLYSSPAILLKEIILVDDASVDEYLHDKLDEYVKQFSIVKIVRQRERKGLITARLLGATVATAETLTFLDAHCECFYGWLEPLLARIAENYTAVVSPDIASIDLNTFEFNKPSPYGSNHNRGNFDWSLSFGWESLPDHEKQRRKDETYPIKTPTFAGGLFSISKEYFEYIGSYDEEMEIWGGENIEMSFRVWQCGGQLEIMPCSVVGHVFRSKSPHSFPKGTQVIARNQVRLAEVWMDEYKEIFYRRNTDAAKIVKQKAFGDLSKRFEIKHRLQCKNFTWYLNNIYPEVYVPDLNPVISGYIKSVGQPLCLDVGENNQGGKPLIMYTCHGLGGNQYFEYSAQHEIRHNIQKELCLHAAQGLVQLKACTYKGHKTVVTGEQIWEIQKDQLLYNPFLKMCLSANGEHPSLVSCNPSDPLQKWILSQND

SEQ ID NO: 1057 - protein, 222 aa, Homo sapiens
MKLPLLLALLFGAVSALHLRSETSTFETPLGAKTLPEDEETPEQEMEETPCRELEEEEEWGSGSEDASKKDGAVESISVPDMVDKNLTCPEEEDTVKVVGIPGCQTCRYLLVRSLQTFSQAWFTCRRCYRGNLVSIHNFNINYRIQCSVSALNQGQVWIGGRITGSGRCRRFQWVDGSRWNFAYWAAHQPWSRGGHCVALCTRGGHWRRAHCLRRLPFICSY

SEQ ID NO: 1058 - protein, 977 aa, Homo sapiens
MDIYDTQTLGVVVFGGFMVVSAIGIFLVSTFSMKETSYEEALANQRKEMAKTHHQKVEKKKKEKTVEKKGKTKKKEEKPNGKIPDHDPAPNVTVLLREPVRAPAVAVAPTPVQPPIIVAPVATVPAMPQEKLASSPKDKKKKEKKVAKVEPAVSSVVNSIQVLTSKAAILETAPKEGRNTDVAQSPEAPKQEAPAKKKSGSKKKGPPDADGPLYLPYKTLVSTVGSMVFNEGEAQRLIEILSEKAGIIQDTWHKATQKGDPVAILKRQLEEKEKLLATEQEDAAVAKSKLRELNKEMAAEKAKAAAGEAKVKKQLVAREQEITAVQARMQASYREHVKEVQQLQGKIRTLQEQLENGPNTQLARLQQENSILRDALNQATSQVESKQNAELAKLRQELSKVSKELVEKSEAVRQDEQQRKALEAKAAAFEKQVLQLQASHRESEEALQKRLDEVSRELCHTQSSHASLRADAEKAQEQQQQMAELHSKLQSSEAEVRSKCEELSGLHGQLQEARAENSQLTERIRSIEALLEAGQARDAQDVQASQAEADQQQTRLKELESQVSGLEKEAIELREAVEQQKVKNNDLREKNWKAMEALATAEQACKEKLHSLTQAKEESEKQLCLIEAQTMEALLALLPELSVLAQQNYTEWLQDLKEKGPTLLKHPPAPAEPSSDLASKLREAEETQSTLQAECDQYRSILAETEGMLRDLQKSVEEEEQVWRAKVGAAEEELQKSRVTVKHLEEIVEKLKGELESSDQVREHTSHLEAELEKHMAAASAECQNYAKEVAGLRQLLLESQSQLDAAKSEAQKQSDELALVRQQLSEMKSHVEDGDIAGAPASSPEAPPAEQDPVQLKTQLEWTEAILEDEQTQRQKLTAEFEEAQTSACRLQEELEKLRTAGPLESSETEEASQLKERLEKEKKLTSDLGRAATRLQELLKTTQEQLAREKDTVKKLQEQLEKAEDGSSSKEGTSV

SEQ ID NO: 1059 - protein, 1410 aa, Homo sapiens
MDIYDTQTLGVVVFGGFMVVSAIGIFLVSTFSMKETSYEEALANQRKEMAKTHHQKVEKKKKEKTVEKKGKTKKKEEKPNGKIPDHDPAPNVTVLLREPVRAPAVAVAPTPVQPPIIVAPVATVPAMPQEKLASSPKDKKKKEKKVAKVEPAVSSVVNSIQVLTSKAAILETAPKEVPMVVVPPVGAKGNTPATGTTQGKKAEGTQNQSKKAEGAPNQGRKAEGTPNQGKKTEGTPNQGKKAEGTPNQGKKAEGTPNQGKKAEGAQNQGKKVDTTPNQGKKVEGAPTQGRKAEGAQNQAKKVEGAQNQGKKAEGAQNQGKKGEGAQNQGKKAEGAQNQGKKAEGAQNQGKKAEGAQNQGKKAEGAQNQGKKAEGAQNQGKKSEGAQNQGKKVEGAQNQGKKAEGAQNQGKKAEGAQNQGKKAEGAQNQGKKAEGAQNQGKKAEGAQNQGKKAEGAQNQGKKAEGAQNQGKKVEGAQNQGKKAEGAQNQGKKAEGAQNQGKKAEGAQNQGQKGEGAQNQGKKTEGAQGKKAERSPNQGKKGEGAPIQGKKADSVANQGTKVEGITNQGKKAEGSPSEGKKAEGSPNQGKKADAAANQGKKTESASVQGRNTDVAQSPEAPKQEAPAKKKSGSKKKGEPGPPDADGPLYLPYKTLVSTVGSMVFNEGEAQRLIEILSEKAGIIQDTWHKATQKGDPVAILKRQLEEKEKLLATEQEDAAVAKSKLRELNKEMAAEKAKAAAGEAKVKKQLVAREQEITAVQARMQASYREHVKEVQQLQGKIRTLQEQLENGPNTQLARLQQENSILRDALNQATSQVESKQNAELAKLRQELSKVSKELVEKSEAVRQDEQQRKALEAKAAAFEKQVLQLQASHRESEEALQKRLDEVSRELCHTQSSHASLRADAEKAQEQQQQMAELHSKLQSSEAEVRSKCEELSGLHGQLQEARAENSQLTERIRSIEALLEAGQARDAQDVQASQAEADQQQTRLKELESQVSGLEKEAIELREAVEQQKVKNNDLREKNWKAMEALATAEQACKEKLLSLTQAKEESEKQLCLIEAQTMEALLALLPELSVLAQQNYTEWLQDLKEKGPTLLKHPPAPAEPSSDLASKLREAEETQSTLQAECDQYRSILAETEGMLRDLQKSVEEEEQVWRAKVGAAEEELQKSRVTVKHLEEIVEKLKGELESSDQVREHTSHLEAELEKHMAAASAECQNYAKEVAGLRQLLLESQSQLDAAKSEAQKQSDELALVRQQLSEMKSHVEDGDIAGAPASSPEAPPAEQDPVQLKTQLEWTEAILEDEQTQRQKLTAEFEEAQTSACRLQEELEKLRTAGPLESSETEEASQLKERLEKEKKLTSDLGRAATRLQELLKTTQEQLAREKDTVKKLQEQLEKAEDGSSSKEGTSV

SEQ ID NO: 1060 - protein, 240 aa, Homo sapiens
MTVGKSSKMLQHIDYRMRCILQDGRIFIGTFKAFDKHMNLILCDCDEFRKIKPKNSKQAEREEKRVLGLVLLRGENLVSMTVEGPPPKDTGIARVPLAGAAGGPGIGRAAGRGIPAGVPMPQAPAGLAGPVRGVGGPSQQVMTPQGRGTVAAAAAAATASIAGAPTQYPPGRGGPPPPMGRGAPPPGMMGPPPGMRPPMGPPMGIPPGRGTPMGMPPPGMRPPPPGMRGPPPPGMRPPRP

SEQ ID NO: 1061 - protein, 240 aa, Homo sapiens [sequence omitted]

SEQ ID NO: 1062 - protein, 231 aa, Homo sapiens
MTVGKSSKMLQHIDYRMRCILQDGRIFIGTFKAFDKHMNLILCDCDEFRKIKPKNSKQAEREEKRVLGLVLLRGENLVSMTVEGPPPKDTGIARVPLAGAAGGPGIGRAAGRGIPAGVPMPQAPAGLAGPVRGVGGPSQQVMTPQGRGTVAAAAAAATASIAGAPTQYPPGRGGPPPPMGRGAPPPGMMGPPPGMRPPMGPPMGIPPGRGTPMGMPPPGMRPPPPGMRGLL

SEQ ID NO: 1063 - protein, 240 aa, Homo sapiens [sequence omitted]

SEQ ID NO: 1064 - protein, 240 aa, Homo sapiens [sequence omitted]

SEQ ID NO: 1065 - protein, 240 aa, Homo sapiens [sequence omitted]

SEQ ID NO: 1066 - protein, 240 aa, Homo sapiens [sequence omitted]

SEQ ID NO: 1067 - protein, 240 aa, Homo sapiens [sequence omitted]

SEQ ID NO: 1068 - protein, 240 aa, Homo sapiens [sequence omitted]

SEQ ID NO: 1069 - protein, 240 aa, Homo sapiens [sequence omitted]

SEQ ID NO: 1070 - protein, 234 aa, Homo sapiens
MTVGKSSKMLQHIDYRMRCILQDGRIFIGTFKAFDKHMNLILCDCDEFRKIKPKNSKQAEREEKRVLGLVLLRGENLVSMTVEGPPPKDTGIARVPLAGAAGGPGIGRAAGRGIPAGVPMPQAPAGLAGPVRGVGGPSQQVMTPQGRGTVAAAAAAATASIAGAPTQYPPGRGGPPPPMGRGAPPPGMMGPPPGMRPPMGPPMGIPPGRGTPMGMPPPGMRPPPPGMRGKCLQW

SEQ ID NO: 1071 - protein, 240 aa, Homo sapiens [sequence omitted]

SEQ ID NO: 1072 - protein, 240 aa, Homo sapiens [sequence omitted]

SEQ ID NO: 1073 - protein, 240 aa, Homo sapiens [sequence omitted]

SEQ ID NO: 1074 - protein, 240 aa, Homo sapiens [sequence omitted]

SEQ ID NO: 1075 - protein, 240 aa, Homo sapiens; identical to SEQ ID NO: 1060

SEQ ID NO: 1076 - protein, 1391 aa, Homo sapiens
MPSSLLGAAMPASTSAAALQEALENAGRLIDRQLQEDRMYPDLSELLMVSAPNNPTVSGMSDMDYPLQGPGLLSVPNLPEISSIRRVPLPPELVEQFGHMQCNCMMGVFPPISRAWLTIDSDIFMWNYEDGGDLAYFDGLSETILAVGLVKPKAGIFQPHVRHLLVLATPVDIVILGLSYANLQTGSGVLNDSLSGGMQLLPDPLYSLPTDNTYLLTITSTDNGRIFLAGKDGCLYEVAYQAEAGWFSQRCRKINHSKSSLSFLVPSLLQFTFSEDDPILQIAIDNSRNILYTRSEKGVIQVYDLGQDGQGMSRVASVSQNAIVSAAGNIARTIDRSVFKPIVQIAVIENSESLDCQLLAVTHAGVRLYFSTCPFRQPLARPNTLTLVHVRLPPGFSASSTVEKPSKVHRALYSKGILLMAASENEDNDILWCVNHDTFPFQKPMMETQMTAGVDGHSWALSAIDELKVDKIITPLNKDHIPITDSPVVVQQHMLPPKKFVLLSAQGSLMFHKLRPVDQLRHLLVSNVGGDGEEIERFFKLHQEDQACATCLILACSTAACDREVSAWATRAFFRYGGEAQMRFPTTLPPPSNVGPILGSPVYSSSPVPSGSPYPNPSFLGTPSHGIQPPAMSTPVCALGNPATQATNMSCVTGPEIVYSGKHNGICIYFSRIMGNIWDASLVVERIFKSGNREITAIESSVPCQLLESVLQELKGLQEFLDRNSQFAGGPLGNPNTTAKVQQRLIGFMRPENGNPQQMQQELQRKFHEAQLSEKISLQAIQQLVRKSYQALALWKLLCEHQFTIIVAELQKELQEQLKITTFKDLVIRDKELTGALIASLINCYIRDNAAVDGISLHLQDICPLLYSTDDAICSKANELLQRSRQVQNKTEKERMLRESLKEYQKISNQVDLSNVCAQYRQVRFYEGVVELSLTAAEKKDPQGLGLHFYKHGEPEEDIVGLQAFQERLNSYKCITDTLQELVNQSKAAPQSPSVPKKPGPPVLSSDPNMLSNEEAGHHFEQMLKLSQRSKDELFSIALYNWLIQVDLADKLLQVASPFLEPHLVRMAKVDQNRVRYMDLLWRYYEKNRSFSNAARVLSRLADMHSTEISLQQRLEYIARAILSAKSSTAISSIAADGEFLHELEEKMEVARIQLQIQETLQRQYSHHSSVQDAVSQLDSELMDITKLYGEFADPFKLAECKLAIIHCAGYSDPILVQTLWQDIIEKELSDSVTLSSSDRMHALSLKIVLLGKIYAGTPRFFPLDFIVQFLEQQVCTLNWDVGFVIQTMNEIGVPLPRLLEVYDQLFKSRDPFWNRMKKPLHLLDCIHVLLIRYVENPSQVLNCERRRFTNLCLDAVCGYLVELQSMSSSVAVQAITGNFKSLQAKLERLH

SEQ ID NO: 1077 - protein, 1391 aa, Homo sapiens; identical to SEQ ID NO: 1076

SEQ ID NO: 1078 - protein, 1391 aa, Homo sapiens; identical to SEQ ID NO: 1076

SEQ ID NO: 1079 - protein, 1332 aa, Homo sapiens
MSDMDYPLQGPGLLSVPNLPEISSIRRVPLPPELVEQFGHMQCNCMMGVFPPISRAWLTIDSDIFMWNYEDGGDLAYFDGLSETILAVGLVKPKAGIFQPHVRHLLVLATPVDIVILGLSYANLQTGSGVLNDSLSGGMQLLPDPLYSLPTDNTYLLTITSTDNGRIFLAGKDGCLYEVAYQAEAGWFSQRCRKINHSKSSLSFLVPSLLQFTFSEDDPILQIAIDNSRNILYTRSEKGVIQVYDLGQDGQGMSRVASVSQNAIVSAAGNIARTIDRSVFKPIVQIAVIENSESLDCQLLAVTHAGVRLYFSTCPFRQPLARPNTLTLVHVRLPPGFSASSTVEKPSKVHRALYSKGILLMAASENEDNDILWCVNHDTFPFQKPMMETQMTAGVDGHSWALSAIDELKVDKIITPLNKDHIPITDSPVVVQQHMLPPKKFVLLSAQGSLMFHKLRPVDQLRHLLVSNVGGDGEEIERFFKLHQEDQACATCLILACSTAACDREVSAWATRAFFRYGGEAQMRFPTTLPPPSNVGPILGSPVYSSSPVPSGSPYPNPSFLGTPSHGIQPPAMSTPVCALGNPATQATNMSCVTGPEIVYSGKHNGICIYFSRIMGNIWDASLVVERIFKSGNREITAIESSVPCQLLESVLQELKGLQEFLDRNSQFAGGPLGNPNTTAKVQQRLIGFMRPENGNPQQMQQELQRKFHEAQLSEKISLQAIQQLVRKSYQALALWKLLCEHQFTIIVAELQKELQEQLKITTFKDLVIRDKELTGALIASLINCYIRDNAAVDGISLHLQDICPLLYSTDDAICSKANELLQRSRQVQNKTEKERMLRESLKEYQKISNQVDLSNVCAQYRQVRFYEGVVELSLTAAEKKDPQGLGLHFYKHGEPEEDIVGLQAFQERLNSYKCITDTLQELVNQSKAAPQSPSVPKKPGPPVLSSDPNMLSNEEAGHHFEQMLKLSQRSKDELFSIALYNWLIQVDLADKLLQVASPFLEPHLVRMAKVDQNRVRYMDLLWRYYEKNRSFSNAARVLSRLADMHSTEISLQQRLEYIARAILSAKSSTAISSIAADGEFLHELEEKMEVARIQLQIQETLQRQYSHHSSVQDAVSQLDSELMDITKLYGEFADPFKLAECKLAIIHCAGYSDPILVQTLWQDIIEKELSDSVTLSSSDRMHALSLKIVLLGKIYAGTPRFFPLDFIVQFLEQQVCTLNWDVGFVIQTMNEIGVPLPRLLEVYDQLFKSRDPFWNRMKKPLHLLDCIHVLLIRYVENPSQVLNCERRRFTNLCLDAVCGYLVELQSMSSSVAVQAITGNFKSLQAKLERLH

SEQ ID NO: 1080 - protein, 1332 aa, Homo sapiens; identical to SEQ ID NO: 1079

SEQ ID NO: 1081 - protein, 212 aa, Homo sapiens
MAFQPAPKVIRCMTNTPVVVQEGATVYATGTHALVEDGQLLEQLMSSVGFCTEVEEDLIDAVTGLSGSGPAYAFMALDALADGGVKMGLPRRLAIQLGAQALLGAAKMLLDSEQHPCQLKDNVCSPGGATIHALHFLESGGFRSLLINAVEASCIRTRELQSMADQEKISPAALKKTLLDRVKLESPTVSTLTPSSPGKLLTRSLALGGKKD

SEQ ID NO: 1082 - protein, 352 aa, Homo sapiens
MESALPAAGFLYWVGAGTVAYLALRISYSLFTALRVWGVGNEAGVGPGLGEWAVVTGSTDGIGKSYAEELLRRLRQENRLNPGGGGCSEPRSHRGTPAWVTEQDSVSKKLAKHGMKVVLISRSKDKLDQVSSEIKEKFKVETRTIAVDFASEDIYDKIKTGLAGLEIGILVNNVGMSYEYPEYFLDVPDLDNVIKKMININILSVCKMTQLVLPGMVERSKGAILNISSGSGMLPVPLLTIYSATKTFVDFFSQCLHEEYRSKGVFVQSVLPYFVATKLAKIRKPTLDKPSPETFVKSAIKTVGLQSRTNGYLIHALMGLIISNLPSWIYLKIVMNMNKSTRAHYLKKTKKN

SEQ ID NO: 1083 - protein, 312 aa, Homo sapiens [sequence omitted]

SEQ ID NO: 1084 - protein, 177 aa, Homo sapiens
MSYEYPEYFLDVPDLDNVIKKMININILSVCKMTQLVLPGMVERSKGAILNISSGSGMLPVPLLTIYSATKTFVDFFSQCLHEEYRSKGVFVQSVLPYFVATKLAKIRKPTLDKPSPETFVKSAIKTVGLQSRTNGYLIHALMGLIISNLPSWIYLKIVMNMNKSTRAHYLKKTKKN

SEQ ID NO: 1085 - protein, 352 aa, Homo sapiens; identical to SEQ ID NO: 1082

SEQ ID NO: 1086 - protein, 312 aa, Homo sapiens [sequence omitted]

SEQ ID NO: 1087 - protein, 696 aa, Homo sapiens
MAGIAAKLAKDREAAEGLGSHDRAIKYLNQDYEALRNECLEAGTLFQDPSFPAIPSALGFKELGPYSSKTRGIEWKRPTEICADPQFIIGGATRTDICQGALGDCWLLAAIASLTLNEEILARVVPLNQSFQENYAGIFHFQFWQYGEWVEVVVDDRLPTKDGELLFVHSAEGSEFWSALLEKAYAKINGCYEALSGGATTEGFEDFTGGIAEWYELKKPPPNLFKIIQKALQKGSLLGCSIDITSAADSEAITFQKLVKGHAYSVTGAEEVESNGSLQKLIRIRNPWGEVEWTGRWNDNCPSWNTIDPEERERLTRRHEDGEFWMSFSDFLRHYSRLEICNLTPDTLTSDTYKKWKLTKMDGNWRRGSTAGGCRNYPNTFWMNPQYLIKLEEEDEDEEDGESGCTFLVGLIQKHRRRQRKMGEDMHTIGFGIYELSGQTNIHLSKNFFLTNRARERSDTFINLREVLNRFKLPPGEYILVPSTFEPNKDGDFCIRVFSEKKADYQAVDDEIEANLEEFDISEDDIDDGFRRLFAQLAGEDAEISAFELQTILRRVLAKRQDIKSDGFSIETCKIMVDMLDSDGSGKLGLKEFYILWTKIQKYQKIYREIDVDRSGTMNSYEMRKALEEAGFKMPCQLHQVIVARFADDQLIIDFDNFVRCLVRLETLFKIFKQLDPENTGTIELDLISWLCFSVL

SEQ ID NO: 1088 - protein, 440 aa, Homo sapiens [sequence omitted]

SEQ ID NO: 1089 - protein, 699 aa, Homo sapiens
AGIAAKLAKDREAAEGLGSHERAIKYLNQDYEALRNECLEAGTLFQDPSFPAIPSALGFKELGPYSSKTRGIEWKRPTEICADPQFIIGGATRTDICQGALGDCWLLAAIASLTLNEEILARVVPLNQSFQENYAGIFHFQFWQYGEWVEVVVDDRLPTKDGELLFVHSAEGSEFWSALLEKAYAKINGCYEALSGGATTEGFEDFTGGIAEWYELKKPPPNLFKIIQKALQKGSLLGCSIDITSAADSEAITFQKLVKGHAYSVTGAEEVESNGSLQKLIRIRNPWGEVEWTGRWNDNCPSWNTIDPEERERLTRRHEDGEFWMSFSDFLRHYSRLEICNLTPDTLTSDTYKKWKLTKMDGNWRRGSTAGGCRNYPNTFWMNPQYLIKLEEEDEDEEDGESGCTFLVGLIQKHRRRQRKMGEDMHTIGFGIYEVPEELSGQTNIHLSKNFFLTNRARERSDTFINLREVLNRFKLPPGEYILVPSTFEPNKDGDFCIRVFSEKKADYQAVDDEIEANLEEFDISEDDIDDGVRRLFAQLAGEDAEISAFELQTILRRVLAKRQDIKSDGFSIETCKIMVDMLDSDGSGKLGLKEFYILWTKIQKYQKIYREIDVDRSGTMNSYEMRKALEEAGFKMPCQLHQVIVARFADDQLIIDFDNFVRCLVRLETLFKIFKQLDPENTGTIELDLISWLCFSVL

SEQ ID NO: 1090 - protein, 700 aa, Homo sapiens
MAGIAAKLAKDREAAEGLGSHERAIKYLNQDYEALRNECLEAGTLFQDPSFPAIPSALGFKELGPYSSKTRGMRWKRPTEICADPQFIIGGATRTDICQGALGDCWLLAAIASLTLNEEILARVVPLNQSFQENYAGIFHFQFWQYGEWVEVVVDDRLPTKDGELLFVHSAEGSEFWSALLEKAYAKINGCYEALSGGATTEGFEDFTGGIAEWYELKKPPPNLFKIIQKALQKGSLLGCSIDITSAADSEAITFQKLVKGHAYSVTGAEEVESNGSLQKLIRIRNPWGEVEWTGRWNDNCPSWNTIDPEERERLTRRHEDGEFWMSFSDFLRHYSRLEICNLTPDTLTSDTYKKWKLTKMDGNWRRGSTAGGCRNYPNTFWMNPQYLIKLEEEDEDEEDGESGCTFLVGLIQKHRRRQRKMGEDMHTIGFGIYEVPEELSGQTNIHLSKNFFLTNRARERSDTFINLREVLNRFKLPPGEYILVPSTFEPNKDGDFCIRVFSEKKADYQAVDDEIEANLEEFDISEDDIDDGVRRLFAQLAGEDAEISAFELQTILRRVLAKRQDIKSDGFSIETCKIMVDMLDSDGSGKLGLKEFYILWTKIQKYQKIYREIDVDRSGTMNSYEMRKALEEAGFKMPCQLHQVIVARFADDQLIIDFDNFVRCLVRLETLFKIFKQLDPENTGTIELDLISWLCFSVL

SEQ ID NO: 1091 - protein, 701 aa, Homo sapiens [sequence omitted]

SEQ ID NO: 1092 - protein, 700 aa, Homo sapiens
MAGIAAKLAKDREAAEGLGSHERAIKYLNQDYEALRNECLEAGTLFQDPSFPAIPSALGFKELGPYSSKTRGIEWKRPTEICADPQFIIGGATRTDICQGALGDCWLLAAIASLTLNEEILARVVPLNQSFQENYAGIFHFQFWQYGEWVEVVVDDRLPTKDGELLFVHSAEGSEFWSALLEKAYAKINGCYEALSGGATTEGFEDFTGGIAEWYELKKPPPNLFKIIQKALQKGSLLGCSIDITSAADSEAITFQKLVKGHAYSVTGAEEVESNGSLQKLIRIRNPWGEVEWTGRWNDNCPSWNTIDPEERERLTRRHEDGEFWMSFSDFLRHYSRLEICNLTPDTLTSDTYKKWKLTKMDGNWRRGSTAGGCRNYPNTFWMNPQYLIKLEEEDEDEEDGESGCTFLVGLIQKHRRRQRKMGEDMHTIGFGIYEVPEELSGQTNIHLSKNFFLTNRARERSDTFINLREVLNRFKLPPGEYILVPSTFEPNKDGDFCIRVFSEKKADYQAVDDEIEANLEEFDISEDDIDDGVRRLFAQLAGEDAEISAFELQTILRRVLAKRQDIKSDGFSIETCKIMVDMLDSDGSGKLGLKEFYILWTKIQKYQKIYREIDVDRSGTMNSYEMRKALEEAGFKMPCQLHQVIVARFADDQLIIDFDNFVRCLVRLETLFKIFKQLDPENTGTIELDLISWLCFSVL

SEQ ID NO: 1093 - protein, 454 aa, Homo sapiens
MALQLGRLSSGPCWLVARGGCGGPRAWSQCGGGGLRAWSQRSAAGRVCRPPGPAGTEQSRGLGHGSTSRGGPWVGTGLAAALAGLVGLATAAFGHVQRAEMLPKTSGTRATSLGRPEEEEDELAHRCSSFMAPPVTDLGELRRRPGDMKTKMELLILETQAQVCQALAQVDGGANFSVDRWERKEGGGGISCVLQDGCVFEKAGVSISVVHGNLSEEAAKQMRSRGKVLKTKDGKLPFCAMGVSSVIHPKNPHAPTIHFNYRYFEVEEADGHKQWWFGGGCDLTPTYLNQEDAVHFHRTLKEACDQHGPDLYPKFKKWCDDYFFIAHRGERRGIGGIFFDDLDSPSKEEVFRFVQSCARAVVPSYIPLVKKHCDDSFTPQEKLWQQLRRGRYVEFNLLYDRGTKFGLFTPGSRIESILMSLPLTARWEYMHSPSENSKEAEILEVLRHPRDWVR

SEQ ID NO: 1094 - protein, 592 aa, Homo sapiens
  misc_feature (244)..(244): Xaa can be any naturally occurring amino acid
MDHAVPACQDWFAQTSRLMIAPERNQLSSRATRGDEGSRNVQLLGYVAKEAVSMFTSLKRAFYHQDTHPFVFPTLHSESRRGEVLRGRGRGQLDAVLSREHCGGSRQSEQPWSRRSSSSSSRRRLRSAAEPAMALSMPLNGLKEEDKEPLIELLVKAGSDGVVFSVTTVDLKWKPADLQNLAPRTHPPFVSFNSEVKTDVSKIEEFLEEVLCPPKYLKLSPKHPESNTAGMDIFAKFSAFIKNXRREANEALEKDLLKTLQKLDKYLNSPLPDEIDENSIEDIKFSTHKFLDGNEMTLADCSLLPKLHIVKVVAKKYHNFDIPKEMTGIWRYLTNAYSRDEFINTCPSDKEVEIAYSDAKRPTKVSQSTSLAGWGKGPHSPRPLLPLREIATPSPYRRQAGGQALGTSRPRSQWPGQLVRHVTRVSCTAGTSRHRGGDRPARGLEISSFRAPPPTVPEKGEAGDVIIRVLVGGATVHNGTKTSGPSQTMSDAAAAHAINPVVATHPASPCRPAPPECSRASREPAAAASLSREAAALAPGAWVGAGSEERATSKPPGLERGQRRRLGEGEAVAAGGGAGGGDAGETHRPEPV

SEQ ID NO: 1095 - protein, 372 aa, Homo sapiens
MKYLRHRRPNATLILAIGAFTLLLFSLLVSPPTCKVQEQPPAIPEALAWPTPPTRPAPAPCHANTSMVTHPDFATQPQHVQNFLLYRHCRHFPLLQDVPPSKCAQPVFLLLVIKSSPSNYVRRELLRRTWGRERKVRGLQLRLLFLVGTASNPHEARKVNRLLELEAQTHGDILQWDFHDSFFNLTLKQVLFLQWQETRCANASFVLNGDDDVFAHTDNMVFYLQDHDPGRHLFVGQLIQNVGPIRAFWSKYYVPEVVTQNERYPPYCGGGGFLLSRFTAAALRRAAHVLDIFPIDDVFLGMCLELEGLKPASHSGIRTSGVRAPSQRLSSFDPCFYRDLLLVHRFLPYEMLLMWDALNQPNLTCGNQTQIY

SEQ ID NO: 1096 - protein, 355 aa, Homo sapiens [sequence omitted]

SEQ ID NO: 1097 - protein, 354 aa, Homo sapiens
AKLIALTLLGMGLALFRNHQSSYQTRLNALREVQPVELPNCNLVKGIETGSEDMEILPNGLAFISSGLKYPGIKSFNPNSPGKILLMDLNEEDPTVLELGITGSKFDVSSFNPHGISTFTDEDNAMYLLVVNHPDAKSTVELFKFQEEEKSLLHLKTIRHKLLPNLNDIVAVGPEHFYGTNDHYFLDPYLQSWEMYLGLAWSYVVYYSPSEVRVVAEGFDFANGINISPDGKYVYIAELLAHKIHVYEKHANWTLTPLKSLDFNTLVDNISVDPETGDLWVGCHPNGMKIFFYDSENPPASEVLRIQNILTEEPKVTQVYAENGTVLQGSTVASVYKGKLLIGTVFHKALYCEL

SEQ ID NO: 1098 - protein, 268 aa, Homo sapiens
MDLNEEDPTVLELGITGSKFDVSSFNPHGISTFTDEDNAMYLLVVNHPDAKSTVELFKFQEEEKSLLHLKTIRHKLLPNLNDIVAVGPEHFYGTNDHYFLDPYLQSWEMYLGLAWSYVVYYSPSEVRVVAEGFDFANGINISPDGKYVYIAELLAHKIHVYEKHANWTLTPLKSLDFNTLVDNISVDPETGDLWVGCHPNGMKIFFYDSENPPASEVLRIQNILTEEPKVTQVYAENGTVLQGSTVASVYKGKLLIGTVFHKALYCEL

SEQ ID NO: 1099 - protein, 355 aa, Homo sapiens [sequence omitted]

SEQ ID NO: 1100 - protein, 1508 aa, Homo sapiens
MSSSHSRAGQSAAGAAPGGGVDTRDAEMPATEKDLAEDAPWKKIQQNTFTRWCNEHLKCVSKRIANLQTDLSDGLRLIALLEVLSQKKMHRKHNQRPTFRQMQLENVSVALEFLDRESIKLVSIDSKAIVDGNLKLILGLIWTLILHYSISMPMWDEEEDEEAKKQTPKQRLLGWIQNKLPQLPITNFSRDWQSGRALGALVDSCAPGLCPDWDSWDASKPVTNAREAMQQADDWLGIPQVITPEEIVDPNVDEHSVMTYLSQFPKAKLKPGAPLRPKLNPKKARAYGPGIEPTGNMVKKRAEFTVETRSAGQGEVLVYVEDPAGHQEEAKVTANNDKNRTFSVWYVPEVTGTHKVTVLFAGQHIAKSPFEVYVDKSQGDASKVTAQGPGLEPSGNIANKTTYFEIFTAGAGTGEVEVVIQDPMGQKGTVEPQLEARGDSTYRCSYQPTMEGVHTVHVTFAGVPIPRSPYTVTVGQACNPSACRAVGRGLQPKGVRVKETADFKVYTKGAGSGELKVTVKGPKGEERVKQKDLGDGVYGFEYYPMVPGTYIVTITWGGQNIGRSPFEVKVGTECGNQKVRAWGPGLEGGVVGKSADFVVEAIGDDVGTLGFSVEGPSQAKIECDDKGDGSCDVRYWPQEAGEYAVHVLCNSEDIRLSPFMADIRDAPQDFHPDRVKARGPGLEKTGVAVNKPAEFTVDAKHGGKAPLRVQVQDNEGCPVEALVKDNGNGTYSCSYVPRKPVKHTAMVSWGGVSIPNSPFRVNVGAGSHPNKVKVYGPGVAKTGLKAHEPTYFTVDCAEAGQGDVSIGIKCAPGVVGPAEADIDFDIIRNDNDTFTVKYTPRGAGSYTIMVLFADQATPTSPIRVKVEPSHDASKVKAEGPGLSRTGVELGKPTHFTVNAKAAGKGKLDVQFSGLTKGDAVRDVDIIDHHDNTYTVKYTPVQQGPVGVNVTYGGDPIPKSPFSVAVSPSLDLSKIKVSGLGEKVDVGKDQEFTVKSKGAGGQGKVASKIVGPSGAAVPCKVEPGLGADNSVVRFLPREEGPYEVEVTYDGVPVPGSPFPLEAVAPTKPSKVKAFGPGLQGGSAGSPARFTIDTKGAGTGGLGLTVEGPCEAQLECLDNGDGTCSVSYVPTEPGDYNINILFADTHIPGSPFKAHVVPCFDASKVKCSGPGLERATAGEVGQFQVDCSSAGSAELTIEICSEAGLPAEVYIQDHGDGTHTITYIPLCPGAYTVTIKYGGQPVPNFPSKLQVEPAVDTSGVQCYGPGIEGQGVFREATTEFSVDARALTQTGGPHVKARVANPSGNLTETYVQDRGDGMYKVEYTPYEEGLHSVDVTYDGSPVPSSPFQVPVTEGCDPSRVRVHGPGIQSGTTNKPNKFTVETRGAGTGGLGLAVEGPSEAKMSCMDNKDGSCSVEYIPYEAGTYSLNVTYGGHQVPGSPFKVPVHDVTDASKVKCSGPGLSPGMVRANLPQSFQVDTSKAGVAPLQVKVQGPKGECLHAWSQGSGGQCPV

SEQ ID NO: 1101 - protein, 2725 aa, Homo sapiens
MMNNSGYSDAGLGLGDETDEMPSTEKDLAEDAPWKKIQQNTFTRWCNEHLKCVGKRLTDLQRDLSDGLRLIALLEVLSQKRMYRKFHPRPNFRQMKLENVSVALEFLEREHIKLVSIDSKAIVDGNLKLILGLIWTLILHYSISMPMWEDEDDEDARKQTPKQRLLGWIQNKVPQLPITNFNRDWQDGKALGALVDNCAPGLCPDWEAWDPNQPVENAREAMQQADDWLGVPQVIAPEEIVDPNVDEHSVMTYLSQFPKAKLKPGAPVRSKQLNPKKAIAYGPGIEPQGNTVLQPAHFTVQTVDAGVGEVLVYIEDPEGHTEEAKVVPNNDKDRTYAVSYVPKVAGLHKVTVLFAGQNIERSPFEVNVGMALGDANKVSARGPGLEPVGNVANKPTYFDIYTAGAGTGDVAVVIVDPQGRRDTVEVALEDKGDSTFRCTYRPAMEGPHTVHVAFAGAPITRSPFPVHVSEACNPNACRASGRGLQPKGVRVKEVADFKVFTKGAGSGELKVTVKGPKGTEEPVKVREAGDGVFECEYYPVVPGKYVVTITWGGYAIPRSPFEVQVSPEAGVQKVRAWGPGLETGQVGKSADFVVEAIGTEVGTLGFSIEGPSQAKIECDDKGDGSCDVRYWPTEPGEYAVHVICDDEDIRDSPFIAHILPAPPDCFPDKVKAFGPGLEPTGCIVDKPAEFTIDARAAGKGDLKLYAQDADGCPIDIKVIPNGDGTFRCSYVPTKPIKHTIIISWGGVNVPKSPFRVNVGEGSHPERVKVYGPGVEKTGLKANEPTYFTVDCSEAGQGDVSIGIKCAPGVVGPAEADIDFDIIKNDNDTFTVKYTPPGAGRYTIMVLFANQEIPASPFHIKVDPSHDASKVKAEGPGLNRTGVEVGKPTHFTVLTKGAGKAKLDVQFAGTAKGEVVRDFEIIDNHDYSYTVKYTAVQQGNMAVTVTYGGDPVPKSPFVVNVAPPLDLSKIKVQGLNSKVAVGQEQAFSVNTRGAGGQGQLDVRMTSPSRRPIPCKLEPGGGAEAQAVRYMPPEEGPYKVDITYDGHPVPGSPFAVEGVLPPDPSKVCAYGPGLKGGLVGTPAPFSIDTKGAGTGGLGLTVEGPCEAKIECQDNGDGSCAVSYLPTEPGEYTINILFAEAHIPGSPFKATIRPVFDPSKVRASGPGLERGKVGEAATFTVDCSEAGEAELTIEILSDAGVKAEVLIHNNADGTYHITYSPAFPGTYTITIKYGGHPVPKFPTRVHVQPAVDTSGVKVSGPGVEPHGVLREVTTEFTVDARSLTATGGNHVTARVLNPSGAKTDTYVTDNGDGTYRVQYTAYEEGVHLVEVLYDEVAVPKSPFRVGVTEGCDPTRVRAFGPGLEGGLVNKANRFTVETRGAGTGGLGLAIEGPSEAKMSCKDNKDGSCTVEYIPFTPGDYDVNITFGGRPIPGSPFRVPVKDVVDPGKVKCSGPGLGAGVRARVPQTFTVDCSQAGRAPLQVAVLGPTGVAEPVEVRDNGDGTHTVHYTPATDGPYTVAVKYADQEVPRSPFKIKVLPAHDASKVRASGPGLNASGIPASLPVEFTIDARDAGEGLLTVQILDPEGKPKKANIRDNGDGTYTVSYLPDMSGRYTITIKYGGDEIPYSPFRIHALPTGDASKCLVTVSIGGHGLGACLGPRIQIGQETVITVDAKAAGEGKVTCTVSTPDGAELDVDVVENHDGTFDIYYTAPEPGKYVITIRFGGEHIPNSPFHVLACDPLPHEEEPSEVPQLRQPYAPPRPGARPTHWATEEPVVPVEPMESMLRPFNLVIPFAVQKGELTGEVRMPSGKTARPNITDNKDGTITVRYAPTEKGLHQMGIKYDGNHIPGSPLQFYVDAINSRHVSAYGPGLSHGMVNKPATFTIVTKDAGEGGLSLAVEGPSKAEITCKDNKDGTCTVSYLPTAPGDYSIIVRFDDKHIPGSPFTAKITGDDSMRTSQLNVGTSTDVSLKITESDLSQLTASIRAPSGNEEPCLLKRLPNRHIGISFTPKEVGEHVVSVRKSGKHVTNSPFKILVGPSEIGDASKVRVWGKGLSEGHTFQVAEFIVDTRNAGYGGLGLSIEGPSKVDINCEDMEDGTCKVTYCPTEPGTYIINIKFADKHVPGSPFTVKVTGEGRMKESITRRRQAPSIATIGSTCDLNLKIPGNWFQMVSAQERLTRTFTRSSHTYTRTERTEISKTRGGETKREVRVEESTQVGGDPFPAVFGDFLGRERLGSFGSITRQQEGEASSQDMTAQVTSPSGKVEAAEIVEGEDSAYSVRFVPQEMGPHTVAVKYRGQHVPGSPFQFTVGPLGEGGAHKVRAGGTGLERGVAGVPAEFSIWTREAGAGGLSIAVEGPSKAEIAFEDRKDGSCGVSYVVQEPGDYEVSIKFNDEHIPDSPFVVPVASLSDDARRLTVTSLQETGLKVNQPASFAVQLNGARGVIDARVHTPSGAVEECYVSELDSDKHTIRFIPHENGVHSIDVKFNGAHIPGSPFKIRVGEQSQAGDPGLVSAYGPGLEGGTTGVSSEFIVNTLNAGSGALSVTIDGPSKVQLDCRECPEGHVVTYTPMAPGNYLIAIKYGGPQHIVGSPFKAKVTGPRLSGGHSLHETSTVLVETVTKSSSSRGSSYSSIPKFSSDASKVVTRGPGLSQAFVGQKNSFTVDCSKAGTNMMMVGVHGPKTPCEEVYVKHMGNRVYNVTYTVKEKGDYILIVKWGDESVPGSPFKVKVP

SEQ ID NO: 1102 - protein, 2725 aa, Homo sapiens
MMNNSGYSDAGLGLGDETDEMPSTEKDLAEDAPWKKIQQNTFTRWCNEHLKCVGKRLTDLQRDLSDGLRLIALLEVLSQKRMYRKFHPRPNFRQMKLENVSVALEFLEREHIKLVSIDSKAIVDGNLKLILGLIWTLILHYSISMPMWEDEDDEDARKQTPKQRLLGWIQNKVPQLPITNFNRDWQDGKALGALVDNCAPGLCPDWEAWDPNQPVENSREAMQQADDWLGVPQVIAPEEIVDPNVDEHSVMTYLSQFPKAKLKPGAPVRSKQLNPKKAIAYGPGIEPQGNTVLQPAHFTVQTVDAGVGEVLVYIEDPEGHTEEAKVVPNNDKDRTYAVSYVPKVAGLHKVTVLFAGQNIERSPFEVNVGMALGDANKVSARGPGLEPVGNVANKPTYFDIYTAGAGTGDVAVVIVDPQGRRDTVEVALEDKGDSTFRCTYRPAMEGPHTVHVAFAGAPITRSPFPVHVSEACNPNACRASGRGLQPKGVRVKEVADFKVFTKGAGSGELKVTVKGPKGTEEPVKVREAGDGVFECEYYPVVPGKYVVTITWGGYAIPRSPFEVQVSPEAGVQKVRAWGPGLETGQVGKSADFVVEAIGTEVGTLGFSIEGPSQAKIECDDKGDGSCDVRYWPTEPGEYAVHVICDDEDIRDSPFIAHILPAPPDCFPDKVKAFGPGLEPTGCIVDKPAEFTIDARAAGKGDLKLYAQDADGCPIDIKVIPNGNGTFRCSYVPTKPIKHTIIISWGGVNVPKSPFRVNVGEGSHPERVKVYGPGVEKTGLKANEPTYFTVDCSEAGQGDVSIGIKCAPGVVGPAEADIDFDIIKNDNDTFTVKYTPPGAGRYTIMVLFANQEIPASPFHIKVDPSHDASKVKAEGPGLNRTGVEVGKPTHFTVLTKGAGKAKLDVQFAGTAKGEVVRDFEIIDNHDYSYTVKYTAVQQGNMAVTVTYGGDPVPKSPFVVNVAPPLDLSKIKVQGLNSKVAVGQEQAFSVNTRGAGGQGQLDVRMTSPSRRPIPCKLEPGGGAEAQAVRYMPPEEGPYKVDITYDGHPVPGSPFAVEGVLPPDPSKVCAYGPGLKGGLVGTPAPFSIDTKGAGTGGLGLTVEGPCEAKIECQDNGDGSCAVSYLPTEPGEYTINILFAEAHIPGSPFKATIRPVFDPSKVRASGPGLERGKVGEAATFTVDCSEAGEAELTIEILSDAGVKAEVLIHNNADGTYHITYSPAFPGTYTITIKYGGHPVPKFPTRVHVQPAVDTSGVKVSGPGVEPHGVLREVTTEFTVDARSLTATGGNHVTARVLNPSGAKTDTYVTDNGDGTYRVQYTAYEEGVHLVEVLYDEVAVPKSPFRVGVTEGCDPTRVRAFGPGLEGGLVNKANRFTVETRGAGTGGLGLAIEGPSEAKMSCKDNKDGSCTVEYIPFTPGDYDVNITFGGRPIPGSPFRVPVKDVVDPGKVKCSGPGLGAGVRARVPQTFTVDCSQAGRAPLQVAVLGPTGVAEPVEVRDNGDGTHTVHYTPATDGPYTVAVKYADQEVPRSPFKIKVLPAHDASKVRASGPGLNASGIPASLPVEFTIDARDAGEGLLTVQILGPEGKPKKANIRDNGDGTYAVSYLPDMSGRYTITIKYGGDEIPYSPFRIHALPTGDASKCLVTVSIGGHGLGACLGPRIQIGQETVITVDAKAAGEGKVTCTVSTPDGAELDVDVVENHDGTFDIYYTAPEPGKYVITIRFGGEHIPNSPFHVLACDPLPHEEEPSEVPQLRQPYAPPRPGARPTHWATEEPVVPVEPMESMLRPFNLVIPFAVQKGELTGEVRMPSGKTARPNITDNKDGTITVRYAPTEKGLHQMGIKYDGNHIPGSPLQFYVDAINSRHVSAYGPGLSHGMVNKPATFTIVTKDAGEGGLSLAVEGPSKAEITCKDNKDGTCTVSYLPTAPGDYSIIVRFDDKHIPGSPFTAKITGDDSMRTSQLNVGTSTDVSLKITESDLSQLTASIRAPSGNEEPCLLKRLPNRHIGISFTPKEVGEHVVSVRKSGKHVTNSPFKILVGPSEIGDASKVRVWGKGLSEGHTFQVAEFIVDTRNAGYGGLGLSIEGPSKVDINCEDMEDGTCKVTYCPTEPGTYIINIKFADKHVPGSPFTVKVTGEGRMKESITRRRQAPSIATIGSTCDLNLKIPGNWFQMVSAQERLTRTFTRSSHTYTRTERTEISKTRGGETKPEVRVEESTQVGGDPFPAVFGDFLGRERLGSFGSITRQQEGEASSQDMTAQVTSPSGKVEAAEIVEGEDSAYSVRFVPQEMGPHTVAVKYRGQHVPGSPFQFTVGPLGEGGAHKVRAGRAGLERGVAGVPAEFSIWTREAGAGGLSIAVEGPSKAEIAFEDRKDGSCGVSYVVQEPGDYEVSIKFNDEHIPDSPFVVPVASLSDDARRLTVTSLQETGLKVNQPASFAVQLNGARGVIDARVHTPSGAVEECYVSELDSDKHTIRFIPHENGVHSIDVKFNGAHIPGSPFKIRVGEQSQAGDPGLVSAYGPGLEGGTTGVSSEFIVNTLNAGSGALSVTIDGPSKVQLDCRECPEGHVVTYTPMAPGNYLIAIKYGGPQHIVGSPFKAKVTGPRLSGGHSLHETSTVLVETVTKSSSSRGSSYSSIPKFSSDASKVVTRGPGLSQAFVGQKNSFTVDCSKAGTNMMMVGVHGPKTPCEEVYVKHMGNRVYNVTYTVKEKGDYILIVKWGDESVPGSPFKVKVP

SEQ ID NO: 1103 - protein, 2735 aa, Homo sapiens
MMNNSGYSDAGLGLGDETDEMPSTEKDLAEDAPWKKIQQNTFTRWCNEHLKCVGKRLTDLQRDLSDGLRLIALLEVLSQKRMYRKFHPRPNFRQMKLENVSVALEFLEREHIKLVSIDSKAIVDGNLKLILGLIWTLILHYSISMPMWEDEDDEDARKQTPKQRLLGWIQNKVPQLPITNFNRDWQDGKALGALVDNCAPGLCPDWEAWDPNQPVENAREAMQQADDWLGVPQVIAPEEIVDPNVDEHSVMTYLSQFPKAKLKPGAPVRSKQLNPKKAIAYGPGIEPQGNTVLQPAHFTVQTVDAGVGEVLVYIEDPEGHTEEAKVVPNNDKDRTYAVSYVPKVAGLHKVTVLFAGQNIERSPFEVNVGMALGDANKVSARGPGLEPVGNVANKPTYFDIYTAGAGTGDVAVVIVDPQGRRDTVEVALEDKGDSTFRCTYRPAMEGPHTVHVAFAGAPITRSPFPVHVSEACNPNACRASGRGLQPKGVRVKEVADFKVFTKGAGSGELKVTVKGPKGTEEPVKVREAGDGVFECEYYPVVPGKYVVTITWGGYAIPRSPFEVQVSPEAGVQKVRAWGPGLETGQVGKSADFVVEAIGTEVGTLGFSIEGPSQAKIECDDKGDGSCDVRYWPTEPGEYAVHVICDDEDIRDSPFIAHILPAPPDCFPDKVKAFGPGLEPTGCIVDKPAEFTIDARAAGKGDLKLYAQDADGCPIDIKVIPNGDGTFRCSYVPTKPIKHTIIISWGGVNVPKSPFRVNVGEGSHPERVKVYGPGVEKTGLKANEPTYFTVDCSEAGQGDVSIGIKCAPGVVGPAEADIDFDIIKNDNDTFTVKYTPPGAGRYTIMVLFANQEIPASPFHIKVDPSHDASKVKAEGPGLNRTGVEVGKPTHFTVLTKGAGKAKLDVQFAGTAKGEVVRDFEIIDNHDYSYTVKYTAVQQGNMAVTVTYGGDPVPKSPFVVNVAPPLDLSKIKVQGLNSKVAVGQEQAFSVNTRGAGGQGQLDVRMTSPSRRPIPCKLEPGGGAEAQAVRYMPPEEGPYKVDITYDGHPVPGSPFAVEGVLPPDPSKVCAYGPGLKGGLVGTPAPFSIDTKGAGTGGLGLTVEGPCEAKIECQDNGDGSCAVSYLPTEPGEYTINILFAEAHIPGSPFKATIRPVFDPSKVRASGPGLERGKVGEAATFTVDCSEAGEAELTIEILSDAGVKAEVLIHNNADGTYHITYSPAFPGTYTITIKYGGHPVPKFPTRVHVQPAVDTSGVKVSGPGVEPHGVLREVTTEFTVDARSLTATGGNHVTARVLNPSGAKTDTYVTDNGDGTYRVQYTAYEEGVHLVEVLYDEVAVPKSPFRVGVTEGCDPTRVRAFGPGLEGGLVNKANRFTVETRGAGTGGLGLAIEGPSEAKMSCKDNKDGSCTVEYIPFTPGDYDVNITFGGRPIPGSPFRVPVKDVVDPGKVKCSGPGLGAGVRARVPQTFTVDCSQAGRAPLQVAVLGPTGVAEPVEVRDNGDGTHTVHYTPATDGPYTVAVKYADQEVPRSPFKIKVLPAHDASKVRASGPGLNASGIPASLPVEFTIDARDAGEGLLTVQILDPEGKPKKANIRDNGDGTYTVSYLPDMSGRYTITIKYGGDEIPYSPFRIHALPTGDASKCLVTVSIGGHGLGACLGPRIQIGQETVITVDAKAAGEGKVTCTVSTPDGAELDVDVVENHDGTFDIYYTAPEPGKYVITIRFGGEHIPNSPFHVLACDPLPHEEEPSEVPQLRQPYAPPRPGARPTHWATEEPVVPVEPMESMLRPFNLVIPFAVQKGELTGEVRMPSGKTARPNITDNKDGTITVRYAPTEKGLHQMGIKYDGNHIPGSPLQFYVDAINSRHVSAYGPGLSHGMVNKPATFTIVTKDAGEGGLSLAVEGPSKAEITCKDNKDGTCTVSYLPTAPGDYSIIVRFDDKHIPGSPFTAKITGDDSMRTSQLNVGTSTDVSLKITESDLSQLTASIRAPSGNEEPCLLKRLPNRHIGISFTPKEVGEHVVSVRKSGKHVTNSPFKILVGPSEIGDASKVRVWGKGLSEGHTFQVAEFIVDTRNAGYGGLGLSIEGPSKVDINCEDMEDGTCKVTYCPTEPGTYIINIKFADKHVPGSPFTVKVTGEGRMKESITRRRQAPSIATIGSTCDLNLKIPGNWFQMVSAQERLTRTFTRSSHTYTRTERTEISKTRGGETKREVRVEESTQVGGDPFPAVFGDFLGRERLGSFGSITRQQEGEASSQDMTAQVTSPSGKVEAAEIVEGEDSAYSVRFVPQEMGPHTVAVKYRGQHVPGSPFQFTVGPLGEGGAHKVRAGGTGLERGVAGVPAEFSIWTREAGAGGLSIAVEGPSKAEIAFEDRKDGSCGVSYVVQEPGDYEVSIKFNDEHIPDSPFVVPVASLSDDARRLTVTSLQETGLKVNQPASFAVQLNGARGVIDARVHTPSGAVEECYVSELDSDKHTIRFIPHENGVHSIDVKFNGAHIPGSPFKIRVGEQSQAGDPGLVSAYGPGLEGGTTGVSSEFIVNTLNAGSGALSVTIDGPSKVQLDCRECPEGHVVTYTPMAPGNYLIAIKYGGPQHIVGSPFKAKVTGPRLSGGHSLHETSTVLVETVTKSSSSRGSSYSSIPKFSSDASKVVTRGPGLSQAFVGQKNSFTVDCSKAGRWRGEGVSRGTNMMMVGVHGPKTPCEEVYVKHMGNRVYNVTYTVKEKGDYILIVKWGDESVPGSPFKVKVP

SEQ ID NO: 1104 - protein, 2337 aa, Homo sapiens [sequence omitted]

SEQ ID NO: 1105 - protein, 2692 aa, Homo sapiens
MMNNSGYSDAGLGLGDETDEMPSTEKDLAEDAPWKKIQQNTFTRWCNEHLKCVGKRLTDLQRDLSDGLRLIALLEVLSQKRMYRKFHPRPNFRQMKLENVSVALEFLEREHIKLVSIDSKAIVDGNLKLILGLIWTLILHYSISMPMWEDEDDEDARKQTPKQRLLGWIQNKVPQLPITNFNRDWQDGKALGALVDNCAPGLCPDWEAWDPNQPVENAREAMQQADDWLGVPQVIAPEEIVDPNVDEHSVMTYLSQFPKAKLKPGAPVRSKQLNPKKAIAYGPGIEPQGNTVLQPAHFTVQTVDAGVGEVLVYIEDPEGHTEEAKVVPNNDKDRTYAVSYVPKVAGLHKVTVLFAGQNIERSPFEVNVGMALGDANKVSARGPGLEPVGNVANKPTYFDIYTAGAGTGDVAVVIVDPQGRRDTVEVALEDKGDSTFRCTYRPAMEGPHTVHVAFAGAPITRSPFPVHVSEACNPNACRASGRGLQPKGVRVKEVADFKVFTKGAGSGELKVTVKGPKGTEEPVKVREAGDGVFECEYYPVVPGKYVVTITWGGYAIPRSPFEVQVSPEAGVQKVRAWGPGLETGQVGKSADFVVEAIGTEVGTLGFSIEGPSQAKIECDDKGDGSCDVRYWPTEPGEYAVHVICDDEDIRDSPFIAHILPAPPDCFPDKVKAFGPGLEPTGCIVDKPAEFTIDARAAGKGDLKLYAQDADGCPIDIKVIPNGDGTFRCSYVPTKPIKHTIIISWGGVNVPKSPFRVNVGEGSHPERVKVYGPGVEKTGLKANEPTYFTVDCSEAGQGDVSIGIKCAPGVVGPAEADIDFDIIKNDNDTFTVKYTPPGAGRYTIMVLFANQEIPASPFHIKVDPSHDASKVKAEGPGLNRTGVEVGKPTHFTVLTKGAGKAKLDVQFAGTAKGEVVRDFEIIDNHDYSYTVKYTAVQQGNMAVTVTYGGDPVPKSPFVVNVAPPLDLSKIKVQGLNSKVAVGQEQAFSVNTRGAGGQGQLDVRMTSPSRRPIPCKLEPGGGAEAQAVRYMPPEEGPYKVDITYDGHPVPGSPFAVEGVLPPDPSKVCAYGPGLKGGLVGTPAPFSIDTKGAGTGGLGLTVEGPCEAKIECQDNGDGSCAVSYLPTEPGEYTINILFAEAHIPGSPFKATIRPVFDPSKVRASGPGLERGKVGEAATFTVDCSEAGEAELTIEILSDAGVKAEVLIHNNADGTYHITYSPAFPGTYTITIKYGGHPVPKFPTRVHVQPAVDTSGVKVSGPGVEPHGVLREVTTEFTVDARSLTATGGNHVTARVLNPSGAKTDTYVTDNGDGTYRVQYTAYEEGVHLVEVLYDEVAVPKSPFRVGVTEGCDPTRVRAFGPGLEGGLVNKANRFTVETRGAGTGGLGLAIEGPSEAKMSCKDNKDGSCTVEYIPFTPGDYDVNITFGGRPIPGSPFRVPVKDVVDPGKVKCSGPGLGAGVRARVPQTFTVDCSQAGRAPLQVAVLGPTGVAEPVEVRDNGDGTHTVHYTPATDGPYTVAVKYADQEVPRSPFKIKVLPAHDASKVRASGPGLNASGIPASLPVEFTIDARDAGEGLLTVQILDPEGKPKKANIRDNGDGTYTVSYLPDMSGRYTITIKYGGDEIPYSPFRIHALPTGDASKCLVTVSIGGHGLGACLGPRIQIGQETVITVDAKAAGEGKVTCTVSTPDGAELDVDVVENHDGTFDIYYTAPEPGKYVITIRFGGEHIPNSPFHVLATEEPVVPVEPMESMLRPFNLVIPFAVQKGELTGEVRMPSGKTARPNITDNKDGTITVRYAPTEKGLHQMGIKYDGNHIPGSPLQFYVDAINSRHVSAYGPGLSHGMVNKPATFTIVTKDAGEGGLSLAVEGPSKAEITCKDNKDGTCTVSYLPTAPGDYSIIVRFDDKHIPGSPFTAKITGDDSMRTSQLNVGTSTDVSLKITESDLSQLTASIRAPSGNEEPCLLKRLPNRHIGISFTPKEVGEHVVSVRKSGKHVTNSPFKILVGPSEIGDASKVRVWGKGLSEGHTFQVAEFIVDTRNAGYGGLGLSIEGPSKVDINCEDMEDGTCKVTYCPTEPGTYIINIKFADKHVPGSPFTVKVTGEGRMKESITRRRQAPSIATIGSTCDLNLKIPGNWFQMVSAQERLTRTFTRSSHTYTRTERTEISKTRGGETKREVRVEESTQVGGDPFPAVFGDFLGRERLGSFGSITRQQEGEASSQDMTAQVTSPSGKVEAAEIVEGEDSAYSVRFVPQEMGPHTVAVKYRGQHVPGSPFQFTVGPLGEGGAHKVRAGGTGLERGVAGVPAEFSIWTREAGAGGLSIAVEGPSKAEIAFEDRKDGSCGVSYVVQEPGDYEVSIKFNDEHIPDSPFVVPVASLSDDARRLTVTSLQETGLKVNQPASFAVQLNGARGVIDARVHTPSGAVEECYVSELDSDKHTIRFIPHENGVHSIDVKFNGAHIPGSPFKIRVGEQSQAGDPGLVSAYGPGLEGGTTGVSSEFIVNTLNAGSGALSVTIDGPSKVQLDCRECPEGHVVTYTPMAPGNYLIAIKYGGPQHIVGSPFKAKVTGPRLSGGHSLHETSTVLVETVTKSSSSRGSSYSSIPKFSSDASKVVTRGPGLSQAFVGQKNSFTVDCSKAGTNMMMVGVHGPKTPCEEVYVKHMGNRVYNVTYTVKEKGDYILIVKWGDESVPGSPFKVKVP

SEQ ID NO: 1106 - protein, 2480 aa, Homo sapiens
MSSSHSRAGQSAAGAAPGGGVDTRDAEMPATEKDLAEDAPWKKIQQNTFTRWCNEHLKCVSKRIANLQTDLSDGLRLIALLEVLSQKKMHRKHNQRPTFRQMQLENVSVALEFLDRESIKLVSIDSKAIVDGNLKLILGLIWTLILHYSISMPMWDEEEDEEAKKQTPKQRLLGWIQNKLPQLPITNFSRDWQSGRALGALVDSCAPGLCPDWDSWDASKPVTNAREAMQQADDWLGIPQVITPEEIVDPNVDEHSVMTYLSQFPKAKLKPGAPLRPKLNPKKARAYGPGIEPTGNMVKKRAEFTVETRSAGQGEVLVYVEDPAGHQEEAKVTANNDKNRTFSVWYVPEVTGTHKVTVLFAGQHIAKSPFEVYVDKSQGDASKVTAQGPGLEPSGNIANKTTYFEIFTAGAGTGEVEVVIQDPMGQKGTVEPQLEARGDSTYRCSYQPTMEGVHTVHVTFAGVPIPRSPYTVTVGQACNPSACRAVGRGLQPKGVRVKETADFKVYTKGAGSGELKVTVKGPKGEERVKQKDLGDGVYGFEYYPMVPGTYIVTITWGGQNIGRSPFEVKVGTECGNQKVRAWGPGLEGGVVGKSADFVVEAIGDDVGTLGFSVEGPSQAKIECDDKGDGSCDVRYWPQEAGEYAVHVLCNSEDIRLSPFMADIRDAPQDFHPDRVKARGPGLEKTGVAVNKPAEFTVDAKHGGKAPLRVQVQDNEGCPVEALVKDNGNGTYSCSYVPRKPVKHTAMVSWGGVSIPNSPFRVNVGAGSHPNKVKVYGPGVAKTGLKAHEPTYFTVDCAEAGQGDVSIGIKCAPGVVGPAEADIDFDIIRNDNDTFTVKYTPRGAGSYTIMVLFADQATPTSPIRVKVEPSHDASKVKAEGPGLSRTGVELGKPTHFTVNAKAAGKGKLDVQFSGLTKGDAVRDVDIIDHHDNTYTVKYTPVQQGPVGVNVTYGGDPIPKSPFSVAVSPSLDLSKIKVSGLGEKVDVGKDQEFTVKSKGAGGQGKVASKIVGPSGAAVPCKVEPGLGADNSVVRFLPREEGPYEVEVTYDGVPVPGSPFPLEAVAPTKPSKVKAFGPGLQGGSAGSPARFTIDTKGAGTGGLGLTVEGPCEAQLECLDNGDGTCSVSYVPTEPGDYNINILFADTHIPGSPFKAHVVPCFDASKVKCSGPGLERATAGEVGQFQVDCSSAGSAELTIEICSEAGLPAEVYIQDHGDGTHTITYIPLCPGAYTVTIKYGGQPVPNFPSKLQVEPAVDTSGVQCYGPGIEGQGVFREATTEFSVDARALTQTGGPHVKARVANPSGNLTETYVQDRGDGMYKVEYTPYEEGLHSVDVTYDGSPVPSSPFQVPVTEGCDPSRVRVHGPGIQSGTTNKPNKFTVETRGAGTGGLGLAVEGPSEAKMSCMDNKDGSCSVEYIPYEAGTYSLNVTYGGHQVPGSPFKVPVHDVTDASKVKCSGPGLSPGMVRANLPQSFQVDTSKAGVAPLQVKVQGPKGLVEPVDVVDNADGTQTVNYVPSREGPYSISVLYGDEEVPRSPFKVKVLPTHDASKVKASGPGLNTTGVPASLPVEFTIDAKDAGEGLLAVQITDPEGKPKKTHIQDNHDGTYTVAYVPDVTGRYTILIKYGGDEIPFSPYRVRAVPTGDASKCTVTVSIGGHGLGAGIGPTIQIGEETVITVDTKAAGKGKVTCTVCTPDGSEVDVDVVENEDGTFDIFYTAPQPGKYVICVRFGGEHVPNSPFQVTALAGDQPSVQPPLRSQQLAPQYTYAQGGQQTWAPERPLVGVNGLDVTSLRPFDLVIPFTIKKGEITGEVRMPSGKVAQPTITDNKDGTVTVRYAPSEAGLHEMDIRYDNMHIPGSPLQFYVDYVNCGHVTAYGPGLTHGVVNKPATFTVNTKDAGEGGLSLAIEGPSKAEISCTDNQDGTCSVSYLPVLPGDYSILVKYNEQHVPGSPFTARVTGDDSMRMSHLKVGSAADIPINISETDLSLLTATVVPPSGREEPCLLKRLRNGHVGISFVPKETGEHLVHVKKNGQHVASSPIPVVISQSEIGDASRVRVSGQGLHEGHTFEPAEFIIDTRDAGYGGLSLSIEGPSKVDINTEDLEDGTCRVTYCPTEPGNYIINIKFADQHVPGSPFSVKVTGEGRVKESITRRRRAPSVANVGSHCDLSLKIPEISIQDMTAQVTSPSGKTHEAEIVEGENHTYCIRFVPAEMGTHTVSVKYKGQHVPGSPFQFTVGPLGEGGAHKVRAGGPGLERAEAGVPAEFSIWTREAGAGGLAIAVEGPSKAEISFEDRKDGSCGVAYVVQEPGDYEVSVKFNEEHIPDSPFVVPVASPSGDARRLTVSSLQVRHREKPPTWGSWARTDQSHRRDQALALCSVTPLAQLWVPGLCSGRVQPTLGVGRKYPAHHVEFFSCLRSKGFEQKPVPLEHQGCGLKRDSLPRLGAAHRVGQPSLPATWVCATAECGGRGGDVRLWLAAPCKSVALPL

SEQ ID NO: 1107 - protein, 737 aa, Homo sapiens [sequence omitted]

SEQ ID NO: 1108 - protein, 871 aa, Homo sapiens [sequence omitted]

SEQ ID NO: 1109 - protein, 504 aa, Homo sapiens
MLYFSLFWAARPLQRCGQLVRMAIRAQHSNAAQTQTGEANRGWTGQESLSDSDPEMWELLQREKDRQCRGLELIASENFCSRAALEALGSCLNNKYSEGYPGKRYYGGAEVVDEIELLCQRRALEAFDLDPAQWGVNVQPYSGSPANLAVYTALLQPHDRIMGLDLPDGGHLTHGYMSDVKRISATSIFFESMPYKLNPKTGLIDYNQLALTARLFRPRLIIAGTSAYARLIDYARMREVCDEVKAHLLADMAHISGLVAAKVIPSPFKHADIVTTTTHKTLRGARSGLIFYRKGVKAVDPKTGREIPYTFEDRINFAVFPSLQGGPHNHAIAAVAVALKQACTPMFREYSLQVLKNARAMADALLERGYSLVSGGTDNHLVLVDLRPKGLDGARAERVLELVSITANKNTCPGDRSAITPGGLRLGAPALTSRQFREDDFRRVVDFIDEGVNIGLEVKSKTAKLQDFKSFLLKDSETSQRLANLRQRVEQFARAFPMPGFDEH

SEQ ID NO: 1110 - protein, 497 aa, Homo sapiens
MLYFSLFWAARLVRMAIRAQHSNAAQTQTGEANRGWTGQESLSDSDPEMWELLQREKDRQCRGLELIASENFCSRAALEALGSCLNNKYSEGYPGKRYYGGAEVVDEIELLCQRRALEAFDLDPAQWGVNVQPYSGSPANLAVYTALLQPHDRIMGLDLPDGGHLTHGYMSDVKRISATSIFFESMPYKLNPKTGLIDYNQLALTARLFRPRLIIAGTSAYARLIDYARMREVCDEVKAHLLADMAHISGLVAAKVIPSPFKHADIVTTTTHKTLRGARSGLIFYRKGVKAVDPKTGREIPYTFEDRINFAVFPSLQGGPHNHAIAAVAVALKQACTPMFREYSLQVLKNARAMADALLERGYSLVSGGTDNHLVLVDLRPKGLDGARAERVLELVSITANKNTCPGDRSAITPGGLRLGAPALTSRQFREDDFRRVVDFIDEGVNIGLEVKSKTAKLQDFKSFLLKDSETSQRLANLRQRVEQFARAFPMPGFDEH

SEQ ID NO: 1111 - protein, 504 aa, Homo sapiens; identical to SEQ ID NO: 1109

SEQ ID NO: 1112 - protein, 171 aa, Homo sapiens
MLYFSLFWAARPLQRCGQLVRMAIRAQHSNAAQTQTGEANRGWTGQESLSDSDPEMWELLQREKDRQCRGLELIASENFCSRAALEALGSCLNNKYSEGYPGKRYYGGAEVVDEIELLCQRRALEAFDLDPAQWGVNVQPYSGSPANLAVYTALLQPHDRIMGLDLPDGGQ

SEQ ID NO: 1113 - protein, 494 aa, Homo sapiens
MLYFSLFWAARPLQRCGQLVRMAIRAQHSNAAQTQTGEANRGWTGQESLSDSDPEMWELLQREKDRQCRGLELIASENFCSRAALEALGSCLNNKYSEGYPGKRYYGGAEVVDEIELLCQRRALEAFDLDPAQWGVNVQPYSGSPANLAVYTALLQPHDRIMGLDLPDGGHLTHGYMSDVKRISATSIFFESMPYKLNLALTARLFRPRLIIAGTSAYARLIDYARMREVCDEVKAHLLADMAHISGLVAAKVIPSPFKHADIVTTTTHKTLRGARSGLIFYRKGVKAVDPKTGREIPYTFEDRINFAVFPSLQGGPHNHAIAAVAVALKQACTPMFREYSLQVLKNARAMADALLERGYSLVSGGTDNHLVLVDLRPKGLDGARAERVLELVSITANKNTCPGDRSAITPGGLRLGAPALTSRQFREDDFRRVVDFIDEGVNIGLEVKSKTAKLQDFKSFLLKDSETSQRLANLRQRVEQFARAFPMPGFDEH

SEQ ID NO: 1114 - protein, 248 aa, Homo sapiens
MVESPFSVPSLPLSHGRYYGGAEVVDEIELLCQRRALEAFDLDPAQWGVNVQPYSGSPANLAVYTALLQPHDRIMGLDLPDGGHLTHGYMSDVKRISATSIFFESMPYKLNVSALGVSVQPKTGLIDYNQLALTARLFRPRLIIAGTSAYARLIDYARMREVCDEVKAHLLADMAHISGLVAAKVIPSPFKHADIVTTTTHKTLRGARSGLIFYRKGVKAVDPKTGREIPLPCSHPCRGAPTIMPLLQ

SEQ ID NO: 1115 - protein, 483 aa, Homo sapiens
MAIRAQHSNAAQTQTGEANRGWTGQESLSDSDPEMWELLQREKDRQCRGLELIASENFCSRAALEALGSCLNNKYSEGYPGKRYYGGAEVVDEIELLCQRRALEAFDLDPAQWGVNVQPYSGSPANLAVYTALLQPHDRIMGLDLPDGGHLTHGYMSDVKRISATSIFFESMPYKLNPKTGLIDYNQLALTARLFRPRLIIAGTSAYARLIDYARMREVCDEVKAHLLADMAHISGLVAAKVIPSPFKHADIVTTTTHKTLRGARSGLIFYRKGVKAVDPKTGREIPYTFEDRINFAVFPSLQGGPHNHAIAAVAVALKQACTPMFREYSLQVLKNARAMADALLERGYSLVSGGTDNHLVLVDLRPKGLDGARAERVLELVSITANKNTCPGDRSAITPGGLRLGAPALTSRQFREDDFRRVVDFIDEGVNIGLEVKSKTAKLQDFKSFLLKDSETSQRLANLRQRVEQFARAFPMPGFDEH

SEQ ID NO: 1116 - protein, 178 aa, Homo sapiens
RWSLCRDVGSWSGWPFGLSTATQPRLRLGKQTGAGQARRACRTVILRCGSCCRGRRTGSVVAWSSLPQRYYGGAEVVDEIELLCQRRALEAFDLDPAQWGVNVQPYSGSPANLAVYTALLQPHDRIMGLDLPDGGHLTHGYMSDVKRISATSIFFESMPYKLNGFSCLCVCPAQNWPH

SEQ ID NO: 1117 - protein, 132 aa, Homo sapiens
MVESPFSVPSLPLSHGRYYGGAEVVDEIELLCQRRALEAFDLDPAQWGVNVQPYSGSPANLAVYTALLQPHDRIMGLDLPDGGHLTHGYMSDVKRISATSIFFESMPYKLNVSALGCGEGLLALVVVLPWRS

SEQ ID NO: 1118 - protein, 483 aa, Homo sapiens; identical to SEQ ID NO: 1115

SEQ ID NO: 1119 - protein, 698 aa, Homo sapiens
MAACGRVRRMFRLSAALHLLLLFAAGAEKLPGQGVHSQGQGPGANFVSFVGQAGGGGPAGQQLPQLPQSSQLQQQQQQQQQQQQPQPPQPPFPAGGPPARRGGAGAGGGWKLAEEESCREDVTRVCPKHTWSNNLAVLECLQDVREPENEISSDCNHLLWNYKLNLTTDPKFESVAREVCKSTITEIKECADEPVGKGYMVSCLVDHRGNITEYQCHQYITKMTAIIFSDYRLICGFMDDCKNDINILKCGSIRLGEKDAHSQGEVVSCLEKGLVKEAEEREPKIQVSELCKKAILRVAELSSDDFHLDRHLYFACRDDRERFCENTQAGEGRVYKCLFNHKFEESMSEKCREALTTRQKLIAQDYKVSYSLAKSCKSDLKKYRCNVENLPRSREARLSYLLMCLESAVHRGRQVSSECQGEMLDYRRMLMEDFSLSPEIILSCRGEIEHHCSGLHRKGRTLHCLMKVVRGEKGNLGMNCQQALQTLIQETDPGADYRIDRALNEACESVIQTACKHIRSGDPMILSCLMEHLYTEKMVEDCEHRLLELQYFISRDWKLDPVLYRKCQGDASRLCHTHGWNETSEFMPQGAVFSCLYRHAYRTEEQGRRLSRECRAEVQRILHQRAMDVKLDPALQDKCLIDLGKWCSEKTETGQELECLQDHLDDLVVECRDIVGNLTELESEAEREYVFKNLPFKV

SEQ ID NO: 1120 - protein, 458 aa, Homo sapiens [sequence omitted]

SEQ ID NO: 1121 - protein, 238 aa, Homo sapiens
NTFYSWLEGLCVEKRAFYRLISGLHASINVHLSARYLLQETWLEKKWGHNITEFQQRFDGILTEGEGPRRLKNLYFLYLIELRALSKVLPFFERPDFQLFTGNKIQDEENKMLLLEILHEIKSFPLHFDENSFFAGDKKEAHKLKEDFRLHFRNISRIMDCVGCFKCRLWGKLQTQGLGTALKILFSEKLIANMPESGPSYEFHLTRQEIVSLFNAFGRISTSVKELENFRNLLQNIH

SEQ ID NO: 1122 - protein, 1817 aa, Homo sapiens [sequence omitted]

SEQ ID NO: 1123 - protein, 1722 aa, Homo sapiens [sequence omitted]

SEQ ID NO: 1124 - protein, 1722 aa, Homo sapiens
MRTGWATPRRPAGLLMLLFWFFDLAEPSGRAANDPFTIVHGNTGKCIKPVYGWIVADDCDETEDKLWKWVSQHRLFHLHSQKCLGLDITKSVNELRMFSCDSSAMLWWKCEHHSLYGAARYRLALKDGHGTAISNASDVWKKGGSEESLCDQPYHEIYTRDGNSYGRPCEFPFLIDGTWHHDCILDEDHSGPWCATTLNYEYDRKWGICLKPENGCEDNWEKNEQFGSCYQFNTQTALSWKEAYVSCQNQGADLLSINSAAELTYLKEKEGIAKIFWIGLNQLYSARGWEWSDHKPLNFLNWDPDRPSAPTIGGSSCARMDAESGLWQSFSCEAQLPYVCRKPLNNTVELTDVWTYSDTRCDAGWLPNNGFCYLLVNESNSWDKAHAKCKAFSSDLISIHSLADVEVVVTKLHNEDIKEEVWIGLKNINIPTLFQWSDGTEVTLTYWDENEPNVPYNKTPNCVSYLGELGQWKVQSCEEKLKYVCKRKGEKLNDASSDKMCPPDEGWKRHGETCYKIYEDEVPFGTNCNLTITSRFEQEYLNDLMKKYDKSLRKYFWTGLRDVDSCGEYNWATVGGRRRAVTFSNWNFLEPASPGGCVAMSTGKSVGKWEVKDCRSFKALSICKKMSGPLGPEEASPKPDDPCPEGWQSFPASLSCYKVFHAERIVRKRNWEEAERFCQALGAHLSSFSHVDEIKEFLHFLTDQFSGQHWLWIGLNKRSPDLQGSWQWSDRTPVSTIIMPNEFQQDYDIRDCAAVKVFHRPWRRGWHFYDDREFIYLRPFACDTKLEWVCQIPKGRTPKTPDWYNPDRAGIHGPPLIIEGSEYWFVADLHLNYEEAVLYCASNHSFLATITSFVGLKAIKNKIANISGDGQKWWIRISEWPIDDHFTYSRYPWHRFPVTFGEECLYMSAKTWLIDLGKPTDCSTKLPFICEKYNVSSLEKYSPDSAAKVQCSEQWIPFQNKCFLKIKPVSLTFSQASDTCHSYGGTLPSVLSQIEQDFITSLLPDMEATLWIGLRWTAYEKINKWTDNRELTYSNFHPLLVSGRLRIPENFFEEESRYHCALILNLQKSPFTGTWNFTSCSERHFVSLCQKYSEVKSRQTLQNASETVKYLNNLYKIIPKTLTWHSAKRECLKSNMQLVSITDPYQQAFLSVQALLHNSSLWIGLFSQDDELNFGWSDGKRLHFSRWAETNGQLEDCVVLDTDGFWKTVDCNDNQPGAICYYSGNETEKEVKPVDSVKCPSPVLNTPWIPFQNCCYNFIITKNRHMATTQDEVHTKCQKLNPKSHILSIRDEKENNFVLEQLLYFNYMASWVMLGITYRNNSLMWFDKTPLSYTHWRAGRPTIKNEKFLAGLSTDGFWDIQTFKVIEEAVYFHQHSILACKIEMVDYKEEHNTTLPQFMPYEDGIYSVIQKKVTWYEALNMCSQSGGHLASVHNQNGQLFLEDIVKRDGFPLWVGLSSHDGSESSFEWSDGSTFDYIPWKGQTSPGNCVLLDPKGTWKHEKCNSVKDGAICYKPTKSKKLSRLTYSSRCPAAKENGSRWIQYKGHCYKSDQALHSFSEAKKLCSKHDHSATIVSIKDEDENKFVSRLMRENNNITMRVWLGLSQHSVDQSWSWLDGSEVTFVKWENKSKSGVGRCSMLIASNETWKKVECEHGFGRVVCKVPLGPDYTAIAIIVATLSILVLMGGLIWFLFQRHRLHLAGFSSVRYAQGVNEDEIMLPSFHD

SEQ ID NO: 1125 - protein, 1873 aa, Homo sapiens [sequence omitted]

SEQ ID NO: 1126 - protein, 1383 aa, Homo sapiens
MYATDSRGHSPAFLQPQNGNSRHPSGYVPGKVVPLRPPPPPKSQASAKFTSIRREDRATFAFSPEEQQAQRESQKQKRHKNTFICFAITSFSFFIALAIILGISSKYAPDENCPDQNPRLRNWDPGQDSAKQVVIKEGDMLRLTSDATVHSIVIQDGGLLVFGDNKDGSRNITLRTHYILIQDGGALHIGAEKCRYKSKATITLYGKSDEGESMPTFGKKFIGVEAGGTLELHGARKASWTLLARTLNSSGLPFGSYTFEKDFSRGLNVRVIDQDTAKILESERFDTHEYRNESRRLQEFLRFQDPGRIVAIAVGDSAAKSLLQGTIQMIQERLGSELIQGLGYRQAWALVGVIDGGSTSCNESVRNYENHSSGGKALAQREFYTVDGQKFSVTAYSEWIEGVSLSGFRVEVVDGVKLNLLDDVSSWKPGDQIVVASTDYSMYQAEEFTLLPCSECSHFQVKVKETPQFLHMGEIIDGVDMRAEVGILTRNIVIQGEVEDSCYAENQCQFFDYDTFGGHIMIMKNFTSVHLSYVELKHMGQQQMGRYPVHFHLCGDVDYKGGYRHATFVDGLSIHHSFSRCITVHGTNGLLIKDTIGFDTLGHCFFLEDGIEQRNTLFHNLGLLTKPGTLLPTDRNNSMCTTMRDKVFGNYIPVPATDCMAVSTFWIAHPNNNLINNAAAGSQDAGIWYLFHKEPTGESSGLQLLAKPELTPLGIFYNNRVHSNFKAGLFIDKGVKTTNSSAADPREYLCLDNSARFRPHQDANPEKPRVAALIDRLIAFKNNDNGAWVRGGDIIVQNSAFADNGIGLTFASDGSFPSDEGSSQEVSESLFVGESRNYGFQGGQNKYVGTGGIDQKPRTLPRNRTFPIRGFQIYDGPIHLTRSTFKKYVPTPDRYSSAIGFLMKNSWQITPRNNISLVKFGPHVSLNVFFGKPGPWFEDCEMDGDKNSIFHDIDGSVTGYKDAYVGRMDNYLIRHPSCVNVSKWNAVICSGTYAQVYVQTWSTQNLSMTITRDEYPSNPMVLRGINQKAAFPQYQPVVMLEKGYTIHWNGPAPRTTFLYLVNFNKNDWIRVGLCYPSNTSFQVTFGYLQRQNGSLSKIEEYEPVHSLEELQRKQSERKFYFDSSTGLLFLYLKAKSHRHGHSYCSSQGCERVKIQAATDSKDISNCMAKAYPQYYRKPSVVKRMPAMLTGLCQGCGTRQVVFTSDPHKSYLPVQFQSPDKAETQRGDPSVISVNGTDFTFRSAGVLLLVVDPCSVPFRLTEKTVFPLADVSRIEEYLKTGIPPRSIVLLSTRGEIKQLNISHLLVPLGLAKPAHLYDKGSTIFLGFSGNFKPSWTKLFTSPAGQGLGVLEQFIPLQLDEYGCPRATTVRRRDLELLKQASKAH

SEQ ID NO: 1127 - protein, 1383 aa, Homo sapiens; identical to SEQ ID NO: 1126

SEQ ID NO: 1128 - protein, 1191 aa, Homo sapiens
MVGRFILEQKNAAINPKRQLPCMASQMKFIGVEAGGTLELHGARKASWTLLARTLNSSGLPFGSYTFEKDFSRGLNVRVIDQDTAKILESERFDTHEYRNESRRLQEFLRFQDPGRIVAIAVGDSAAKSLLQGTIQMIQERLGSELIQGLGYRQAWALVGVIDGGSTSCNESVRNYENHSSGGKALAQREFYTVDGQKFSVTAYSEWIEGVSLSGFRVEVVDGVKLNLLDDVSSWKPGDQIVVASTDYSMYQAEEFTLLPCSECSHFQVKVKETPQFLHMGEIIDGVDMRAEVGILTRNIVIQGEVEDSCYAENQCQFFDYDTFGGHIMIMKNFTSVHLSYVELKHMGQQQMGRYPVHFHLCGDVDYKGGYRHATFVDGLSIHHSFSRCITVHGTNGLLIKDTIGFDTLGHCFFLEDGIEQRNTLFHNLGLLTKPGTLLPTDRNNSMCTTMRDKVFGNYIPVPATDCMAVSTFWIAHPNNNLINNAAAGSQDAGIWYLFHKEPTGESSGLQLLAKPELTPLGIFYNNRVHSNFKAGLFIDKGVKTTNSSAADPREYLCLDNSARFRPHQDANPEKPRVAALIDRLIAFKNNDNGAWVRGGDIIVQNSAFADNGIGLTFASDGSFPSDEGSSQEVSESLFVGESRNYGFQGGQNKYVGTGGIDQKPRTLPRNRTFPIRGFQIYDGPIHLTRSTFKKYVPTPDRYSSAIGFLMKNSWQITPRNNISLVKFGPHVSLNVFFGKPGPWFEDCEMDGDKNSIFHDIDGSVTGYKDAYVGRMDNYLIRHPSCVNVSKWNAVICSGTYAQVYVQTWSTQNLSMTITRDEYPSNPMVLRGINQKAAFPQYQPVVMLEKGYTIHWNGPAPRTTFLYLVNFNKNDWIRVGLCYPSNTSFQVTFGYLQRQNGSLSKIEEYEPVHSLEELQRKQSERKFYFDSSTGLLFLYLKAKSHRHGHSYCSSQGCERVKIQAATDSKDISNCMAKAYPQYYRKPSVVKRMPAMLTGLCQGCGTRQVVFTSDPHKSYLPVQFQSPDKAETQRGDPSVISVNGTDFTFRSAGVLLLVVDPCSVPFRLTEKTVFPLADVSRIEEYLKTGIPPRSIVLLSTRGEIKQLNISHLLVPLGLAKPAHLYDKGSTIFLGFSGNFKPSWTKLFTSPAGQGLGVLEQFIPLQLDEYGCPRATTVRRRDLELLKQASKAH

SEQ ID NO: 1129 - protein, 534 aa, Homo sapiens
MIWYILIIGILLPQSLAHPGFFTSIGQMTDLIHTEKDLVTSLKDYIKAEEDKLEQIKKWAEKLDRLTSTATKDPEGFVGHPVNAFKLMKRLNTEWSELENLVLKDMSDGFISNLTIQRQYFPNDEDQVGAAKALLRLQDTYNLDTDTISKGNLPGVKHKSFLTAEDCFELGKVAYTEADYYHTELWMEQALRQLDEGEISTIDKVSVLDYLSYAVYQQGDLDKALLLTKKLLELDPEHQRANGNLKYFEYIMAKEKDVNKSASDDQSDQKTTPKKKGVAVDYLPERQKYEMLCRGEGIKMTPRRQKKLFCRYHDGNRNPKFILAPAKQEDEWDKPRIIRFHDIISDAEIEIVKDLAKPRLRRATISNPITGDLETVHYRISKSAWLSGYENPVVSRINMRIQDLTGLDVSTAEELQVANYGVGGQYEPHFDFARKDEPDAFKELGTGNRIATWLFYMSDVSAGGATVFPEVGASVWPKKGTAVFWYNLFASGEGDYSTRHAACPVLVGNKWVSNKWLHERGQEFRRPCTLSELE

SEQ ID NO: 1130 - protein, 534 aa, Homo sapiens
MIWYILIIGILLPQSLAHPGFFTSIGQMTDLIHTEKDLVTSLKDYIKAEEDKLEQIKKWAEKLDRLTSTATKDPEGFVGHPVNAFKLMKRLNTEWSELENLVLKDMSDGFISNLTIQRQYFPNDEDQVGAAKALLRLQDTYNLDTDTISKGNLPGVKHKSFLTAEDCFELGKVAYTEADYYHTELWMEQALRQLDEGEISTIDKVSVLDYLSYAVYQQGDLDKALLLTKKLLELDPEHQRANGNLKYFEYIMAKEKDVNKSASDDQSDQKTTPKKKGVAVDYLPERQKYEMLCRGEGIKMTPRRQKKLFCRYHDGNRNPKFILAPAKQEDEWDKPRIIRFHDIISDAEIEIVKDLAKPRLSRATVHDPETGKLTTAQYRVSKSAWLSGYENPVVSRINMRIQDLTGLDVSTAEELQVANYGVGGQYEPHFDFARKDEPDAFKELGTGNRIATWLFYMSDVSAGGATVFPEVGASVWPKKGTAVFWYNLFASGEGDYSTRHAACPVLVGNKWVSNKWLHERGQEFRRPCTLSELE

SEQ ID NO: 1131 - protein, 534 aa, Homo sapiens; identical to SEQ ID NO: 1129

SEQ ID NO: 1132 - protein, 534 aa, Homo sapiens; identical to SEQ ID NO: 1129

SEQ ID NO: 1133 - protein, 534 aa, Homo sapiens; identical to SEQ ID NO: 1130

SEQ ID NO: 1134 - protein, 190 aa, Homo sapiens
MRVTAPRTLLLLLWGAVALTETWALPLHEVFLHRHVPARPRGAPLHCSGLRGRHPVREVRQRRRESEDGAPGAMDRAGGAGVLGPEHTDLQDQHTDLPREPADRAPLLQPERGRSHIIQRMYACDVGPDGRLLRGYDQDAYDGKDYIALNEDLSSWTAADTAAQITQRKWEAARVAEQDRAYLEGLCVES

SEQ ID NO: 1135 - protein, 5405 aa, Homo sapiens; identical to SEQ ID NO: 440

SEQ ID NO: 1136 - protein, 2843 aa, Homo sapiens; identical to SEQ ID NO: 441

SEQ ID NO: 1137 - protein, 543 aa, Homo sapiens [sequence omitted]

SEQ ID NO: 1138 - protein, 280 aa, Homo sapiens
MAPSGSLAVPLAVLVLLLWGAPWTHGRRSNVRVITDENWRELLEGDWMIEFYAPWCPACQNLQPEWESFAEWGEDLEVNIAKVDVTEQPGLSGRFIITALPTIYHCKDGEFRRYQGPRTKKDFINFISDKEWKSIEPVSSWFGPGSVLMSSMSALFQLSMWIRTCHNYFIEDLGLPVWGSYTVFALATLFSGLLLGLCMIFVADCLCPSKRRRPQPYPYPSKKLLSESAQPLKKVEEEQEADEEDVSEEEAESKEGTNKDFPQNAIRQRSLGPSLATDKS

SEQ ID NO: 1139 - protein, 280 aa, Homo sapiens; identical to SEQ ID NO: 1138

SEQ ID NO: 1140 - protein, 608 aa, Homo sapiens
MAASKPVEAAVVAAAVPSSGSGVGGGGTAGPGTGGLPRWQLALAVGAPLLLGAGAIYLWSRQQRRREARGRGDASGLKRNSERKTPEGRASPAPGSGHPEGPGAHLDMNSLDRAQAAKNKGNKYFKAGKYEQAIQCYTEAISLCPTEKNVDLSTFYQNRAAAFEQLQKWKEVAQDCTKAVELNPKYVKALFRRAKAHEKLDNKKECLEDVTAVCILEGFQNQQSMLLADKVLKLLGKEKAKEKYKNREPLMPSPQFIKSYFSSFTDDIISQPMLKGEKSDEDKDKEGEALEVKENSGYLKAKQYMEEENYDKIISECSKEIDAEGKYMAEALLLRATFYLLIGNANAAKPDLDKVISLKEANVKLRANALIKRGSMYMQQQQPLLSTQDFNMAADIDPQNADVYHHRGQLKILLDQVEEAVADFDECIRLRPESALAQAQKCFALYRQAYTGNNSSQIQAAMKGFEEVIKKFPRCAEGYALYAQALTDQQQFGKADEMYDKCIDLEPDNATTYVHKGLLQLQWKQDLDRGLELISKAIEIDNKCDFAYETMGTIEVQRGNMEKAIDMFNKAINLAKSEMEMAHLYSLCDAAHAQTEVAKKYGLKPPTL

SEQ ID NO: 1141 - protein, 608 aa, Homo sapiens; identical to SEQ ID NO: 1140

SEQ ID NO: 1142 - protein, 608 aa, Homo sapiens; identical to SEQ ID NO: 1140

SEQ ID NO: 1143 - protein, 227 aa, Homo sapiens
MRVAGAAKLVVAVAVFLLTFYVISQVFEIKMDASLGNLFARSALDTAARSTKPPRYKCGISKACPEKHFAFKMASGAANVVGPKICLEDNVLMSGVKNNVGRGINVALANGKTGEVLDTKYFDMWGGDVAPFIEFLKAIQDGTIVLMGTYDDGATKLNDEARRLIADLGSTSITNLGFRDNWVFCGGKGIKTKSPFEQHIKNNKDTNKYEGWPEVVEMEGCIPQKQD

SEQ ID NO: 1144 - protein, 917 aa, Homo sapiens
MIASHLLAYFFTELNHDQVQKVDQYLYHMRLSDETLLEISKRFRKEMEKGLGATTHPTAAVKMLPTFVRSTPDGTEHGEFLALDLGGTNFRVLWVKVTDNGLQKVEMENQIYAIPEDIMRGSGTQLFDHIAECLANFMDKLQIKDKKLPLGFTFSFPCHQTKLDESFLVSWTKGFKSSGVEGRDVVALIRKAIQRRGDFDIDIVAVVNDTVGTMMTCGYDDHNCEIGLIVGTGSNACYMEEMRHIDMVEGDEGRMCINMEWGAFGDDGSLNDIRTEFDQEIDMGSLNPGKQLFEKMISGMYMGELVRLILVKMAKEELLFGGKLSPELLNTGRFETKDISDIEGEKDGIRKAREVLMRLGLDPTQEDCVATHRICQIVSTRSASLCAATLAAVLQRIKENKGEERLRSTIGVDGSVYKKHPHFAKRLHKTVRRLVPGCDVRFLRSEDGSGKGAAMVTAVAYRLADQHRARQKTLEHLQLSHDQLLEVKRRMKVEMERGLSKETHASAPVKMLPTYVCATPDGTEKGDFLALDLGGTNFRVLLVRVRNGKWGGVEMHNKIYAIPQEVMHGTGDELFDHIVQCIADFLEYMGMKGVSLPLGFTFSFPCQQNSLDESILLKWTKGFKASGCEGEDVVTLLKEAIHRREEFDLDVVAVVNDTVGTMMTCGFEDPHCEVGLIVGTGSNACYMEEMRNVELVEGEEGRMCVNMEWGAFGDNGCLDDFRTEFDVAVDELSLNPGKQRFEKMISGMYLGEIVRNILIDFTKRGLLFRGRISERLKTRGIFETKFLSQIESDCLALLQVRAILQHLGLESTCDDSIIVKEVCTVVARRAAQLCGAGMAAVVDRIRENRGLDALKVTVGVDGTLYKLHPHFAKVMHETVKDLAPKCDVSFLQSEDGSGKGAALITAVACRIREAGQR

SEQ ID NO: 1145 - protein, 34 aa, Homo sapiens
HCPPPPQNFCSRAALEALGSCLNNKYSEGYPGKR

SEQ ID NO: 1146 - protein, 34 aa, Homo sapiens; identical to SEQ ID NO: 1145

SEQ ID NO: 1147 - protein, 1158 aa, Homo sapiens
MAAVRGAPLLSCLLALLALCPGGRPQTVLTDDEIEEFLEGFLSELEPEPREDDVEAPPPPEPTPRVRKAQAGGKPGKRPGTAAEVPPEKTKDKGKKGKKDKGPKVPKESLEGSPRPPKKGKEKPPKATKKPKEKPPKATKKPKEKPPKATKKPKEKPPKATKKPPSGKRPPILAPSETLEWPLPPPPSPGPEELPQEGGAPLSNNWQNPGEETHVEAREHQPEPEEETEQPTLDYNDQIEREDYEDFEYIRRQKQPRPPPSRRRRPERVWPEPPEEKAPAPAPEERIEPPVKPLLPPLPPDYGDGYVIPNYDDMDYYFGPPPPQKPDAERQTDEEKEELKKPKKEDSSPKEETDKWAVEKGKDHKEPRKGEELEEEWTPTEKVKCPPIGMESHRIEDNQIRASSMLRHGLGAQRGRLNMQTGATEDDYYDGAWCAEDDARTQWIEVDTRRTTRFTGVITQGRDSSIHDDFVTTFFVGFSNDSQTWVMYTNGYEEMTFHGNVDKDTPVLSELPEPVVARFIRIYPLTWNGSLCMRLEVLGCSVAPVYSYYAQNEVVATDDLDFRHHSYKDMRQLMKVVNEECPTITRTYSLGKSSRGLKIYAMEISDNPGEHELGEPEFRYTAGIHGNEVLGRELLLLLMQYLCREYRDGNPRVRSLVQDTRIHLVPSLNPDGYEVAAQMGSEFGNWALGLWTEEGFDIFEDFPDLNSVLWGAEERKWVPYRVPNNNLPIPERYLSPDATVSTEVRAIIAWMEKNPFVLGANLNGGERLVSYPYDMARTPTQEQLLAAAMAAARGEDEDEVSEAQETPDHAIFRWLAISFASAHLTLTEPYRGGCQAQDYTGGMGIVNGAKWNPRTGTINDFSYLHTNCLELSFYLGCDKFPHESELPREWENNKEALLTFMEQVHRGIKGVVTDEQGIPIANATISVSGINHGVKTASGGDYWRILNPGEYRVTAHAEGYTPSAKTCNVDYDIGATQCNFILARSNWKRIREIMAMNGNRPIPHIDPSRPMTPQQRRLQQRRLQHRLRLRAQMRLRRLNATTTLGPHTVPPTLPPAPATTLSTTIEPWGLIPPTTAGWEESETETYTEVVTEFGTEVEPEFGTKVEPEFETQLEPEFETQLEPEFEEEEEEEKEEEIATGQAFPFTTVETYTVNFGDF

SEQ ID NO: 1148 - protein, 1158 aa, Homo sapiens; identical to SEQ ID NO: 1147

SEQ ID NO: 1149 - protein, 704 aa, Homo sapiens
MARELRALLLWGRRLRPLLRAPALAAVPGGKPILCPRRTTAQLGPRRNPAWSLQAGRLFSTQTAEDKEEPLHSIISSTESVQGSTSKHEFQAETKKLLDIVARSLYSEKEVFIRELISNASDALEKLRHKLVSDGQALPEMEIHLQTNAEKGTITIQDTGIGMTQEELVSNLGTIARSGSKAFLDALQNQAEASSKIIGQFGVGFYSAFMVADRVEVYSRSAAPGSLGYQWLSDGSGVFEIAEASGVRTGTKIIIHLKSDCKEFSSEARVRDVVTKYSNFVSFPLYLNGRRMNTLQAIWMMDPKDVGEWQHEEFYRYVAQAHDKPRYTLHYKTDAPLNIRSIFYVPDMKPSMFDVSRELGSSVALYSRKVLIQTKATDILPKWLRFIRGVVDSEDIPLNLSRELLQESALIRKLRDVLQQRLIKFFIDQSKKDAEKYAKFFEDYGLFMREGIVTATEQEVKEDIAKLLRYESSALPSGQLTSLSEYASRMRAGTRNIYYLCAPNRHLAEHSPYYEAMKKKDTEVLFCFEQFDELTLLHLREFDKKKLISVETDIVVDHYKEEKFEDRSPAAECLSEKETEELMAWMRNVLGSRVTNVKVTLRLDTHPAMVTVLEMGAARHFLRMQQLAKTQEERAQLLQPTLEINPRHALIKKLNQLRASEPGLAQLLVDQIYENAMIAAGLVDDPRAMVGRLNELLVKALERH

SEQ ID NO: 1150 - protein, 704 aa, Homo sapiens
MARELRALLLWGRRLRPLLRAPALAAVPGGKPILCPRRTTAQLGPRRNPAWSLQAGRLFSTQTAEDKEEPLHSIISSTESVQGSTSKHEFQAETKKLLDIVARSLYSEKEVFIRELISNASDALEKLRHKLVSDGQALPEMEIHLQTNAEKGTITIQDTGIGMTQEELVSNLGTIARSGSKAFLDALQNQAEASSKIIGQFGVGFYSAFMVADRVEVYSRSAAPGSLGYQWLSDGSGVFEIAEASGVRTGTKIIIHLKSDCKEFSSEARVRDVVTKYSNFVSFPLYLNGRRMNTLQAIWMMDPKDVREWQHEEFYRYVAQAHDKPRYTLHYKTDAPLNIRSIFYVPDMKPSMFDVSRELGSSVALYSRKVLIQTKATDILPKWLRFIRGVVDSEDIPLNLSRELLQESALIRKLRDVLQQRLIKFFIDQSKKDAEKYAKFFEDYGLFMREGIVTATEQEVKEDIAKLLRYESSALPSGQLTSLSEYASRMRAGTRNIYYLCAPNRHLAEHSPYYEAMKKKDTEVLFCFEQFDELTLLHLREFDKKKLISVETDIVVDHYKEEKFEDRSPAAECLSEKETEELMAWMRNVLGSRVTNVKVTLRLDTHPAMVTVLEMGAARHFLRMQQLAKTQEERAQLLQPTLEINPRHALIKKLNQLRASEPGLAQLLVDQIYENAMIAAGLVDDPRAMVGRLNELLVKALERH

SEQ ID NO: 1151 - protein, 704 aa, Homo sapiens; identical to SEQ ID NO: 1150

SEQ ID NO: 1152 - protein, 698 aa, Homo sapiens
MARELRALLLWGRRLRPLLRAPALAAVPGGKPILCPRRTTAQLGPRRNPAWSLQAGRLFSTQTAEDKEEPLHSIISSSTSKHEFQAETKKLLDIVARSLYSEKEVFIRELISNASDALEKLRHKLVSDGQALPEMEIHLQTNAEKGTITIQDTGIGMTQEELVSNLGTIARSGSKAFLDALQNQAEASSKIIGQFGVGFYSAFMVADRVEVYSRSAAPGSLGYQWLSDGSGVFEIAEASGVRTGTKIIIHLKSDCKEFSSEARVRDVVTKYSNFVSFPLYLNGRRMNTLQAIWMMDPKDVREWQHEEFYRYVAQAHDKPRYTLHYKTDAPLNIRSIFYVPDMKPSMFDVSRELGSSVALYSRKVLIQTKATDILPKWLRFIRGVVDSEDIPLNLSRELLQESALIRKLRDVLQQRLIKFFIDQSKKDAEKYAKFFEDYGLFMREGIVTATEQEVKEDIAKLLRYESSALPSGQLTSLSEYASRMRAGTRNIYYLCAPNRHLAEHSPYYEAMKKKDTEVLFCFEQFDELTLLHLREFDKKKLISVETDIVVDHYKEEKFEDRSPAAECLSEKETEELMAWMRNVLGSRVTNVKVTLRLDTHPAMVTVLEMGAARHFLRMQQLAKTQEERAQLLQPTLEINPRHALIKKLNQLRASEPGLAQLLVDQIYENAMIAAGLVDDPRAMVGRLNELLVKALERH

SEQ ID NO: 1153 - protein, 495 aa, Homo sapiens
MVADRVEVYSRSAAPGSLGYQWLSDGSGVFEIAEASGVRTGTKIIIHLKSDCKEFSSEARVRDVVTKYSNFVSFPLYLNGRRMNTLQAIWMMDPKDVREWQHEEFYRYVAQAHDKPRYTLHYKTDAPLNIRSIFYVPDMKPSMFDVSRELGSSVALYSRKVLIQTKATDILPKWLRFIRGVVDSEDIPLNLSRELLQESALIRKLRDVLQQRLIKFFIDQSKKDAEKYAKFFEDYGLFMREGIVTATEQEVKEDIAKLLRYESSALPSGQLTSLSEYASRMRAGTRNIYYLCAPNRHLAEHSPYYEAMKKKDTEVLFCFEQFDELTLLHLREFDKKKLISVETDIVVDHYKEEKFEDRSPAAECLSEKETEELMAWMRNVLGSRVTNVKVTLRLDTHPAMVTVLEMGAARHFLRMQQLAKTQEERAQLLQPTLEINPRHALIKKLNQLRASEPGLAQLLVDQIYENAMIAAGLVDDPRAMVGRLNELLVKALERH

SEQ ID NO: 1154 - protein, 564 aa, Homo sapiens
MEIHLQTNAEKGTITIQDTGIGMTQEELVSNLGTIARSGSKAFLDALQNQAEASSKIIGQFGVGFYSAFMVADRVEVYSRSAAPGSLGYQWLSDGSGVFEIAEASGVRTGTKIIIHLKSDCKEFSSEARVRDVVTKYSNFVSFPLYLNGRRMNTLQAIWMMDPKDVREWQHEEFYRYVAQAHDKPRYTLHYKTDAPLNIRSIFYVPDMKPSMFDVSRELGSSVALYSRKVLIQTKATDILPKWLRFIRGVVDSEDIPLNLSRELLQESALIRKLRDVLQQRLIKFFIDQSKKDAEKYAKFFEDYGLFMREGIVTATEQEVKEDIAKLLRYESSALPSGQLTSLSEYASRMRAGTRNIYYLCAPNRHLAEHSPYYEAMKKKDTEVLFCFEQFDELTLLHLREFDKKKLISVETDIVVDHYKEEKFEDRSPAAECLSEKETEELMAWMRNVLGSRVTNVKVTLRLDTHPAMVTVLEMGAARHFLRMQQLAKTQEERAQLLQPTLEINPRHALIKKLNQLRASEPGLAQLLVDQIYENAMIAAGLVDDPRAMVGRLNELLVKALERH

SEQ ID NO: 1155 - protein, 724 aa, Homo sapiens
MPEEVHHGEEEVETFAFQAEIAQLMSLIINTFYSNKEIFLRELISNASDALDKIRYESLTDPSKLDSGKELKIDIIPNPQERTLTLVDTGIGMTKADLINNLGTIAKSGTKAFMEALQAGADISMIGQFGVGFYSAYLVAEKVVVITKHNDDEQYAWESSAGGSFTVRADHGEPIGRGTKVILHLKEDQTEYLEERRVKEVVKKHSQFIGYPITLYLEKEREKEISDDEAEEEKGEKEEEDKDDEEKPKIEDVGSDEEDDSGKDKKKKTKKIKEKYIDQEELNKTKPIWTRNPDDITQEEYGEFYKSLTNDWEDHLAVKHFSVEGQLEFRALLFIPRRAPFDLFENKKKKNNIKLYVRRVFIMDSCDELIPEYLNFIRGVVDSEDLPLNISREMLQQSKILKVIRKNIVKKCLELFSELAEDKENYKKFYEAFSKNLKLGIHEDSTNRRRLSELLRYHTSQSGDEMTSLSEYVSRMKETQKSIYYITGESKEQVANSAFVERVRKRGFEVVYMTEPIDEYCVQQLKEFDGKSLVSVTKEGLELPEDEEEKKKMEESKAKFENLCKLMKEILDKKVEKVTISNRLVSSPCCIVTSTYGWTANMERIMKAQALRDNSTMGYMMAKKHLEINPDHPIVETLRQKAEADKNDKAVKDLVVLLFETALLSSGFSLEDPQTHSNRIYRMIKLGLGIDEDEVAAEEPNAAVPDEIPPLEGDEDASRMEEVD

SEQ ID NO: 1156 - protein, 723 aa, Homo sapiens
PEEVHHGEEEVETFAFQAEIAQLMSLIINTFYSNKEIFLRELISNASDALDKIRYESLTDPSKLDSGKELKIDIIPNPQERTLTLVDTGIGMTKADLINNLGTIAKSGTKAFMEALQAGADISMIGQFGVGFYSAYLVAEKVVVITKHNDDEQYAWESSAGGSFTVRADHGEPIGRGTKVILHLKEDQTEYLEERRVKEVVKKHSQFIGYPITLYLEKEREKEISDDEAEEEKGEKEEEDKDDEEKPKIEDVGSDEEDDSGKDKKKKTKKIKEKYIDQEELNKTKPIWTRNPDDITQEEYGEFYKSLTNDWEDHLAVKHFSVEGQLEFRALLFIPRRAPFDLFENKKKKNNIKLYVRRVFIMDSCDELIPEYLNFIRGVVDSEDLPLNISREMLQQSKILKVIRKNIVKKCLELFSELAEDKENYKKFYEAFSKNLKLGIHEDSTNRRRLSELLRYHTSQSGDEMTSLSEYVSRMKETQKSIYYITGESKEQVANSAFVERVRKRGFEVVYMTEPIDEYCVQQLKEFDGKSLVSVTKEGLELPEDEEEKKKMEESKAKFENLCKLMKEILDKKVEKVTISNRLVSSPCCIVTSTYGWTANMERIMKAQALRDNSTMGYMMAKKHLEINPDHPIVETLRQKAEADKNDKAVKDLVVLLFETALLSSGFSLEDPQTHSNRIYRMIKLGLGIDEDEVAAEEPNAAVPDEIPPLEGDEDASRMEEVD

SEQ ID NO: 1157 - protein, 724 aa, Homo sapiens; identical to SEQ ID NO: 1155

SEQ ID NO: 1158 - protein, 724 aa, Homo sapiens; identical to SEQ ID NO: 1155

SEQ ID NO: 1159 - protein, 240 aa, Homo sapiens
RDIFEKTYETTLEKCCAAADPHECYAKVFDEFKPLVEEPQNLIKQNCELFEQLGEYKFQNALLVRYTKKVPQVSTPTLVEVSRNLGKVGSKCCKHPEAKRMPCAEDYLSVVLNQLCVLHEKTPVSDRVTKCCTESLVNRRPCFSALEVDETYVPKEFNAETFTFHADICTLSEKERQIKKQTALVELVKHKPKATKEQLKAVMDDFAAFVEKCCKADDKETCFAEEGKKLVAASQAALGL

SEQ ID NO: 1160 - protein, 257 aa, Homo sapiens
MFLYEYARRHPDYSVVLLLRLAKTYETTLEKCCAAADPHECYAKVFDEFKPLVEEPQNLIKQNCELFEQLGEYKFQNALLVRYTKKVPQVSTPTLVEVSRNLGKVGSKCCKHPEAKRMPCAEDYLSVVLNQLCVLHEKTPVSDRVTKCCTESLVNRRPCFSALEVDETYVPKEFNAETFTFHADICTLSEKERQIKKQTALVELVKHKPKATKEQLKAVMDDFAAFVEKCCKADDKETCFAEEGKKLVAASQAALGL

SEQ ID NO: 1161 - protein, 401 aa, Homo sapiens
MKWVTFISLLFLFSSAYSRGVFRRDAHKSEVAHRFKDLGEENFKALVLIAFAQYLQQCPFEDHVKLVNEVTEFAKTCVADESAENCDKSLHTLFGDKLCTVATLRETYGEMADCCAKQEPERNECFLQHKDDNPNLPRLVRPEVDVMCTAFHDNEETFLKKFLYEYARRHPDYSVCCAAADPHECYAKVFDEFKPLVEEPQNLIKQNCELFEQLGEYKFQNALLVRYTKKVPQVSTPTLVEVSRNLGKVGSKCCKHPEAKRMPCAEDYLSVVLNQLCVLHEKTPVSDRVTKCCTESLVNRRPCFSALEVDETYVPKEFNAETFTFHADICTLSEKERQIKKQTALVELVKHKPKATKEQLKAVMDDFAAFVEKCCKADDKETCFAEEGKKLVAASQAALGL

SEQ ID NO: 1162 - protein, 257 aa, Homo sapiens; identical to SEQ ID NO: 1160

SEQ ID NO: 1163 - protein, 524 aa, Homo sapiens [sequence omitted]

SEQ ID NO: 1164 - protein, 574 aa, Homo sapiens [sequence omitted]

SEQ ID NO: 1165 - protein, 574 aa, Homo sapiens
MCPRAARAPATLLLALGAVLWPAAGAWELTILHTNDVHSRLEQTSEDSSKCVNASRCMGGVARLFTKVQQIRRAEPNVLLLDAGDQYQGTIWFTVYKGAEVAHFMNALRYDAMALGNHEFDNGVEGLIEPLLKEAKFPILSANIKAKGPLASQISGLYLPYKVLPVGDEVVGIVGYTSKETPFLSNPGTNLVFEDEITALQPEVDKLKTLNVNKIIALGHSGFEMDKLIAQKVRGVDVVVGGHSNTFLYTGNPPSKEVPAGKYPFIVTSDDGRKVPVVQAYAFGKYLGYLKIEFDERGNVISSHGNPILLNSSIPEDPSIKADINKWRIKLDNYSTQELGKTIVYLDGSSQSCRFRECNMGNLICDAMINNNLRHTDEMFWNHVSMCILNGGGIRSPIDERNNGTITWENLAAVLPFGGTFDLVQLKGSTLKKAFEHSVHRYGQSTGEFLQVGGIHVVYDLSRKPGDRVVKLDVLCTKCRVPSYDPLKMDEVYKVILPNFLANGGDGFQMIKDELLRHDSGDQDINVVSTYISKMKVIYPAVEGRIKFSTGSHCHGSFSLIFLSLWAVIFVLYQ

SEQ ID NO: 1166 - protein, 1960 aa, Homo sapiens
MAQQAADKYLYVDKNFINNPLAQADWAAKKLVWVPSDKSGFEPASLKEEVGEEAIVELVENGKKVKVNKDDIQKMNPPKFSKVEDMAELTCLNEASVLHNLKERYYSGLIYTYSGLFCVVINPYKNLPIYSEEIVEMYKGKKRHEMPPHIYAITDTAYRSMMQDREDQSILCTGESGAGKTENTKKVIQYLAYVASSHKSKKDQGELERQLLQANPILEAFGNAKTVKNDNSSRFGKFIRINFDVNGYIVGANIETYLLEKSRAIRQAKEERTFHIFYYLLSGAGEHLKTDLLLEPYNKYRFLSNGHVTIPGQQDKDMFQETMEAMRIMGIPEEEQMGLLRVISGVLQLGNIVFKKERNTDQASMPDNTAAQKVSHLLGINVTDFTRGILTPRIKVGRDYVQKAQTKEQADFAIEALAKATYERMFRWLVLRINKALDKTKRQGASFIGILDIAGFEIFDLNSFEQLCINYTNEKLQQLFNHTMFILEQEEYQREGIEWNFIDFGLDLQPCIDLIEKPAGPPGILALLDEECWFPKATDKSFVEKVMQEQGTHPKFQKPKQLKDKADFCIIHYAGKVDYKADEWLMKNMDPLNDNIATLLHQSSDKFVSELWKDVDRIIGLDQVAGMSETALPGAFKTRKGMFRTVGQLYKEQLAKLMATLRNTNPNFVRCIIPNHEKKAGKLDPHLVLDQLRCNGVLEGIRICRQGFPNRVVFQEFRQRYEILTPNSIPKGFMDGKQACVLMIKALELDSNLYRIGQSKVFFRAGVLAHLEEERDLKITDVIIGFQACCRGYLARKAFAKRQQQLTAMKVLQRNCAAYLKLRNWQWWRLFTKVKPLLQVSRQEEEMMAKEEELVKVREKQLAAENRLTEMETLQSQLMAEKLQLQEQLQAETELCAEAEELRARLTAKKQELEEICHDLEARVEEEEERCQHLQAEKKKMQQNIQELEEQLEEEESARQKLQLEKVTTEAKLKKLEEEQIILEDQNCKLAKEKKLLEDRIAEFTTNLTEEEEKSKSLAKLKNKHEAMITDLEERLRREEKQRQELEKTRRKLEGDSTDLSDQIAELQAQIAELKMQLAKKEEELQAALARVEEEAAQKNMALKKIRELESQISELQEDLESERASRNKAEKQKRDLGEELEALKTELEDTLDSTAAQQELRSKREQEVNILKKTLEEEAKTHEAQIQEMRQKHSQAVEELAEQLEQTKRVKANLEKAKQTLENERGELANEVKVLLQGKGDSEHKRKKVEAQLQELQVKFNEGERVRTELADKVTKLQVELDNVTGLLSQSDSKSSKLTKDFSALESQLQDTQELLQEENRQKLSLSTKLKQVEDEKNSFREQLEEEEEAKHNLEKQIATLHAQVADMKKKMEDSVGCLETAEEVKRKLQKDLEGLSQRHEEKVAAYDKLEKTKTRLQQELDDLLVDLDHQRQSACNLEKKQKKFDQLLAEEKTISAKYAEERDRAEAEAREKETKALSLARALEEAMEQKAELERLNKQFRTEMEDLMSSKDDVGKSVHELEKSKRALEQQVEEMKTQLEELEDELQATEDAKLRLEVNLQAMKAQFERDLQGRDEQSEEKKKQLVRQVREMEAELEDERKQRSMAVAARKKLEMDLKDLEAHIDSANKNRDEAIKQLRKLQAQMKDCMRELDDTRASREEILAQAKENEKKLKSMEAEMIQLQEELAAAERAKRQAQQERDELADEIANSSGKGALALEEKRRLEARIAQLEEELEEEQGNTELINDRLKKANLQIDQINTDLNLERSHAQKNENARQQLERQNKELKVKLQEMEGTVKSKYKASITALEAKIAQLEEQLDNETKERQAACKQVRRTEKKLKDVLLQVDDERRNAEQYKDQADKASTRLKQLKRQLEEAEEEAQRANASRRKLQRELEDATETADAMNREVSSLKNKLRRGDLPFVVPRRMARKGAGDGSDEEVDGKADGAEAKPAE

SEQ ID NO: 1167 - protein, 1960 aa, Homo sapiens; identical to SEQ ID NO: 1166

SEQ ID NO: 1168 - protein, 1960 aa, Homo sapiens; identical to SEQ ID NO: 1166

SEQ ID NO: 1169 - protein, 309 aa, Homo sapiens [sequence omitted]

SEQ ID NO: 1170 - protein, 232 aa, Homo sapiens [sequence omitted]

SEQ ID NO: 1171 - protein, 124 aa, Homo sapiens
MLYVQNQTPGLFPKLVSPCLAQSAVDTSNPCSCCGQNSVIPHSFTALKPTSSLEMPSPPPSKCIQTPPFLRHLADHTLVLSTLGSCLDAPSSLLPGLPCPAPVCSPRTAARGSCNTCVCFFGLL

SEQ ID NO: 1172 - protein, 2977 aa, Homo sapiens
MRKHRHLPLVAVFCLFLSGFPTTHAQQQQADVKNGAAADIIFLVDSSWTIGEEHFQLVREFLYDVVKSLAVGENDFHFALVQFNGNPHTEFLLNTYRTKQEVLSHISNMSYIGGTNQTGKGLEYIMQSHLTKAAGSRAGDGVPQVIVVLTDGHSKDGLALPSAELKSADVNVFAIGVEDADEGALKEIASEPLNMHMFNLENFTSLHDIVGNLVSCVHSSVSPERAGDTETLKDITAQDSADIIFLIDGSNNTGSVNFAVILDFLVNLLEKLPIGTQQIRVGVVQFSDEPRTMFSLDTYSTKAQVLGAVKALGFAGGELANIGLALDFVVENHFTRAGGSRVEEGVPQVLVLISAGPSSDEIRYGVVALKQASVFSFGLGAQAASRAELQHIATDDNLVFTVPEFRSFGDLQEKLLPYIVGVAQRHIVLKPPTIVTQVIEVNKRDIVFLVDGSSALGLANFNAIRDFIAKVIQRLEIGQDLIQVAVAQYADTVRPEFYFNTHPTKREVITAVRKMKPLDGSALYTGSALDFVRNNLFTSSAGYRAAEGIPKLLVLITGGKSLDEISQPAQELKRSSIMAFAIGNKGADQAELEEIAFDSSLVFIPAEFRAAPLQGMLPGLLAPLRTLSGTPEESKRDILFLFDGSANLVGQFPVVRDFLYKIIDELNVKPEGTRIAVAQYSDDVKVESRFDEHQSKPEILNLVKRMKIKTGKALNLGYALDYAQRYIFVKSAGSRIEDGVLQFLVLLVAGRSSDRVDGPASNLKQSGVVPFIFQAKNADPAELEQIVLSPAFILAAESLPKIGDLHPQIVNLLKSVHNGAPAPVSGEKDVVFLLDGSEGVRSGFPLLKEFVQRVVESLDVGQDRVRVAVVQYSDRTRPEFYLNSYMNKQDVVNAVRQLTLLGGPTPNTGAALEFVLRNILVSSAGSRITEGVPQLLIVLTADRSGDDVRNPSVVVKRGGAVPIGIGIGNADITEMQTISFIPDFAVAIPTFRQLGTVQQVISERVTQLTREELSRLQPVLQPLPSPGVGGKRDVVFLIDGSQSAGPEFQYVRTLIERLVDYLDVGFDTTRVAVIQFSDDPKVEFLLNAHSSKDEVQNAVQRLRPKGGRQINVGNALEYVSRNIFKRPLGSRIEEGVPQFLVLISSGKSDDEVDDPAVELKQFGVAPFTIARNADQEELVKISLSPEYVFSVSTFRELPSLEQKLLTPITTLTSEQIQKLLASTRYPPPAVESDAADIVFLIDSSEGVRPDGFAHIRDFVSRIVRRLNIGPSKVRVGVVQFSNDVFPEFYLKTYRSQAPVLDAIRRLRLRGGSPLNTGKALEFVARNLFVKSAGSRIEDGVPQHLVLVLGGKSQDDVSRFAQVIRSSGIVSLGVGDRNIDRTELQTITNDPRLVFTVREFRELPNIEERIMNSFGPSAATPAPPGVDTPPPSRPEKKKADIVFLLDGSINFRRDSFQEVLRFVSEIVDTVYEDGDSIQVGLVQYNSDPTDEFFLKDFSTKRQIIDAINKVVYKGGRHANTKVGLEHLRVNHFVPEAGSRLDQRVPQIAFVITGGKSVEDAQDVSLALTQRGVKVFAVGVRNIDSEEVGKIASNSATAFRVGNVQELSELSEQVLETLHDAMHETLCPGVTDAAKACNLDVILGFDGSRDQNVFVAQKGFESKVDAILNRISQMHRVSCSGGRSPTVRVSVVANTPSGPVEAFDFDEYQPEMLEKFRNMRSQHPYVLTEDTLKVYLNKFRQSSPDSVKVVIHFTDGADGDLADLHRASENLRQEGVRALILVGLERVVNLERLMHLEFGRGFMYDRPLRLNLLDLDYELAEQLDNIAEKACCGVPCKCSGQRGDRGPIGSIGPKGIPGEDGYRGYPGDEGGPGERGPPGVNGTQGFQGCPGQRGVKGSRGFPGEKGEVGEIGLDGLDGEDGDKGLPGSSGEKGNPGRRGDKGPRGEKGERGDVGIRGDPGNPGQDSQERGPKGETGDLGPMGVPGRDGVPGGPGETGKNGGFGRRGPPGAKGNKGGPGQPGFEGEQGTRGAQGPAGPAGPPGLIGEQGISGPRGSGGAAGAPGERGRTGPLGRKGEPGEPGPKGGIGNRGPRGETGDDGRDGVGSEGRRGKKGERGFPGYPGPKGNPGEPGLNGTTGPKGIRGRRGNSGPPGIVGQKGDPGYPGPAGPKGNRGDSIDQCALIQSIKDKCPCCYGPLECPVFPTELAFALDTSEGVNQDTFGRMRDVVLSIVNDLTIAESNCPRGARVAVVTYNNEVTTEIRFADSKRKSVLLDKIKNLQVALTSKQQSLETAMSFVARNTFKRVRNGFLMRKVAVFFSNTPTRASPQLREAVLKLSDAGITPLFLTRQEDRQLINALQINNTAVGHALVLPAGRDLTDFLENVLTCHVCLDICNIDPSCGFGSWRPSFRDRRAAGSDVDIDMAFILDSAETTTLFQFNEMKKYIAYLVRQLDMSPDPKASQHFARVAVVQHAPSESVDNASMPPVKVEFSLTDYGSKEKLVDFLSRGMTQLQGTRALGSAIEYTIENVFESAPNPRDLKIVVLMLTGEVPEQQLEEAQRVILQAKCKGYFFVVLGIGRKVNIKEVYTFASEPNDVFFKLVDKSTELNEEPLMRFGRLLPSFVSSENAFYLSPDIRKQCDWFQGDQPTKNLVKFGHKQVNVPNNVTSSPTSNPVTTTKPVTTTKPVTTTTKPVTTTTKPVTIINQPSVKPAAAKPAPAKPVAAKPVATKMATVRPPVAVKPATAAKPVAAKPAAVRPPAAAAAKPVATKPEVPRPQAAKPAATKPATTKPMVKMSREVQVFEITENSAKLHWERAEPPGPYFYDLTVTSAHDQSLVLKQNLTVTDRVIGGLLAGQTYHVAVVCYLRSQVRATYHGSFSTKKSQPPPPQPARSASSSTINLMVSTEPLALTETDICKLPKDEGTCRDFILKWYYDPNTKSCARFWYGGCGGNENKFGSQKECEKVCAPVLAKPGVISVMGT

SEQ ID NO: 1173 - protein, 2976 aa, Homo sapiens
MRKHRHLPLVAVFCLFLSGFPTTHAQQQQADVKNGAAADIIFLVDSSWTIGEEHFQLVREFLYDVVKSLAVGENDFHFALVQFNGNPHTEFLLNTYRTKQEVLSHISNMSYIGGTNQTGKGLEYIMQSHLTKAAGSRAGDGVPQVIVVLTDGHSKDGLALPSAELKSADVNVFAIGVEDADEGALKEIASEPLNMHMFNLENFTSLHDIVGNLVSCVHSSVSPERAGDTETLKDITVIEVNKRDIVFLVDGSSALGLANFNAIRDFIAKVIQRLEIGQDLIQVAVAQYADTVRPEFYFNTHPTKREVITAVRKMKPLDGSALYTGSALDFVRNNLFTSSAGYRAAEGIPKLLVLITGGKSLDEISQPAQELKRSSIMAFAIGNKGADQAELEEIAFDSSLVFIPAEFRAAPLQGMLPGLLAPLRTLSGTPEVHSNKRDIIFLLDGSANVGKTNFPYVRDFVMNLVNSLDIGNDNIRVGLVQFSDTPVTEFSLNTYQTKSDILGHLRQLQLQGGSGLNTGSALSYVYANHFTEAGGSRIREHVPQLLLLLTAGQSEDSYLQAANALTRAGILTFCVGASQANKAELEQIAFNPSLVYLMDDFSSLPALPQQLIQPLTTYVSGGVEEVPLAQPESKRDILFLFDGSANLVGQFPVVRDFLYKIIDELNVKPEGTRIAVAQYSDDVKVESRFDEHQSKPEILNLVKRMKIKTGKALNLGYALDYAQRYIFVKSAGSRIEDGVLQFLVLLVAGRSSDRVDGPASNLKQSGVVPFIFQAKNADPAELEQIVLSPAFILAAESLPKIGDLHPQIVNLLKSVHNGAPAPVSGEKDVVFLLDGSEGVRSGFPLLKEFVQRVVESLDVGQDRVRVAVVQYSDRTRPEFYLNSYMNKQDVVNAVRQLTLLGGPTPNTGAALEFVLRNILVSSAGSRITEGVPQLLIVLTADRSGDDVRNPSVVVKRGGAVPIGIGIGNADITEMQTISFIPDFAVAIPTFRQLGTVQQVISERVTQLTREELSRLQPVLQPLPSPGVGGKRDVVFLIDGSQSAGPEFQYVRTLIERLVDYLDVGFDTTRVAVIQFSDDPKVEFLLNAHSSKDEVQNAVQRLRPKGGRQINVGNALEYVSRNIFKRPLGSRIEEGVPQFLVLISSGKSDDEVDDPAVELKQFGVAPFTIARNADQEELVKISLSPEYVFSVSTFRELPSLEQKLLTPITTLTSEQIQKLLASTRYPPPAVESDAADIVFLIDSSEGVRPDGFAHIRDFVSRIVRRLNIGPSKVRVGVVQFSNDVFPEFYLKTYRSQAPVLDAIRRLRLRGGSPLNTGKALEFVARNLFVKSAGSRIEDGVPQHLVLVLGGKSQDDVSRFAQVIRSSGIVSLGVGDRNIDRTELQTITNDPRLVFTVREFRELPNIEERIMNSFGPSAATPAPPGVDTPPPSRPEKKKADIVFLLDGSINFRRDSFQEVLRFVSEIVDTVYEDGDSIQVGLVQYNSDPTDEFFLKDFSTKRQIIDAINKVVYKGGRHANTKVGLEHLRVNHFVPEAGSRLDQRVPQIAFVITGGKSVEDAQDVSLALTQRGVKVFAVGVRNIDSEEVGKIASNSATAFRVGNVQELSELSEQVLETLHDAMHETLCPGVTDAAKACNLDVILGFDGSRDQNVFVAQKGFESKVDAILNRISQMHRVSCSGGRSPTVRVSVVANTPSGPVEAFDFDEYQPEMLEKFRNMRSQHPYVLTEDTLKVYLNKFRQSSPDSVKVVIHFTDGADGDLADLHRASENLRQEGVRALILVGLERVVNLERLMHLEFGRGFMYDRPLRLNLLDLDYELAEQLDNIAEKACCGVPCKCSGQRGDRGPIGSIGPKGIPGEDGYRGYPGDEGGPGERGPPGVNGTQGFQGCPGQRGVKGSRGFPGEKGEVGEIGLDGLDGEDGDKGLPGSSGEKGNPGRRGDKGPRGEKGERGDVGIRGDPGNPGQDSQERGPKGETGDLGPMGVPGRDGVPGGPGETGKNGGFGRRGPPGAKGNKGGPGQPGFEGEQGTRGAQGPAGPAGPPGLIGEQGISGPRGSGGAAGAPGERGRTGPLGRKGEPGEPGPKGGIGNRGPRGETGDDGRDGVGSEGRRGKKGERGFPGYPGPKGNPGEPGLNGTTGPKGIRGRRGNSGPPGIVGQKGDPGYPGPAGPKGNRGDSIDQCALIQSIKDKCPCCYGPLECPVFPTELAFALDTSEGVNQDTFGRMRDVVLSIVNDLTIAESNCPRGARVAVVTYNNEVTTEIRFADSKRKSVLLDKIKNLQVALTSKQQSLETAMSFVARNTFKRVRNGFLMRKVAVFFSNTPTRASPQLREAVLKLSDAGITPLFLTRQEDRQLINALQINNTAVGHALVLPAGRDLTDFLENVLTCHVCLDICNIDPSCGFGSWRPSFRDRRAAGSDVDIDMAFILDSAETTTLFQFNEMKKYIAYLVRQLDMSPDPKASQHFARVAVVQHAPSESVDNASMPPVKVEFSLTDYGSKEKLVDFLSRGMTQLQGTRALGSAIEYTIENVFESAPNPRDLKIVVLMLTGEVPEQQLEEAQRVILQAKCKGYFFVVLGIGRKVNIKEVYTFASEPNDVFFKLVDKSTELNEEPLMRFGRLLPSFVSSENAFYLSPDIRKQCDWFQGDQPTKNLVKFGHKQVNVPNNVTSSPTSNPVTTTKPVTTTKPVTTTTKPVTTTTKPVTIINQPSVKPAAAKPAPAKPVAAKPVATKMATVRPPVAVKPATAAKPVAAKPAAVRPPAAAAAKPVATKPEVPRPQAAKPAATKPATTKPMVKMSREVQVFEITENSAKLHWERAEPPGPYFYDLTVTSAHDQSLVLKQNLTVTDRVIGGLLAGQTYHVAVVCYLRSQVRATYHGSFSTKKSQPPPPQPARSASSSTINLMVSTEPLALTETDICKLPKDEGTCRDFILKWYYDPNTKSCARFWYGGCGGNENKFGSQKECEKVCAPVLAKPGVISVMGT

SEQ ID NO: 1174 - protein, 3177 aa, Homo sapiens
MRKHRHLPLVAVFCLFLSGFPTTHAQQQQADVKNGAAADIIFLVDSSWTIGEEHFQLVREFLYDVVKSLAVGENDFHFALVQFNGNPHTEFLLNTYRTKQEVLSHISNMSYIGGTNQTGKGLEYIMQSHLTKAAGSRAGDGVPQVIVVLTDGHSKDGLALPSAELKSADVNVFAIGVEDADEGALKEIASEPLNMHMFNLENFTSLHDIVGNLVSCVHSSVSPERAGDTETLKDITAQDSADIIFLIDGSNNTGSVNFAVILDFLVNLLEKLPIGTQQIRVGVVQFSDEPRTMFSLDTYSTKAQVLGAVKALGFAGGELANIGLALDFVVENHFTRAGGSRVEEGVPQVLVLISAGPSSDEIRYGVVALKQASVFSFGLGAQAASRAELQHIATDDNLVFTVPEFRSFGDLQEKLLPYIVGVAQRHIVLKPPTIVTQVIEVNKRDIVFLVDGSSALGLANFNAIRDFIAKVIQRLEIGQDLIQVAVAQYADTVRPEFYFNTHPTKREVITAVRKMKPLDGSALYTGSALDFVRNNLFTSSAGYRAAEGIPKLLVLITGGKSLDEISQPAQELKRSSIMAFAIGNKGADQAELEEIAFDSSLVFIPAEFRAAPLQGMLPGLLAPLRTLSGTPEVHSNKRDIIFLLDGSANVGKTNFPYVRDFVMNLVNSLDIGNDNIRVGLVQFSDTPVTEFSLNTYQTKSDILGHLRQLQLQGGSGLNTGSALSYVYANHFTEAGGSRIREHVPQLLLLLTAGQSEDSYLQAANALTRAGILTFCVGASQANKAELEQIAFNPSLVYLMDDFSSLPALPQQLIQPLTTYVSGGVEEVPLAQPESKRDILFLFDGSANLVGQFPVVRDFLYKIIDELNVKPEGTRIAVAQYSDDVKVESRFDEHQSKPEILNLVKRMKIKTGKALNLGYALDYAQRYIFVKSAGSRIEDGVLQFLVLLVAGRSSDRVDGPASNLKQSGVVPFIFQAKNADPAELEQIVLSPAFILAAESLPKIGDLHPQIVNLLKSVHNGAPAPVSGEKDVVFLLDGSEGVRSGFPLLKEFVQRVVESLDVGQDRVRVAVVQYSDRTRPEFYLNSYMNKQDVVNAVRQLTLLGGPTPNTGAALEFVLRNILVSSAGSRITEGVPQLLIVLTADRSGDDVRNPSVVVKRGGAVPIGIGIGNADITEMQTISFIPDFAVAIPTFRQLGTVQQVISERVTQLTREELSRLQPVLQPLPSPGVGGKRDVVFLIDGSQSAGPEFQYVRTLIERLVDYLDVGFDTTRVAVIQFSDDPKVEFLLNAHSSKDEVQNAVQRLRPKGGRQINVGNALEYVSRNIFKRPLGSRIEEGVPQFLVLISSGKSDDEVDDPAVELKQFGVAPFTIARNADQEELVKISLSPEYVFSVSTFRELPSLEQKLLTPITTLTSEQIQKLLASTRYPPPAVESDAADIVFLIDSSEGVRPDGFAHIRDFVSRIVRRLNIGPSKVRVGVVQFSNDVFPEFYLKTYRSQAPVLDAIRRLRLRGGSPLNTGKALEFVARNLFVKSAGSRIEDGVPQHLVLVLGGKSQDDVSRFAQVIRSSGIVSLGVGDRNIDRTELQTITNDPRLVFTVREFRELPNIEERIMNSFGPSAATPAPPGVDTPPPSRPEKKKADIVFLLDGSINFRRDSFQEVLRFVSEIVDTVYEDGDSIQVGLVQYNSDPTDEFFLKDFSTKRQIIDAINKVVYKGGRHANTKVGLEHLRVNHFVPEAGSRLDQRVPQIAFVITGGKSVEDAQDVSLALTQRGVKVFAVGVRNIDSEEVGKIASNSATAFRVGNVQELSELSEQVLETLHDAMHETLCPGVTDAAKACNLDVILGFDGSRDQNVFVAQKGFESKVDAILNRISQMHRVSCSGGRSPTVRVSVVANTPSGPVEAFDFDEYQPEMLEKFRNMRSQHPYVLTEDTLKVYLNKFRQSSPDSVKVVIHFTDGADGDLADLHRASENLRQEGVRALILVGLERVVNLERLMHLEFGRGFMYDRPLRLNLLDLDYELAEQLDNIAEKACCGVPCKCSGQRGDRGPIGSIGPKGIPGEDGYRGYPGDEGGPGERGPPGVNGTQGFQGCPGQRGVKGSRGFPGEKGEVGEIGLDGLDGEDGDKGLPGSSGEKGNPGRRGDKGPRGEKGERGDVGIRGDPGNPGQDSQERGPKGETGDLGPMGVPGRDGVPGGPGETGKNGGFGRRGPPGAKGNKGGPGQPGFEGEQGTRGAQGPAGPAGPPGLIGEQGISGPRGSGGAAGAPGERGRTGPLGRKGEPGEPGPKGGIGNRGPRGETGDDGRDGVGSEGRRGKKGERGFPGYPGPKGNPGEPGLNGTTGPKGIRGRRGNSGPPGIVGQKGDPGYPGPAGPKGNRGDSIDQCALIQSIKDKCPCCYGPLECPVFPTELAFALDTSEGVNQDTFGRMRDVVLSIVNDLTIAESNCPRGARVAVVTYNNEVTTEIRFADSKRKSVLLDKIKNLQVALTSKQQSLETAMSFVARNTFKRVRNGFLMRKVAVFFSNTPTRASPQLREAVLKLSDAGITPLFLTRQEDRQLINALQINNTAVGHALVLPAGRDLTDFLENVLTCHVCLDICNIDPSCGFGSWRPSFRDRRAAGSDVDIDMAFILDSAETTTLFQFNEMKKYIAYLVRQLDMSPDPKASQHFARVAVVQHAPSESVDNASMPPVKVEFSLTDYGSKEKLVDFLSRGMTQLQGTRALGSAIEYTIENVFESAPNPRDLKIVVLMLTGEVPEQQLEEAQRVILQAKCKGYFFVVLGIGRKVNIKEVYTFASEPNDVFFKLVDKSTELNEEPLMRFGRLLPSFVSSENAFYLSPDIRKQCDWFQGDQPTKNLVKFGHKQVNVPNNVTSSPTSNPVTTTKPVTTTKPVTTTTKPVTTTTKPVTIINQPSVKPAAAKPAPAKPVAAKPVATKMATVRPPVAVKPATAAKPVAAKPAAVRPPAAAAAKPVATKPEVPRPQAAKPAATKPATTKPMVKMSREVQVFEITENSAKLHWERAEPPGPYFYDLTVTSAHDQSLVLKQNLTVTDRVIGGLLAGQTYHVAVVCYLRSQVRATYHGSFSTKKSQPPPPQPARSASSSTINLMVSTEPLALTETDICKLPKDEGTCRDFILKWYYDPNTKSCARFWYGGCGGNENKFGSQKECEKVCAPVLAKPGVISVMGT

SEQ ID NO: 1175 - protein, 2971 aa, Homo sapiens
MRKHRHLPLVAVFCLFLSGFPTTHAQQQQAAQDSADIIFLIDGSNNTGSVNFAVILDFLVNLLEKLPIGTQQIRVGVVQFSDEPRTMFSLDTYSTKAQVLGAVKALGFAGGELANIGLALDFVVENHFTRAGGSRVEEGVPQVLVLISAGPSSDEIRYGVVALKQASVFSFGLGAQAASRAELQHIATDDNLVFTVPEFRSFGDLQEKLLPYIVGVAQRHIVLKPPTIVTQVIEVNKRDIVFLVDGSSALGLANFNAIRDFIAKVIQRLEIGQDLIQVAVAQYADTVRPEFYFNTHPTKREVITAVRKMKPLDGSALYTGSALDFVRNNLFTSSAGYRAAEGIPKLLVLITGGKSLDEISQPAQELKRSSIMAFAIGNKGADQAELEEIAFDSSLVFIPAEFRAAPLQGMLPGLLAPLRTLSGTPEVHSNKRDIIFLLDGSANVGKTNFPYVRDFVMNLVNSLDIGNDNIRVGLVQFSDTPVTEFSLNTYQTKSDILGHLRQLQLQGGSGLNTGSALSYVYANHFTEAGGSRIREHVPQLLLLLTAGQSEDSYLQAANALTRAGILTFCVGASQANKAELEQIAFNPSLVYLMDDFSSLPALPQQLIQPLTTYVSGGVEEVPLAQPESKRDILFLFDGSANLVGQFPVVRDFLYKIIDELNVKPEGTRIAVAQYSDDVKVESRFDEHQSKPEILNLVKRMKIKTGKALNLGYALDYAQRYIFVKSAGSRIEDGVLQFLVLLVAGRSSDRVDGPASNLKQSGVVPFIFQAKNADPAELEQIVLSPAFILAAESLPKIGDLHPQIVNLLKSVHNGAPAPVSGEKDVVFLLDGSEGVRSGFPLLKEFVQRVVESLDVGQDRVRVAVVQYSDRTRPEFYLNSYMNKQDVVNAVRQLTLLGGPTPNTGAALEFVLRNILVSSAGSRITEGVPQLLIVLTADRSGDDVRNPSVVVKRGGAVPIGIGIGNADITEMQTISFIPDFAVAIPTFRQLGTVQQVISERVTQLTREELSRLQPVLQPLPSPGVGGKRDVVFLIDGSQSAGPEFQYVRTLIERLVDYLDVGFDTTRVAVIQFSDDPKVEFLLNAHSSKDEVQNAVQRLRPKGGRQINVGNALEYVSRNIFKRPLGSRIEEGVPQFLVLISSGKSDDEVDDPAVELKQFGVAPFTIARNADQEELVKISLSPEYVFSVSTFRELPSLEQKLLTPITTLTSEQIQKLLASTRYPPPAVESDAADIVFLIDSSEGVRPDGFAHIRDFVSRIVRRLNIGPSKVRVGVVQFSNDVFPEFYLKTYRSQAPVLDAIRRLRLRGGSPLNTGKALEFVARNLFVKSAGSRIEDGVPQHLVLVLGGKSQDDVSRFAQVIRSSGIVSLGVGDRNIDRTELQTITNDPRLVFTVREFRELPNIEERIMNSFGPSAATPAPPGVDTPPPSRPEKKKADIVFLLDGSINFRRDSFQEVLRFVSEIVDTVYEDGDSIQVGLVQYNSDPTDEFFLKDFSTKRQIIDAINKVVYKGGRHANTKVGLEHLRVNHFVPEAGSRLDQRVPQIAFVITGGKSVEDAQDVSLALTQRGVKVFAVGVRNIDSEEVGKIASNSATAFRVGNVQELSELSEQVLETLHDAMHETLCPGVTDAAKACNLDVILGFDGSRDQNVFVAQKGFESKVDAILNRISQMHRVSCSGGRSPTVRVSVVANTPSGPVEAFDFDEYQPEMLEKFRNMRSQHPYVLTEDTLKVYLNKFRQSSPDSVKVVIHFTDGADGDLADLHRASENLRQEGVRALILVGLERVVNLERLMHLEFGRGFMYDRPLRLNLLDLDYELAEQLDNIAEKACCGVPCKCSGQRGDRGPIGSIGPKGIPGEDGYRGYPGDEGGPGERGPPGVNGTQGFQGCPGQRGVKGSRGFPGEKGEVGEIGLDGLDGEDGDKGLPGSSGEKGNPGRRGDKGPRGEKGERGDVGIRGDPGNPGQDSQERGPKGETGDLGPMGVPGRDGVPGGPGETGKNGGFGRRGPPGAKGNKGGPGQPGFEGEQGTRGAQGPAGPAGPPGLIGEQGISGPRGSGGAAGAPGERGRTGPLGRKGEPGEPGPKGGIGNRGPRGETGDDGRDGVGSEGRRGKKGERGFPGYPGPKGNPGEPGLNGTTGPKGIRGRRGNSGPPGIVGQKGDPGYPGPAGPKGNRGDSIDQCALIQSIKDKCPCCYGPLECPVFPTELAFALDTSEGVNQDTFGRMRDVVLSIVNDLTIAESNCPRGARVAVVTYNNEVTTEIRFADSKRKSVLLDKIKNLQVALTSKQQSLETAMSFVARNTFKRVRNGFLMRKVAVFFSNTPTRASPQLREAVLKLSDAGITPLFLTRQEDRQLINALQINNTAVGHALVLPAGRDLTDFLENVLTCHVCLDICNIDPSCGFGSWRPSFRDRRAAGSDVDIDMAFILDSAETTTLFQFNEMKKYIAYLVRQLDMSPDPKASQHFARVAVVQHAPSESVDNASMPPVKVEFSLTDYGSKEKLVDFLSRGMTQLQGTRALGSAIEYTIENVFESAPNPRDLKIVVLMLTGEVPEQQLEEAQRVILQAKCKGYFFVVLGIGRKVNIKEVYTFASEPNDVFFKLVDKSTELNEEPLMRFGRLLPSFVSSENAFYLSPDIRKQCDWFQGDQPTKNLVKFGHKQVNVPNNVTSSPTSNPVTTTKPVTTTKPVTTTTKPVTTTTKPVTIINQPSVKPAAAKPAPAKPVAAKPVATKMATVRPPVAVKPATAAKPVAAKPAAVRPPAAAAAKPVATKPEVPRPQAAKPAATKPATTKPMVKMSREVQVFEITENSAKLHWERAEPPGPYFYDLTVTSAHDQSLVLKQNLTVTDRVIGGLLAGQTYHVAVVCYLRSQVRATYHGSFSTKKSQPPPPQPARSASSSTINLMVSTEPLALTETDICKLPKDEGTCRDFILKWYYDPNTKSCARFWYGGCGGNENKFGSQKECEKVCAPVLAKPGVISVMGT

SEQ ID NO: 1176 - protein, 3010 aa, Homo sapiens
MRKHRHLPLVAVFCLFLSGFPTTHAQQQQADVKNGAAADIIFLVDSSWTIGEEHFQLVREFLYDVVKSLAVGENDFHFALVQFNGNPHTEFLLNTYRTKQEVLSHISNMSYIGGTNQTGKGLEYIMQSHLTKAAGSRAGDGVPQVIVVLTDGHSKDGLALPSAELKSADVNVFAIGVEDADEGALKEIASEPLNMHMFNLENFTSLHDIVGNLVSCVHSSVSPERAGDTETLKDITAQDSADIIFLIDGSNNTGSVNFAVILDFLVNLLEKLPIGTQQIRVGVVQFSDEPRTMFSLDTYSTKAQVLGAVKALGFAGGELANIGLALDFVVENHFTRAGGSRVEEGVPQVLVLISAGPSSDEIRYGVVALKQASVFSFGLGAQAASRAELQHIATDDNLVFTVPEFRSFGDLQEKLLPYIVGVAQRHIVLKPPTIVTQVIEVNKRDIVFLVDGSSALGLANFNAIRDFIAKVIQRLEIGQDLIQVAVAQYADTVRPEFYFNTHPTKREVITAVRKMKPLDGSALYTGSALDFVRNNLFTSSAGYRAAEGIPKLLVLITGGKSLDEISQPAQELKRSSIMAFAIGNKGADQAELEEIAFDSSLVFIPAEFRAAPLQGMLPGLLAPLRTLSGTPEVHSNKRDIIFLLDGSANVGKTNFPYVRDFVMNLVNSLDIGNDNIRVGLVQFSDTPVTEFSLNTYQTKSDILGHLRQLQLQGGSGLNTGSALSYVYANHFTEAGGSRIREHVPQLLLLLTAGQSEDSYLQAANALTRAGILTFCVGASQANKAELEQIAFNPSLVYLMDDFSSLPALPQQLIQPLTTYVSGGVEEVPLAQPESKRDILFLFDGSANLVGQFPVVRDFLYKIIDELNVKPEGTRIAVAQYSDDVKVESRFDEHQSKPEILNLVKRMKIKTGKALNLGYALDYAQRYIFVKSAGSRIEDGVLQFLVLLVAGRSSDRVDGPASNLKQSGVVPFIFQAKNADPAELEQIVLSPAFILAAESLPKIGDLHPQIVNLLKSVHNGAPAPVSGEKDVVFLLDGSEGVRSGFPLLKEFVQRVVESLDVGQDRVRVAVVQYSDRTRPEFYLNSYMNKQDVVNAVRQLTLLGGPTPNTGAALEFVLRNILVSSAGSRITEGVPQLLIVLTADRSGDDVRNPSVVVKRGGAVPIGIGIGNADITEMQTISFIPDFAVAIPTFRQLGTVQQVISERVTQLTREELSRLQPVLQPLPSPGVGGKRDVVFLIDGSQSAGPEFQYVRTLIERLVDYLDVGFDTTRVAVIQFSDDPKVEFLLNAHSSKDEVQNAVQRLRPKGGRQINVGNALEYVSRNIFKRPLGSRIEEGVPQFLVLISSGKSDDEVDDPAVELKQFGVAPFTIARNADQEELVKISLSPEYVFSVSTFRELPSLEQKLLTPITTLTSEQIQKLLASTRYPPPVREFRELPNIEERIMNSFGPSAATPAPPGVDTPPPSRPEKKKADIVFLLDGSINFRRDSFQEVLRFVSEIVDTVYEDGDSIQVGLVQYNSDPTDEFFLKDFSTKRQIIDAINKVVYKGGRHANTKVGLEHLRVNHFVPEAGSRLDQRVPQIAFVITGGKSVEDAQDVSLALTQRGVKVFAVGVRNIDSEEVGKIASNSATAFRVGNVQELSELSEQVLETLHDAMHETLCPGVTDAAKACNLDVILGFDGSRDQNVFVAQKGFESKVDAILNRISQMHRVSCSGGRSPTVRVSVVANTPSGPVEAFDFDEYQPEMLEKFRNMRSQHPYVLTEDTLKVYLNKFRQSSPDSVKVVIHFTDGADGDLADLHRASENLRQEGVRALILVGLERVVNLERLMHLEFGRGFMYDRPLRLNLLDLDYELAEQLDNIAEKACCGVPCKCSGQRGDRGPIGSIGPKGIPGEDGYRGYPGDEGGPGERGPPGVNGTQGFQGCPGQRGVKGSRGFPGEKGEVGEIGLDGLDGEDGDKGLPGSSGEKGNPGRRGDKGPRGEKGERGDVGIRGDPGNPGQDSQERGPKGETGDLGPMGVPGRDGVPGGPGETGKNGGFGRRGPPGAKGNKGGPGQPGFEGEQGTRGAQGPAGPAGPPGLIGEQGISGPRGSGGAAGAPGERGRTGPLGRKGEPGEPGPKGGIGNRGPRGETGDDGRDGVGSEGRRGKKGERGFPGYPGPKGNPGEPGLNGTTGPKGIRGRRGNSGPPGIVGQKGDPGYPGPAGPKGNRGDSIDQCALIQSIKDKCPCCYGPLECPVFPTELAFALDTSEGVNQDTFGRMRDVVLSIVNDLTIAESNCPRGARVAVVTYNNEVTTEIRFADSKRKSVLLDKIKNLQVALTSKQQSLETAMSFVARNTFKRVRNGFLMRKVAVFFSNTPTRASPQLREAVLKLSDAGITPLFLTRQEDRQLINALQINNTAVGHALVLPAGRDLTDFLENVLTCHVCLDICNIDPSCGFGSWRPSFRDRRAAGSDVDIDMAFILDSAETTTLFQFNEMKKYIAYLVRQLDMSPDPKASQHFARVAVVQHAPSESVDNASMPPVKVEFSLTDYGSKEKLVDFLSRGMTQLQGTRALGSAIEYTIENVFESAPNPRDLKIVVLMLTGEVPEQQLEEAQRVILQAKCKGYFFVVLGIGRKVNIKEVYTFASEPNDVFFKLVDKSTELNEEPLMRFGRLLPSFVSSENAFYLSPDIRKQCDWFQGDQPTKNLVKFGHKQVNVPNNVTSSPTSNPVTTTKPVTTTKPVTTTTKPVTTTTKPVTIINQPSVKPAAAKPAPAKPVAAKPVATKMATVRPPVAVKPATAAKPVAAKPAAVRPPAAAAAKPVATKPEVPRPQAAKPAATKPATTKPMVKMSREVQVFEITENSAKLHWERAEPPGPYFYDLTVTSAHDQSLVLKQNLTVTDRVIGGLLAGQTYHVAVVCYLRSQVRATYHGSFSTKKSQPPPPQPARSASSSTINLMVSTEPLALTETDICKLPKDEGTCRDFILKWYYDPNTKSCARFWYGGCGGNENKFGSQKECEKVCAPVLAKPGVISVMGT

SEQ ID NO: 1177 - protein, 1769 aa, Homo sapiens
MILPNSPPNRTDEKKKTKKVDNELNPVWNEILEFDLRGIPLDFSSSLGIIVKDFETIGQNKLIGTATVALKDLTGDQSRSLPYKLISLLNEKGQDTGATIDLVIGYDPPSAPHPNDLSGPSVPGMGGDGEEDEGDEDRLDNAVRGPGPKGPVGTVSEAQLARRLTKVKNSRRMLSNKPQDFQIRVRVIEGRQLSGNNIRPVVKVHVCGQTHRTRIKRGNNPFFDELFFYNVNMTPSELMDEIISIRVYNSHSLRADCLMGEFKIDVGFVYDEPGHAVMRKWLLLNDPEDTSSGSKGYMKVSMFVLGTGDEPPPERRDRDNDSDDVESNLLLPAGIALRWVTFLLKIYRAEDIPQMDDAFSQTVKEIFGGNADKKNLVDPFVEVSFAGKKVCTNIIEKNANPEWNQVVNLQIKFPSVCEKIKLTIYDWDRLTKNDVVGTTYLHLSKIAASGGEVEVNTGETEVGFVPTFGPCYLNLYGSPREYTGFPDPYDELNTGKGEGVAYRGRILVELATFLEKTPPDKKLEPISNDDLLVVEKYQRRRKYSLSAVFHSATMLQDVGEAIQFEVSIGNYGNKFDTTCKPLASTTQYSRAVFDGNYYYYLPWAHTKPVVTLTSYWEDISHRLDAVNTLLAMAERLQTNIEALKSGIQGKIPANQLAELWLKLIDEVIEDTRYTLPLTEGKANVTVLDTQIRKLRSRSLSQIHEAAVRMRSEATDVKSTLAEIEDWLDKLMQLTEEPQNSMPDIIIWMIRGEKRLAYARIPAHQVLYSTSGENASGKYCGKTQTIFLKYPQEKNNGPKVPVELRVNIWLGLSAVEKKFNSFAEGTFTVFAEMYENQALMFGKWGTSGLVGRHKFSDVTGKIKLKREFFLPPKGWEWEGEWIVDPERSLLTEADAGHTEFTDEVYQNESRYPGGDWKPAEDTYTDANGDKAASPSELTCPPGWEWEDDAWSYDINRAVDEKGWEYGITIPPDHKPKSWVAAEKMYHTHRRRRLVRKRKKDLTQTASSTARAMEELQDQEGWEYASLIGWKFHWKQRSSDTFRRRRWRRKMAPSETHGAAAIFKLEGALGADTTEDGDEKSLEKQKHSATTVFGANTPIVSCNFDRVYIYHLRCYVYQARNLLALDKDSFSDPYAHICFLHRSKTTEIIHSTLNPTWDQTIIFDEVEIYGEPQTVLQNPPKVIMELFDNDQVGKDEFLGRSIFSPVVKLNSEMDITPKLLWHPVMNGDKACGDVLVTAELILRGKDGSNLPILPPQRAPNLYMVPQGIRPVVQLTAIEILAWGLRNMKNFQMASITSPSLVVECGGERVESVVIKNLKKTPNFPSSVLFMKVFLPKEELYMPPLVIKVIDHRQFGRKPVVGQCTIERLDRFRCDPYAGKEDIVPQLKASLLSAPPCRDIVIEMEDTKPLLASKCLSSMSTALSKMASPATVHLTEKEEEIVDWWSKFYASSGEHEKCGQYIQKGYSKLKIYNCELENVAEFEGLTDFSDTFKLYRGKSDENEDPSVVGEFKGSFRIYPLPDDPSVPAPPRQFRELPDSVPQECTVRIYIVRGLELQPQDNNGLCDPYIKITLGKKVIEDRDHYIPNTLNPVFGRMYELSCYLPQEKDLKISVYDYDTFTRDEKVGETIIDLENRFLSRFGSHCGIPEEYCVSGVNTWRDQLRPTQLLQNVARFKGFPQPILSEDGSRIRYGGRDYSLDEFEANKILHQHLGAPEERLALHILRTQGLVPEHVETRTLHSTFQPNIILPACDHLEHQGRYLGREKHHRRGNE

SEQ ID NO: 1178 - protein, 280 aa, Homo sapiens
MLSAVARGYQGWFHPCARLSVRMSSTGIDRKGVLANRVAVVTGSTSGIGFAIARRLARDGAHVVISSRKQQNVDRAMAKLQGEGLSVAGIVCHVGKAEDREQLVAKALEHCGGVDFLVCSAGVNPLVGSTLGTSEQIWDKILSVNVKSPALLLSQLLPYMENRRGAVILVSSIAAYNPVVALGVYNVSKTALLGLTRTLALELAPKDIRVNCVVPGIIKTDFSKVFHGNESLWKNFKEHHQLQRIGESEDCAGIVSFLCSPDASYVNGENIAVAGYSTRL

SEQ ID NO: 1179 - protein, 257 aa, Homo sapiens
SSTGIDRKGVLANRVAVVTGSTSGIGFAIARRLARDGAHVVISSRKQQNVDRAMAKLQGEGLSVAGIVCHVGKAEDREQLVAKALEHCGGVDFLVCSAGVNPLVGSTLGTSEQIWDKILSVNVKSPALLLSQLLPYMENRRGAVILVSSIAAYNPVVALGVYNVSKTALLGLTRTLALELAPKDIRVNCVVPGIIKTDFSKVFHGNESLWKNFKEHHQLQRIGESEDCAGIVSFLCSPDASYVNGENIAVAGYSTRL

SEQ ID NO: 1180 - protein, 280 aa, Homo sapiens; identical to SEQ ID NO: 1178

SEQ ID NO: 1181 - protein, 423 aa, Homo sapiens
MAGKRSGWSRAALLQLLLGVNLVVMPPTRARSLRFVTLLYRHGDRSPVKTYPKDPYQEEEWPQGFGQLTKEGMLQHWELGQALRQRYHGFLNTSYHRQEVYVRSTDFDRTLMSAEANLAGLFPPNGMQRFNPNISWQPIPVHTVPITEDRLLKFPLGPCPRYEQLQNETRQTPEYQNESSRNAQFLDMVANETGLTDLTLETVWNVYDTLFCEQTHGLRLPPWASPQTMQRLSRLKDFSFRFLFGIYQQAEKARLQGGVLLAQIRKNLTLMATTSQLPKLLVYSAHDTTLVALQMALDVYNGEQAPYASCHIFELYQEDSGNFSVEMYFRNESDKAPWPLSLPGCPHRCPLQDFLRLTEPVVPKDWQQECQLASGPADTEVIVALAVCGSILFLLIVLLLTVLFRMQAQPPGYRHVADGEDHA

SEQ ID NO: 1182 - protein, 546 aa, Homo sapiens
MNCCIGLGEKARGSHRASYPSLSALFTEASILGFGSFAVKAQVGNQQLGGPEWIRFSLTPRPLNCSLSLTPRGQRWVRVGCYISVETLWIRFVGTEDAWVRGTGCTRLLEAPHRGATGRGSRGGGGVACPRPSRLFFASAGVRGVALAARAMPGRSCVALVLLAAAVSCAVAQHAPPWTEDCRKSTYPPSGPTYRGAVPWYTINLDLPPYKRWHELMLDKAPMLKVIVNSLKNMINTFVPSGKVMQVVDEKLPGLLGNFPGPFEEEMKGIAAVTDIPLGEIISFNIFYELFTICTSIVAEDKKGHLIHGRNMDFGVFLGWNINNDTWVITEQLKPLTVNLDFQRNNKTVFKASSFAGYVGMLTGFKPGLFSLTLNERFSINGGYLGILEWILGKKDAMWIGFLTRTVLENSTSYEEAKNLLTKTKILAPAYFILGGNQSGEGCVITRDRKESLDVYELDAKQGRWYVVQTNYDRWKHPFFLDDRRTPAKMCLNRTSQENISFETMYDVLSTKPVLNKLTVYTTLIDVTKGQFETYLRDCPDPCIGW

SEQ ID NO: 1183 - protein, 546 aa, Homo sapiens; identical to SEQ ID NO: 1182

SEQ ID NO: 1184 - protein, 411 aa, Homo sapiens
MNCCIGLGEKARGSHRASYPSLSALFTEASILGFGSFAVKAQWTEDCRKSTYPPSGPTYRGAVPWYTINLDLPPYKRWHELMLDKAPMLKVIVNSLKNMINTFVPSGKVMQVVDEKLPGLLGNFPGPFEEEMKGIAAVTDIPLGEIISFNIFYELFTICTSIVAEDKKGHLIHGRNMDFGVFLGWNINNDTWVITEQLKPLTVNLDFQRNNKTVFKASSFAGYVGMLTGFKPGLFSLTLNERFSINGGYLGILEWILGKKDAMWIGFLTRTVLENSTSYEEAKNLLTKTKILAPAYFILGGNQSGEGCVITRDRKESLDVYELDAKQGRWYVVQTNYDRWKHPFFLDDRRTPAKMCLNRTSQENISFETMYDVLSTKPVLNKLTVYTTLIDVTKGQFETYLRDCPDPCIGW

SEQ ID NO: 1185 - protein, 395 aa, Homo sapiens
MPGRSCVALVLLAAAVSCAVAQHAPPWTEDCRKSTYPPSGPTYRGAVPWYTINLDLPPYKRWHELMLDKAPMLKVIVNSLKNMINTFVPSGKVMQVVDEKLPGLLGNFPGPFEEEMKGIAAVTDIPLGEIISFNIFYELFTICTSIVAEDKKGHLIHGRNMDFGVFLGWNINNDTWVITEQLKPLTVNLDFQRNNKTVFKASSFAGYVGMLTGFKPGLFSLTLNERFSINGGYLGILEWILGKKDAMWIGFLTRTVLENSTSYEEAKNLLTKTKILAPAYFILGGNQSGEGCVITRDRKESLDVYELDAKQGRWYVVQTNYDRWKHPFFLDDRRTPAKMCLNRTSQENISFETMYDVLSTKPVLNKLTVYTTLIDVTKGQFETYLRDCPDPCIGW

SEQ ID NO: 1186 - protein, 390 aa, Homo sapiens [sequence omitted]

SEQ ID NO: 1187 - protein, 395 aa, Homo sapiens; identical to SEQ ID NO: 1185

SEQ ID NO: 1188 - protein, 322 aa, Homo sapiens
MAEQDVENDLLDYDEEEEPQAPQESTPAPPKKDIKGSYVSIHSSGFRDFLLKPELLRAIVDCGFEHPSEVQHECIPQAILGMDVLCQAKSGMGKTAVFVLATLQQIEPVNGQVTVLVMCHTRELAFQISKEYERFSKYMPSVKVSVFFGGLSIKKDEEVLKKNCPHVVVGTPGRILALVRNRSFSLKNVKHFVLDECDKMLEQLDMRRDVQEIFRLTPHEKQCMMFSATLSKDIRPVCRKFMQDPMEVFVDDETKLTLHGLQQYYVKLKDSEKNRKLFDLLDVLEFNQPVTLSAVQGFPAADPGGHQSVWPGDGHRASQHRL

SEQ ID NO: 1189 - protein, 316 aa, Homo sapiens; identical to SEQ ID NO: 764

SEQ ID NO: 1190 - protein, 272 aa, Homo sapiens
MYALFLLASLLGAALAGPVLGLKECTRGSAVWCQNVKTASDCGAVKHCLQTVWNKPTVKSLPCDICKDVVTAAGDMLKDNATEEEILVYLEKTCDWLPKPNMSASCKEIVDSYLPVILDIIKGEMSRPGEVCSALNLCESLQKHLAELNHQKQLESNKIPELDMTEVVAPFMANIPLLLYPQDGPRSKPQPKDNGDVCQDCIQMVTDIQTAVRTNSTFVQALVEHVKEECDRLGPGMADICKNYISQYSEIAIQMMMHMVATQGDLCAGWVL

SEQ ID NO: 1191 - protein, 242 aa, Homo sapiens
MVAPAVKVARGWSGLALGVRRAVLQLPGLTQVRWSRYSPEFKDPLIDKEYYRKPVEELTEEEKYVRELKKTQLIKAAPAGKTSSVFEDPVISKFTNMMMIGGNKVLARSLMIQTLEAVKRKQFEKYHAASAEEQATIERNPYTIFHQALKNCEPMIGLVPILKGGRFYQVPVPLPDRRRRFLAMKWMITECRDKKHQRTLMPEKLSHKLLEAFHNQGPVIKRKHDLHKMAEANRALAHYRWW

SEQ ID NO: 1192 - protein, 86 aa, Homo sapiens
MVLWLKGVTFNVTTVDTKRRTETVQKLCPGGQLPFLLYGTEVHTDTNKIEEFLEAVLCPPRSGEGTPESPEGFRQLLNIPPPRRSG

SEQ ID NO: 1193 - protein, 286 aa, Homo sapiens
MRLLPRLLLLLLLVFPATVLFRGGPRGLLAVAQDLTEDEETVEDSIIEDEDDEAEVEEDEPTDLVEDKEEEDVSGEPEASPSADTTILFVKGEDFPANNIVKFLVGFTNKGTEDFIVESLDASFRYPQDYQFYIQNFTALPLNTVVPPQRQATFEYSFIPAEPMGGRPFGLVINLNYKDLNGNVFQDAVFNQTVTVIEREDGLDGETIFMYMFLAGLGLLVIVGLHQLLESRKRKRPIQKVEMGTSSQNDVDMSWIPQETLNQINKASPRRLPRKRAQKRSVGSDE

SEQ ID NO: 1194 - protein, 286 aa, Homo sapiens [sequence omitted]

SEQ ID NO: 1195 - protein, 278 aa, Homo sapiens
MRLLPRLLLLLLLVFPATVLFRGGPRGLLAVAQDLTEDEETVEDSIIEDEDDEAEVEEDEPTDLVEDKEEEDVSGEPEASPSADTTILFVKGEDFPANNIVKFLVGFTNKGTEDFIVESLDASFRYPQDYQFYIQNFTALPLNTVVPPQRQATFEYSFIPAEPMGGRPFGLVINLNYKDLNGNVFQDAVFNQTVTVIEREDGLDGETIFMYMFLAGLGLLVIVGLHQLLESRKIKLHQEGCPGNGHRRDQWDLMSKCSFVQQFGLYLTCPNIFRPDGN

SEQ ID NO: 1196 - protein, 286 aa, Homo sapiens; identical to SEQ ID NO: 1193

SEQ ID NO: 1197 - protein, 368 aa, Homo sapiens
WMMISPRSSSTTAPACARPASRATMPPGQSSPPSLGTPGTRAWWAWVRRIPMWATRPRAREASSPSTPLSTALSPTGTTWRRSGTTPSTMSCAWLPRSNPCCCLRPPTPGPTARRPRSYLRPSTPQPCTWPSRLCCPCTPLAVPLASCWTPVMGSPTLCPSTRGMPSPTPSCFWTWLAGTLPHEDPHRAPLQLHHHAEREIMRNIKEKLCYLVLDFEQEMATAASSSSLEKSYQLPNSQVITIGNEWFCCPEALFQPSFLGMESCGIHETTFNSIMKCDLDIRKDLYTSTVLSGGTTMYPGIADRMQKEITALAPSRTKIKIIAPPERKYSVWIGGSILASLSTFQQMWISKQEYEESGPPSFTANAS

SEQ ID NO: 1198 - protein, 253 aa, Homo sapiens
MFETFNTPAMYVAIQAVLSLYASGRTTGIVMDSGDGVTHTVPIYEGYALPHAILRLDLAGRDLTDYLMKILTERGYSFTTTAEREIVRDIKEKLCYVALDFEQEMATAASSSSLEKSYELPDGQVITIGNERFRCPEALFQPSFLGMESCGIHETTFNSIMKCDVDIRKDLYANTVLSGGTTMYPGIADRMQKEITALAPSTMKIKIIAPPERKYSVWIGGSILASLSTFQQMWISKQEYDESGPSIVHRKCF

SEQ ID NO: 1199 - protein, 845 aa, Homo sapiens [sequence omitted]

SEQ ID NO: 1200 - protein, 375 aa, Homo sapiens
MDDDIAALVVDNGSGMCKAGFAGDDAPRAVFPSIVGRPRHQGVMVGMGQKDSYVGDEAQSKRGILTLKYPIEHGIVTNWDDMEKIWHHTFYNELRVAPEEHPVLLTEAPLNPKANREKMTQIMFETFNTPAMYVAIQAVLSLYASGRTTGIVMDSGDGVTHTVPIYEGYALPHAILRLDLAGRDLTDYLMKILTERGYSFTTTAEREIVRDIKEKLCYVALDFEQEMATAASSSSLEKSYELPDGQVITIGNERFRCPEALFQPSFLGMESCGIHETTFNSIMKCDVDIRKDLYANTVLSGGTTMYPGIADRMQKEITALAPSTMKIKIIAPPERKYSVWIGGSILASLSTFQQMWISKQEYDESGPSIVHRKCF

SEQ ID NO: 1201 - protein, 375 aa, Homo sapiens; identical to SEQ ID NO: 1200

SEQ ID NO: 1202 - protein, 375 aa, Homo sapiens; identical to SEQ ID NO: 1200

SEQ ID NO: 1203 - protein, 375 aa, Homo sapiens
MEEEIAALVIDNGSGMCKAGFAGDDAPRAVFPSIVGRPRHQGVMVGMGQKDSYVGDEAQSKRGILTLKYPIEHGIVTNWDDMEKIWHHTFYNELRVAPEEHPVLLTEAPLNPKANREKMTQIMFETFNTPAMYVAIQAVLSLYASGRTTGIVMDSGDGVTHTVPIYEGYALPHAILRLDLAGRDLTDYLMKILTERGYSFTTTAEREIVRDIKEKLCYVALDFEQEMATAASSSSLEKSYELPDGQVITIGNERFRCPEALFQPSFLGMESCGIHETTFNSIMKCDVDIRKDLYANTVLSGGTTMYPGIADRMQKEITALAPSTMKIKIIAPPERKYSVWIGGSILASLSTFQQMWISKQEYDESGPSIVHRKCF

SEQ ID NO: 1204 - protein, 393 aa, Homo sapiens [sequence omitted]

SEQ ID NO: 1205 - protein, 461 aa, Homo sapiens [sequence omitted]

SEQ ID NO: 1206 - protein, 259 aa, Homo sapiens [sequence omitted]

SEQ ID NO: 1207 - protein, 323 aa, Homo sapiens
MDSKYQCVKLNDGHFMPVLGFGTYAPAEVPKSKALEAVKLAIEAGFHHIDSAHVYNNEEQVGLAIRSKIADGSVKREDIFYTSKLWSNSHRPELVRPALERSLKNLQLDYVDLYLIHFPVSVKPGEEVIPKDENGKILFDTVDLCATWEAMEKCKDAGLAKSIGVSNFNHRLLEMILNKPGLKYKPVCNQVECHPYFNQRKLLDFCKSKDIVLVAYSALGSHREEPWVDPNSPVLLEDPVLCALAKKHKRTPALIALRYQLQRGVVVLAKSYNEQRIRQNVQVFEFQLTSEEMKAIDGLNRNVRYLTLDIFAGPPNYPFSDEY

SEQ ID NO: 1208 - protein, 323 aa, Homo sapiens
MDPKYQRVELNDGHFMPVLGFGTYAPPEVPRNRAVEVTKLAIEAGFRHIDSAYLYNNEEQVGLAIRSKIADGSVKREDIFYTSKLWCTFFQPQMVQPALESSLKKLQLDYVDLYLLHFPMALKPGETPLPKDENGKVIFDTVDLSATWEVMEKCKDAGLAKSIGVSNFNCRQLEMILNKPGLKYKPVCNQVECHPYLNQSKLLDFCKSKDIVLVAHSALGTQRHKLWVDPNSPVLLEDPVLCALAKKHKQTPALIALRYQLQRGVVVLAKSYNEQRIRENIQVFEFQLTSEDMKVLDGLNRNYRYVVMDFLMDHPDYPFSDEY

SEQ ID NO: 1209 - protein, 258 aa, Homo sapiens
PQVPKSKALEATKLAIEAGFRHIDSAHLYNNEEQVGLAIRSKIADGSVKREDIFYTSKLWCNSHRPELVRPALERSLKNLQLDYVDLYLIHFPVSVKPGEEVIPKDENGKILFDTVDLCATWEAVEKCKDAGLAKSIGVSNFNRRQLEMILNKPGLKYKPVCNQVECHPYFNQRKLLDFCKSKDIVLVAYSALGSHREEPWVDPNSPVLLEDPVLCALAKKHKRTPALIALRYQLQRGVVVLAKSYNEQRIRQNVQVR

SEQ ID NO: 1210 - protein, 323 aa, Homo sapiens
MDSKYQCVKLNDGHFMPVLGFGTYAPAEVPKSKALEATKLAIEAGFRHIDSAHLYNNEEQVGLAIRSKIADGSVKREDIFYTSKLWCNSHRPELVRPALERSLKNLQLDYVDLYLIHFPVSVKPGEEVIPKDENGKILFDTVDLCATWEAVEKCKDAGLAKSIGVSNFNRRQLEMILNKPGLKYKPVCNQVECHPYFNQRKLLDFCKSKDIVLVAYSALGSHREEPWVDPNSPVLLEDPVLCALAKKHKRTPALIALRYQLQRGVVVLAKSYNEQRIRQNVQVFEFQLTSEEMKAIDGLNRNVRYLTLDIFAGPPNYPFSDEY

SEQ ID NO: 1211 - protein, 323 aa, Homo sapiens
MDPKYQRVELNDGHFMPVLGFGTYAPPEVPRNRAVEVTKLAIEAGFRHIDSAYLYNNEEQVGLAIRSKIADGSVKREDIFYTSKLWCTFFQPQMVQPALESSLKKLQLDYVDLYLLHFPMALKPGETPLPKDENGKVIFDTVDLSATWEVMEKCKDAGLAKSIGVSNFNCRQLEMILNKPGLKYKPVCNQVECHPYLNQSKLLDFCKSKDIVLVAHSALGTQRHKLWVDPNSPVLLEDPVLCALAKKHKRTPALIALRYQLQRGVVVLAKSYNEQRIRENIQVFEFQLTSEDMKVLDGLNRNYRYVVMDFLMDHPDYPFSDEY

SEQ ID NO: 1212 - protein, 450 aa, Homo sapiens [sequence omitted]

SEQ ID NO: 1213 - protein, 166 aa, Homo sapiens
EVLCTPPPKIKNGKHTFSEVEVFEYLDAVTYSCDPAPGPDPFSLIGESTIYCGDNSVWSRAAPECKVVKCRFPVVENGKQISGFGKKFYYKATVMFECDKGFYLDGSDTIVCDSNSTWDPPVPKCLKGTKVIFFLSWFVIVVAVHFRLYFFDINYQSYKITEKKQF

SEQ ID NO: 1214 - protein, 669 aa, Homo sapiens
MAAAQEADGARSAVVAAGGGSSGQVTSNGSIGRDPPAETQPQNPPAQPAPNAWQVIKGVLFRIFIIWAISSWFRRGPAPQDQAGPGGAPRVASRNLFPKDTLMNLHVYISEHEHFTDFNATSALFWEQHDLVYGDWTSGENSDGCYEHFAELDIPQSVQQNGSIYIHVYFTKSGFHPDPRQKALYRRLATVHMSRMINKYKRRRFQKTKNLLTGETEADPEMIKRAEDYGPVEVISHWHPNITINIVDDHTPWVKGSVPPPLDQYVKFDAVSGDYYPIIYFNDYWNLQKDYYPINESLASLPLRVSFCPLSLWRWQLYAAQSTKSPWNFLGDELYEQSDEEQDSVKVALLETNPYLLALTIIVSIVHSVFEFLAFKNDIQFWNSRQSLEGLSVRSVFFGVFQSFVVLLYILDNETNFVVQVSVFIGVLIDLWKITKVMDVRLDREHRVAGIFPRLSFKDKSTYIESSTKVYDDMAFRYLSWILFPLLGCYAVYSLLYLEHKGWYSWVLSMLYGFLLTFGFITMTPQLFINYKLKSVAHLPWRMLTYKALNTFIDDLFAFVIKMPVMYRIGCLRDDVVFFIYLYQRWIYRVDPTRVNEFGMSGEDPTAAAPVAEVPTAAGALTPTPAPTTTTATREEASTSLPTKPTQGASSASEPQEAPPKPAEDKKKD

SEQ ID NO: 1215 - protein, 567 aa, Homo sapiens
MNLHVYISEHEHFTDFNATSALFWEQHDLVYGDWTSGENSDGCYEHFAELDIPQSVQQNGSIYIHVYFTKSGFHPDPRQKALYRRLATVHMSRMINKYKRRRFQKTKNLLTGETEADPEMIKRAEDYGPVEVISHWHPNITINIVDDHTPWVKGSVPPPLDQYVKFDAVSGDYYPIIYFNDYWNLQKDYYPINESLASLPLRVSFCPLSLWRWQLYAAQSTKSPWNFLGDELYEQSDEEQDSVKVALLETNPYLLALTIIVSIVHSVFEFLAFKNDIQFWNSRQSLEGLSVRSVFFGVFQSFVVLLYILDNETNFVVQVSVFIGVLIDLWKITKVMDVRLDREHRVAGIFPRLSFKDKSTYIESSTKVYDDMAFRYLSWILFPLLGCYAVYSLLYLEHKGWYSWVLSMLYGFLLTFGFITMTPQLFINYKLKSVAHLPWRMLTYKALNTFIDDLFAFVIKMPVMYRIGCLRDDVVFFIYLYQRWIYRVDPTRVNEFGMSGEDPTAAAPVAEVPTAAGALTPTPAPTTTTATREEASTSLPTKPTQGASSASEPQEAPPKPAEDKKKD

SEQ ID NO: 1216 - protein, 255 aa, Homo sapiens [sequence omitted]

SEQ ID NO: 1217 - protein, 262 aa, Homo sapiens
MSLSNKLTLDKLDVKGKRVVMRVDFNVPMKNNQITNNQRIKAAVPSIKFCLDNGAKSVVLMSHLGRPDGVPMPDKYSLEPVAVELKSLLGKDVLFLKDCVGPEVEKACANPAAGSVILLENLRFHVEEEGKGKDASGNKVKAEPAKIEAFRASLSKLGDVYVNDAFGTAHRAHSSMVGVNLPQKAGGFLMKKELNYFAKALESPERPFLAILGGAKVADKIQLINNMLDKVNEMIIGGGMAFTFLKVLNNMEVGNKCQVDVK

SEQ ID NO: 1218 - protein, 417 aa, Homo sapiens
MSLSNKLTLDKLDVKGKRVVMRVDFNVPMKNNQITNNQRIKAAVPSIKFCLDNGAKSVVLMSHLGRPDGVPMPDKYSLEPVAVELKSLLGKDVLFLKDCVGPEVEKACANPAAGSVILLENLRFHVEEEGKGKDASGNKVKAEPAKIEAFRASLSKLGDVYVNDAFGTAHRAHSSMVGVNLPQKAGGFLMKKELNYFAKALESPERPFLAILGGAKVADKIQLINNMLDKVNEMIIGGGMAFTFLKVLNNMEIGTSLFDEEGAKIVKDLMSKAEKNGVKITLPVDFVTADKFDENAKTGQATVASGIPAGWMGLDCGPESSKKYAEAVTRAKQIVWNGPVGVFEWEAFARGTKALMDEVVKATSRGCITIIGGGDTATCCAKWNTEDKVSHVSTGGGASLELLEGKVLPGVDALSNI

SEQ ID NO: 1219 - protein, 416 aa, Homo sapiens
SLSNKLTLDKLDVKGKRVVMRVDFNVPMKNNQITNNQRIKAAVPSIKFCLDNGAKSVVLMSHLGRPDGVPMPDKYSLEPVAVELKSLLGKDVLFLKDCVGPEVEKACANPAAGSVILLENLRFHVEEEGKGKDASGNKVKAEPAKIEAFRASLSKLGDVYVNDAFGTAHRAHSSMVGVNLPQKAGGFLMKKELNYFAKALESPERPFLAILGGAKVADKIQLINNMLDKVNEMIIGGGMAFTFLKVLNNMEIGTSLFDEEGAKIVKDLMSKAEKNGVKITLPVDFVTADKFDENAKTGQATVASGIPAGWMGLDCGPESSKKYAEAVTRAKQIVWNGPVGVFEWEAFARGTKALMDEVVKATSRGCITIIGGGDTATCCAKWNTEDKVSHVSTGGGASLELLEGKVLPGVDALSNI

SEQ ID NO: 1220 - protein, 550 aa, Homo sapiens
AWVLGKEAMLGYQDYKTAMLSDIKALILKHEAFESYLAAAHQHRVEQIAAFAQELNELDYYDSHNVHTRCQKIWDQWDALGSLTNSRREALEKTEKQLEAIDHLHLEYAKRVAPFNNWMESAMEDLQDMFIIYTIEDTEGLISAHDQFKSTLPDADREHEAILAIHKEAQRIAERNHIKLSGSNPYTTVTPQIINSKWGKVQQLVPKRDHALLEEQSNQQSNKHLRCQFASQANVVGPWIQTKMEEIGLISTEMNGTLEDQLSHLKQCENSIVDYKPNLDLLEQQHQLIQEALIFDNKHTMEHIRVGREQLLTTIAPTIIEVENQILTRDVKGISQEQMQQFRASFNHFDKDHGGVLGPEGFKACLISLGYDVENDRQGEAEFNRIMSLVDPNHSGLVTFQAFIDFMSQETTDTDMADQVIASFKVLARDKNFITAEELRESCSPTRPSTLLPAWCPTRALTPCPVSSTTSLPPQPCMARATCEAPERPGPNTPYGLQEGPGQPHSPVPPLCIYAKHSLLSSRVAGWAGRGWGRLSPVSFWELARRFPRP

SEQ ID NO: 1221 - protein, 369 aa, Homo sapiens
MSSRGGKKKSTKTSRSAKAGVIFPVGRMLRYIKKGHPKYRIGVGAPVYMAAVLEYLTAEILELAGNAARDNKKGRVTPRHILLAVANDEELNQLLKGVTIASGGVLPNIHPELLAKKRGSKGKLEAIITPPPAKKAKSPSQKKPVSKKAGGKKGARKSKKKQGEVSKAASADSTTEGTPADGFTVLSTKSLFLGQKLQVVQADIASIDSDAVVHPTNTDFYIGGEVGNTLEKKGGKEFVEAVLELRKKNGPLEVAGAAVSAGHGLPAKFVIHCNSPVWGADKCEELLEKTVKNCLALADDKKLKSIAFPSIGSGRNGFPKQTAAQLILKAISSYFVSTMSSSIKTVYFVLFDSESIGIYVQEMAKLDAN

SEQ ID NO: 1222 - protein, 175 aa, Homo sapiens
MRCLTTPMLLRALAQAARAGPPGGRSLHSSAVAATYKYVNMQDPEMDMKSVTDRAARTLLWTELFRGLGMTLSYLFREPATINYPFEKGPLSPRFRGEHALRRYPSGEERCIACKLCEAICPAQAITIEAEPRADGSRRTTRYDIDMTKCIYCGFCQEACPVDAIVEGPNFEFST

SEQ ID NO: 1223 - protein, 488 aa, Homo sapiens
MDKILLSSGRDASLMVTNDGATILKNIGVDNPAAKVLVDMSRVQDDEVGDGTTSVTVLAAELLREAESLIAKKIHPQTIIAGWREATKAAREALLSSAVDHGSDEVKFRQDLMNIAGTTLSSKLLTHHKDHFTKLAVEAVLRLKGSGNLEAIHIIKKLGGSLADSYLDEGFLLDKKIGVNQPKRIENAKILIANTGMDTDKIKIFGSRVRVDSTAKVAEIEHAEKEKMKEKVERILKHGINCFINRQLIYNYPEQLFGAAGVMAIEHADFAGVERLALVTGGEIASTFDHPELVKLGSCKLIEEVMIGEDKLIHFSGVALGEACTIVLRGATQQILDEAERSLHDALCVLAQTVKDSRTVYGGGCSEMLMAHAVTQLANRTPGKEAVAMESYAKALRMLPTIIADNAGYDSADLVAQLRAAHSEGNTTAGLDMREGTIGDMAILGITESFQVKRQVLLSAAEAAEVILRVDNIIKAAPRKRVPDHHPC

SEQ ID NO: 1224 - protein, 535 aa, Homo sapiens
MASLSLAPVNIFKAGADEERAETARLTSFIGAIAIGDLVKSTLGPKGMDKILLSSGRDASLMVTNDGATILKNIGVDNPAAKVLVDMSRVQDDEVGDGTTSVTVLAAELLREAESLIAKKIHPQTIIAGWREATKAAREALLSSAVDHGSDEVKFRQDLMNIAGTTLSSKLLTHHKDHFTKLAVEAVLRLKGSGNLEAIHIIKKLGGSLADSYLDEGFLLDKKIGVNQPKRIENAKILIANTGMDTDKIKIFGSRVRVDSTAKVAEIEHAEKEKMKEKVERILKHGINCFINRQLIYNYPEQLFGAAGVMAIEHADFAGVERLALVTGGEIASTFDHPELVKLGSCKLIEEVMIGEDKLIHFSGVALGEACTIVLRGATQQILDEAERSLHDALCVLAQTVKDSRTVYGGGCSEMLMAHAVTQLANRTPGKEAVAMESYAKALRMLPTIIADNAGYDSADLVAQLRAAHSEGNTTAGLDMREGTIGDMAILGITESFQVKRQVLLSAAEAAEVILRVDNIIKAAPRKRVPDHHPC

SEQ ID NO: 1225 - protein, 534 aa, Homo sapiens
ASLSLAPVNIFKAGADEERAETARLTSFIGAIAIGDLVKSTLGPKGMDKILLSSGRDASLMVTNDGATILKNIGVDNPAAKVLVDMSRVQDDEVGDGTTSVTVLAAELLREAESLIAKKIHPQTIIAGWREATKAAREALLSSAVDHGSDEVKFRQDLMNIAGTTLSSKLLTHHKDHFTKLAVEAVLRLKGSGNLEAIHIIKKLGGSLADSYLDEGFLLDKKIGVNQPKRIENAKILIANTGMDTDKIKIFGSRVRVDSTAKVAEIEHAEKEKMKEKVERILKHGINCFINRQLIYNYPEQLFGAAGVMAIEHADFAGVERLALVTGGEIASTFDHPELVKLGSCKLIEEVMIGEDKLIHFSGVALGEACTIVLRGATQQILDEAERSLHDALCVLAQTVKDSRTVYGGGCSEMLMAHAVTQLANRTPGKEAVAMESYAKALRMLPTIIADNAGYDSADLVAQLRAAHSEGNTTAGLDMREGTIGDMAILGITESFQVKRQVLLSAAEAAEVILRVDNIIKAAPRKRVPDHHPC

SEQ ID NO: 1226 - protein, 535 aa, Homo sapiens; identical to SEQ ID NO: 1224

SEQ ID NO: 1227 - protein, 370 aa, Homo sapiens
MDAPRQVVNFGPGPAKLPHSVLLEIQKELLDYKGVGISVLEMSHRSSDFAKIINNTENLVRELLAVPDNYKVIFLQGGGCGQFSAVPLNLIGLKAGRCADYVVTGAWSAKAAEEAKKFGTINIVHPKLGSYTKIPDPSTWNLNPDASYVYYCANETVHGVEFDFIPDVKGAVLVCDMSSNFLSKPVDVSKFGVIFAGAQKNVGSAGVTVVIVRDDLLGFALRECPSVLEYKVQAGNSSLYNTPPCFSIYVMGLVLEWIKNNGGAAAMEKLSSIKSQTIYEIIDNSQGFYVCPVEPQNRSKMNIPFRIGNAKGDDALEKRFLDKALELNMLSLKGHRSVGGIRASLYNAVTIEDVQKLAAFMKKFLEMHQL

SEQ ID NO: 1228 - protein, 324 aa, Homo sapiens
MDAPRQVVNFGPGPAKLPHSVLLEIQKELLDYKGVGISVLEMSHRSSDFAKIINNTENLVRELLAVPDNYKVIFLQGGGCGQFSAVPLNLIGLKAGRCADYVVTGAWSAKAAEEAKKFGTINIVHPKLGSYTKIPDPSTWNLNPDASYVYYCANETVHGVEFDFIPDVKGAVLVCDMSSNFLSKPVDVSKFGVIFAGAQKNVGSAGVTVVIVRDDLLGFALRECPSVLEYKVQAGNSSLYNTPPCFSIYVMGLVLEWIKNNGGAAAMEKLSSIKSQTIYEIIDNSQGFYVSVGGIRASLYNAVTIEDVQKLAAFMKKFLEMHQL

SEQ ID NO: 1229 - protein, 324 aa, Homo sapiens; identical to SEQ ID NO: 1228

SEQ ID NO: 1230 - protein, 370 aa, Homo sapiens; identical to SEQ ID NO: 1227

SEQ ID NO: 1231 - protein, 324 aa, Homo sapiens; identical to SEQ ID NO: 1228

SEQ ID NO: 1232 - protein, 116 aa, Homo sapiens
HVLKLPVQASGCFQGRFGVIFAGAQKNVGSAGVTVVIVRDDLLGFALRECPSVLEYKVQAGNSSLYNTPPCFSIYVMGLVLEWIKNNGGAAAMEKLSSIKSQTIYEIIDNSQGFYV

SEQ ID NO: 1233 - protein, 370 aa, Homo sapiens; identical to SEQ ID NO: 1227

SEQ ID NO: 1234 - DNA, 7787 bp, Homo sapiens
cagccgtttccggagtctgcgctgcgcccggttccgccattgcggctctcctggcccctggagcctccgcccccgacccgagctctttcgtctgcctgccagtttcctgcgtccccggagaggatcctgctgagcccagcctcccccctccccttctcctcctctcccttggagagcccgggcagccactgccccgcagccccagtgacaggaggagaccataacccccgacagcgccatggcccagattctgccaattcgttttcaggagcatctccagctccagaacctgggtatcaacccagcaaacattggcttcagtaccctgactatggagtctgacaaattcatctgcattagagaaaaagtaggagagcaggcccaggtggtaatcattgatatgaatgacccaagtaatccaattcgaagaccaatttcagcagacagcgccatcatgaatccagctagcaaagtaattgcactgaaagctgggaaaactcttcagatttttaacattgaaatgaaaagtaaaatgaaggctcataccatgactgatgatgtcaccttttggaaatggatctctttgaatacggttgctcttgttacggataatgcagtttatcactggagtatggaaggagagtctcagccagtgaaaatgtttgatcgccattctagccttgcagggtgccagattatcaattaccgtacagatgcaaaacaaaagtggttacttctgactggtatatctgcacagcaaaatcgtgtggtgggagctatgcagctatattctgtagataggaaagtgtctcagcccattgaaggacatgcagctagctttgcacagtttaagatggaaggaaatgcagaagaatcaacgttattttgttttgcagttcggggccaagctggagggaagttacatattattgaagttggcacaccacctacagggaaccagccctttccaaagaaggcagtggatgtcttctttcctccagaagcacaaaatgattttcctgttgcaatgcagatcagtgaaaagcatgatgtggtgttcttgataaccaagtatggttatatccacctctatgatcttgagactggtacctgcatctacatgaatagaatcagtggagaaacaatttttgttactgcacctcatgaagccacagctggaataattggagtaaacagaaagggacaagttctgtcagtgtgtgtggaagaagaaaacataattccttacatcaccaatgttctacaaaatcctgatttggctctgagaatggctgtacgtaataacttagccggtgctgaagaactctttgcccggaaatttaatgctctttttgcccagggaaattactcggaggcagcaaaggtggctgctaatgcaccaaagggaattcttcgtactccagacactatccgtcggttccagagtgtcccagcccagccaggtcaaacttctcctctacttcagtactttggtatccttttggaccagggacagctcaacaaatacgaatccttagagctttgtaggcctgtacttcagcaagggcgaaaacagcttttggagaaatggttaaaagaagataagctggaatgttctgaagaactgggtgatcttgtgaaatctgtggaccctacattggcacttagtgtgtacctaagggctaacgtcccaaataaagtcattcagtgctttgcagaaacaggtcaagtccaaaagattgttttatatgctaaaaaagttggatacactccagattggatatttctgctgagaaatgtaatgcgaatcagtccagatcagggacagcagtttgcccaaatgttagttcaagatgaagagcctcttgctgacatcacacagattgtagatgtctttatggaatacaatctaattcagcagtgtactgcattcttgcttgatgctctgaagaataatcgcccatctgaaggtcctttacagacgcggttacttgagatgaaccttatgcatgcgcctcaagttgcagatgctattctaggcaatcagatgttcacacattatgaccgggctcatattgctcaactgtgtgaaaaggctggcctactgcagcgtgcattagaacatttcactgatttatatgatataaaacgtgcagtggttcacacccatcttcttaaccctgagtggttagtcaactactttggttccttatcagtagaagactccctagaatgtctcagagccatgctgtctgccaacatccgtcagaatctgcagatttgtgttcaggtggcttctaaatatcatgaacaactgtcaactcagtctctgattgaactttttgaatctttcaagagttttgaaggtctcttttattttctgggatccattgttaactttagccaggacccagatgtgcactttaaatatattcaggcagcttgcaagactgggcaaatcaaagaagtagaaagaatctgtagagaaagcaactgctacgatcctgagcgagtcaagaattttcttaaggaagcaaaactaacagatcagctaccacttatcattgtgtgtgatcgatttgactttgtccatgatttggtgctctatttatatagaaataatcttcaaaagtatatagagatatatgtacagaaggtgaatccaagtcgacttcctgtagttattggaggattacttgatgttgactgttctgaagatgtcataaaaaacttgattcttgttgtaagaggtcaattctctactgatgagcttgttgctgaggttgaaaaaagaaacagattgaaactgcttctgccttggctagaggccagaattcatgagggctgtgaggagcctgctactcacaatgccttagccaaaatctacatagacagtaataacaacccggagagatttcttcgtgaaaatccctactatgacagtcgcgttgttggaaagtattgtgagaagagagatccacatctggcctgtgttgcttatgaacgtggccaatgtgatctggaacttattaatgtttgcaatgagaattccctcttcaaaagtctttctcgctacctggtacgtcgaaaggatccagaattgtggggcagcgtgctgctggaaagcaatccttacaggagacccctaattgaccaggttgtacaaacagctttgtctgagactcaggaccctgaagaagtgtcagtaactgtaaaggctttcatgactgcagaccttcctaatgaactcattgaactgctggagaaaattgtccttgataactctgtattcagtgaacacaggaatctgcaaaacctccttatcctcactgcaattaaggctgaccgtacacgtgttatggagtatattaaccgcctggataattatgatgccccagatattgccaatatcgccatcagcaatgagctgtttgaagaagcatttgccattttccggaaatttgatgtcaatacttcagcagttcaggtcttaattgagcatattggaaacttggatcgggcatatgagtttgctgaacgttgcaatgaacctgcggtctggagtcaacttgcaaaagcccagttgcagaaaggaatggtgaaagaagccattgattcttatatcaaagcagatgatccttcctcctacatggaagttgttcaggctgccaatactagtggaaactgggaagaactggtgaagtacttgcagatggcccgtaagaaggctcgagagtcctatgtggagacagaactgatattcgcactggctaaaacaaaccgccttgcagagttagaagaatttatcaatggaccaaataatgctcatatccaacaagttggtgaccgttgttatgatgaaaaaatgtatgatgctgctaagttgttgtacaataatgtttccaattttggacgtttggcatctaccctggttcacctgggtgaatatcaggcagctgttgatggggctaggaaagctaacagtactcgaacatggaaagaggtctgcttcgcctgtgtagatgggaaagaattccgtcttgctcagatgtgtggacttcatattgttgtacatgcagatgaattagaagaacttatcaactactatcaggatcgtggctattttgaagagctgatcaccatgttggaagcagcactgggacttgagcgagctcacatgggaatgtttactgaattagctattctatactctaaatttaagcctcagaaaatgagggagcacctggagctgttctggtctagagtgaatattcccaaggtgctaagagctgcagaacaagctcatctttgggcagaactggtgtttttgtatgacaagtatgaagaatatgataatgccataattaccatgatgaatcatccaactgatgcctggaaagaagggcaattcaaagatatcattaccaaggttgccaatgtggaactatactacagagcaatacagttctacttagaattcaagcctctgttgttaaatgatttgctgatggtgctgtctccacggttggatcacactcgtgcagtcaattatttcagcaaggttaaacagctaccactggtgaaaccgtatttgcgttcagttcagaaccataacaacaaatctgtgaatgaatcattgaacaatctttttattacagaagaagattatcaggctctgcgaacatcaatagatgcttatgacaactttgacaatatctcgcttgctcagcgtttggaaaaacatgaactcattgagttcaggagaattgctgcttatctcttcaaaggcaacaatcgctggaaacagagtgtagagctgtgcaagaaagacagcctttacaaggatgcaatgcagtatgcttctgaatctaaagatactgaattggctgaagaactcctgcagtggtttttgcaggaagaaaaaagagagtgctttggagcttgtctgtttacctgttacgatcttttaaggccagatgtcgtcctagaaactgcatggaggcacaatatcatggattttgccatgccctatttcatccaggtcatgaaggagtacttgacaaaggtggataaattagatgcttcagaatcactgagaaaagaagaagaacaagctacagagacacaacccattgtttatggtcagccccagttgatgctgacagcaggacccagtgttgccgtccctccccaggcaccttttggttatggttataccgcaccaccgtatggacagccacagcctggctttgggtacagcatgtgagatgaagcgctgatcctgtagtcacctattttcgtactgaaacatcgtctttacccacttctcagtttataatgggggaaaacaggcaacgtgttcttgtaacctttatttcatgaaggacttctttttgtttctaactataaacttggatcacctatgttaaaaccttatttcacattccacatcattttagaatttattttcgaaggggaatagtttcaatgttttattcacttgggctttttttcttccccctctttctttaaagaactgctcaatattcaatctgttgtgaagaacctgatttgcactctgtagtgtttaaagaaacaaagaaactctaatattgaatctcttaaatttagtgtatgtaaacagcttacaaatacgtattgtctaaatgcatttaaatctgttttattcaaagaaaagctaaagcaaaaacactggcatatgaccatgcaagactgtcagtgccaacaaagacaacactaatcagcacatcgtacactggattgcagtgcttcccagattattgaaaaatgttacagacaacttgcctgatttttaaatgagcgtaaaaggccctctaacctatgcaggtttccccattatgcatatagaaaatgctagtatgttttgctcacttcatatgtaacaggtgcccttatgttgtgctgtatcctgtgctttttctgtgggaccattccattcaggagcaaagagcaccatgattccaatcttgtgtgtgtttactaacccttccctgaggtttgtgtatgttggatattgtggtgttttagatcactgagtgtacagaagagagaaattcaaacaaaatattgctgttcttcagttttgtttgtggaatttgaaattactcaaatttaaaataaattactggactgtggaaataacatagaattgaagttttaattaaataccactcaaacgaaaagaacagtagtttttgtagttttatattggatactgaggcattagggaggcatgaaaggaagaggaatgaggattgagacatgtgaagacattgtgcattatatcaatgtgcattcctgtagttcattaacaaggtacatgcaatagtctaaagaaccagagtcactactatagtggcttaacatttaatctgtctccaatattttaaccaagtgacaccgaggtttttatcgaagcatttcacttaaatgaacaaatcatggctgttatattaacttgaaataaaatatatttaaacatgtagttaacatgctctttctcatcatgaattataaaggtgcccaaattatgggtatcttgatttttttcaaaaattggttgtgtgaatccagctcttgcttatggctgagaatgttcctaaagttcatttcactatcccttaatcctcaatagctacacatacccccttgcctagttagtcttgcactgctttacaactctcttaggcaaattacctaacataagctccacagaagagttttttaaaacttaaaatccctgtcccaccaggtgtggtggctcatgcctgtaatcccagcactttgggaggctgaggcaggcggattgcttgaggccaggagttcgagacaagcctgaccaacatggtgactccatctctactaaaaataaaaaatcagccaggtgtgatggtggatgcctataagatcctagctgctactcaggaggcaggaggctgaggcatgagaatcacttgaacctgtgaggcaaaggttgtagtgagccaagatcacgtcactgcactccatcctgggtgacagaatgagactcttgtctcaaaaaacaaaaaaacctatttagtttcatccaggacattaagtgaaagtgtttaatgtgagtgcaggtcagtgaagaatacaatggtgcccctgctttgatttgtgggaggtgccatcagttttccccaccactgcttttgcaccctcagtgcaaatatcaacacagagaaaaaaaaaaataatagtattatgaaaacattgactctgtggagaccctgtgggttctgcagagtatactttgaaaactataagattatgagttctataaaataccaagtacagatgaactagaaaacaagcatatatccacaattaccagaattttcatagtattccttttagtagatatgccatgacagttacttagccaccccatgccatcctgttgggaatgccactacctttgaatttggagccatcagtctatctgaggcaaacctcagaaattacctgagccagaatcatgcacttagcactgagttcaactcagtcttaacgttgcattttgttgcatcacttttgcagccagtaaacattctgtttagaaatagttgctattgtggcatcattcacagttgcaatttttctcctgtgctgtcatatgcctgtgcgaagtgtattaaatgaatcaaatattagaaatttcaaggctgtctttagtgttctgcccacaatactccaccaatgaccttagaccttgagatggt

SEQ ID NO: 1235 - DNA, 6421 bp, Homo sapiens
cagccgtttccggagtctgcgctgcgcccggttccgccattgcggctctcctggcccctggagcctccgcccccgacccgagctctttcgtctgcctgccagtttcctgcgtccccggagaggatcctgctgagcccagcctcccccctccccttctcctcctctcccttggagagcccgggcagccactgccccgcagccccagtgacaggaggagaccataacccccgacagcgccatggcccagattctgccaattcgttttcaggagcatctccagctccagaacctgggtatcaacccagcaaacattggcttcagtaccctgactatggagtctgacaaattcatctgcattagagaaaaagtaggagagcaggcccaggtggtaatcattgatatgaatgacccaagtaatccaattcgaagaccaatttcagcagacagcgccatcatgaatccagctagcaaagtaattgcactgaaagctgggaaaactcttcagatttttaacattgaaatgaaaagtaaaatgaaggctcataccatgactgatgatgtcaccttttggaaatggatctctttgaatacggttgctcttgttacggataatgcagtttatcactggagtatggaaggagagtctcagccagtgaaaatgtttgatcgccattctagccttgcagggtgccagattatcaattaccgtacagatgcaaaacaaaagtggttacttctgactggtatatctgcacagcaaaatcgtgtggtgggagctatgcagctatattctgtagataggaaagtgtctcagcccattgaaggacatgcagctagctttgcacagtttaagatggaaggaaatgcagaagaatcaacgttattttgttttgcagttcggggccaagctggagggaagttacatattattgaagttggcacaccacctacagggaaccagccctttccaaagaaggcagtggatgtcttctttcctccagaagcacaaaatgattttcctgttgcaatgcagatcagtgaaaagcatgatgtggtgttcttgataaccaagtatggttatatccacctctatgatcttgagactggtacctgcatctacatgaatagaatcagtggagaaacaatttttgttactgcacctcatgaagccacagctggaataattggagtaaacagaaagggacaagttctgtcagtgtgtgtggaagaagaaaacataattccttacatcaccaatgttctacaaaatcctgatttggctctgagaatggctgtacgtaataacttagccggtgctgaagaactctttgcccggaaatttaatgctctttttgcccagggaaattactcggaggcagcaaaggtggctgctaatgcaccaaagggaattcttcgtactccagacactatccgtcggttccagagtgtcccagcccagccaggtcaaacttctcctctacttcagtactttggtatccttttggaccagggacagctcaacaaatacgaatccttagagctttgtaggcctgtacttcagcaagggcgaaaacagcttttggagaaatggttaaaagaagataagctggaatgttctgaagaactgggtgatcttgtgaaatctgtggaccctacattggcacttagtgtgtacctaagggctaacgtcccaaataaagtcattcagtgctttgcagaaacaggtcaagtccaaaagattgttttatatgctaaaaaagttggatacactccagattggatatttctgctgagaaatgtaatgcgaatcagtccagatcagggacagcagtttgcccaaatgttagttcaagatgaagagcctcttgctgacatcacacagattgtagatgtctttatggaatacaatctaattcagcagtgtactgcattcttgcttgatgctctgaagaataatcgcccatctgaaggtcctttacagacgcggttacttgagatgaaccttatgcatgcgcctcaagttgcagatgctattctaggcaatcagatgttcacacattatgaccgggctcatattgctcaactgtgtgaaaaggctggcctactgcagcgtgcattagaacatttcactgatttatatgatataaaacgtgcagtggttcacacccatcttcttaaccctgagtggttagtcaactactttggttccttatcagtagaagactccctagaatgtctcagagccatgctgtctgccaacatccgtcagaatctgcagatttgtgttcaggtggcttctaaatatcatgaacaactgtcaactcagtctctgattgaactttttgaatctttcaagagttttgaaggtctcttttattttctgggatccattgttaactttagccaggacccagatgtgcactttaaatatattcaggcagcttgcaagactgggcaaatcaaagaagtagaaagaatctgtagagaaagcaactgctacgatcctgagcgagtcaagaattttcttaaggaagcaaaactaacagatcagctaccacttatcattgtgtgtgatcgatttgactttgtccatgatttggtgctctatttatatagaaataatcttcaaaagtatatagagatatatgtacagaaggtgaatccaagtcgacttcctgtagttattggaggattacttgatgttgactgttctgaagatgtcataaaaaacttgattcttgttgtaagaggtcaattctctactgatgagcttgttgctgaggttgaaaaaagaaacagattgaaactgcttctgccttggctagaggccagaattcatgagggctgtgaggagcctgctactcacaatgccttagccaaaatctacatagacagtaataacaacccggagagatttcttcgtgaaaatccctactatgacagtcgcgttgttggaaagtattgtgagaagagagatccacatctggcctgtgttgcttatgaacgtggccaatgtgatctggaacttattaatgtttgcaatgagaattccctcttcaaaagtctttctcgctacctggtacgtcgaaaggatccagaattgtggggcagcgtgctgctggaaagcaatccttacaggagacccctaattgaccaggttgtacaaacagctttgtctgagactcaggaccctgaagaagtgtcagtaactgtaaaggctttcatgactgcagaccttcctaatgaactcattgaactgctggagaaaattgtccttgataactctgtattcagtgaacacaggaatctgcaaaacctccttatcctcactgcaattaaggctgaccgtacacgtgttatggagtatattaaccgcctggataattatgatgccccagatattgccaatatcgccatcagcaatgagctgtttgaagaagcatttgccattttccggaaatttgatgtcaatacttcagcagttcaggtcttaattgagcatattggaaacttggatcgggcatatgagtttgctgaacgttgcaatgaacctgcggtctggagtcaacttgcaaaagcccagttgcagaaaggaatggtgaaagaagccattgattcttatatcaaagcagatgatccttcctcctacatggaagttgttcaggctgccaatactagtggaaactgggaagaactggtgaagtacttgcagatggcccgtaagaaggctcgagagtcctatgtggagacagaactgatattcgcactggctaaaacaaaccgccttgcagagttagaagaatttatcaatggaccaaataatgctcatatccaacaagttggtgaccgttgttatgatgaaaaaatgtatgatgctgctaagttgttgtacaataatgtttccaattttggacgtttggcatctaccctggttcacctgggtgaatatcaggcagctgttgatggggctaggaaagctaacagtactcgaacatggaaagaggtctgcttcgcctgtgtagatgggaaagaattccgtcttgctcagatgtgtggacttcatattgttgtacatgcagatgaattagaagaacttatcaactactatcaggatcgtggctattttgaagagctgatcaccatgttggaagcagcactgggacttgagcgagctcacatgggaatgtttactgaattagctattctatactctaaatttaagcctcagaaaatgagggagcacctggagctgttctggtctagagtgaatattcccaaggtgctaagagctgcagaacaagctcatctttgggcagaactggtgtttttgtatgacaagtatgaagaatatgataatgccataattaccatgatgaatcatccaactgatgcctggaaagaagggcaattcaaagatatcattaccaaggttgccaatgtggaactatactacagagcaatacagttctacttagaattcaagcctctgttgttaaatgatttgctgatggtgctgtctccacggttggatcacactcgtgcagtcaattatttcagcaaggttaaacagctaccactggtgaaaccgtatttgcgttcagttcagaaccataacaacaaatctgtgaatgaatcattgaacaatctttttattacagaagaagattatcaggctctgcgaacatcaatagatgcttatgacaactttgacaatatctcgcttgctcagcgtttggaaaaacatgaactcattgagttcaggagaattgctgcttatctcttcaaaggcaacaatcgctggaaacagagtgtagagctgtgcaagaaagacagcctttacaaggatgcaatgcagtatgcttctgaatctaaagatactgaattggctgaagaactcctgcagtggtttttgcaggaagaaaaaagagagtgctttggagcttgtctgtttacctgttacgatcttttaaggccagatgtcgtcctagaaactgcatggaggcacaatatcatggattttgccatgccctatttcatccaggtcatgaaggagtacttgacaaaggttgatgcaataaaggaaaaggtggataaattagatgcttcagaatcactgagaaaagaagaagaacaagctacagagacacaacccattgtttatggtcagccccagttgatgctgacagcaggacccagtgttgccgtccctccccaggcaccttttggttatggttataccgcaccaccgtatggacagccacagcctggctttgggtacagcatgtgagatgaagcgctgatcctgtagtcacctattttcgtactgaaacatcgtctttacccacttctcagtttataatgggggaaaacaggcaacgtgttcttgtaacctttatttcatgaaggacttctttttgtttctaactataaacttggatcacctatgttaaaaccttatttcacattccacatcattttagaatttattttcgaaggggaatagtttcaatgttttattcacttgggctttttttcttccccctctttctttaaagaactgctcaatattcaatctgttgtgaagaacctgatttgcactctgtagtgtttaaagaaacaaagaaactctaatattgaatctcttaaatttagtgtatgtaaacagcttacaaatacgtattgtctaaatgcatttaaatctgttttattcaaagaaaagctaaagcaaaaacactggcatatgaccatgcaagactgtcagtgccaacaaagacaacactaatcagcacatcgtacactggattgcagtgcttcccagattattgaaaaatgttacagacaacttgcctgatttttaaatgagcgtaaaaggccctctaacctatgcaggtttccccattatgcatatagaaaatgctagtatgttttgctcacttcatatgtaacaggtgcccttatgttgtgctgtatcctgtgctttttctgtgggaccattccattcaggagcaaagagcaccatgattccaatcttgtgtgtgtttactaacccttccctgaggtttgtgtatgttggatattgtggtgttttagatcactgagtgtacagaagagagaaattcaaacaaaatattgctgttcttcagttttgtttgtggaatttgaaattactcaaatttaaaataaattactggactgtggaaataacatagaattgaagttttaattaaataccactcaaacgcatgaaaggaagaggaatgaggattgagacatgtgaagacattgtgcattatatcaatgtgcattcctgtagttcattaacaaggtacatgcaatagtctaaagaaccagagtcactactatagtggcttaacatttaatctgtctccaatattttaaccaagtgacaccgaggttttta

SEQ ID NO: 1236 - DNA, 7787 bp, Homo sapiens; identical to SEQ ID NO: 1234

SEQ ID NO: 1237 - DNA, 7787 bp, Homo sapiens; identical to SEQ ID NO: 1234

SEQ ID NO: 1238 - DNA, 7787 bp, Homo sapiens; identical to SEQ ID NO: 1234

SEQ ID NO: 1239 - DNA, 2436 bp, Homo sapiens
ccgggaccatggagcctggtgacgcggcgcgccctggctcgggtcgggctaccggggcgccgccgccgcggctgctgctgctgccgctgctgctgggttgggggctgcgagtcgcggccgcggcctcggcctcctcctctggggcggcggcggaggacagcagcgccatggaggagctcgctactgagaaggaggcggaggagagccaccggcaagacagcgtgagcctgctcaccttcatcctgctgctcacgctcaccatcctcaccatctggctcttcaagcaccgccgggtgcgctttctgcacgagaccgggctggccatgatctatgggctcatcgttggggtgatcctgaggtatggtacccctgctaccagtggccgtgacaaatcactcagctgcactcaggaagacagggccttcagtaccttattagtgaatgtcagcggaaagttcttcgaatacactctgaaaggagaaatcagtcctggcaagatcaacagcgtagagcagaatgatatgctacggaaggtaacattcgatccagaagtatttttcaacattcttctgcctccaattatttttcatgctggatacagcttaaagaagagacactttttcagaaatcttggatctatactggcctatgccttcttggggactgctgtttcatgcttcattattggaaatctcatgtatggtgtggtgaagctcatgaagattatgggacagctctcagataaattttactacacagattgtctcttttttggagcaatcatctctgccactgacccagtgactgtgctggcgatatttaatgaattgcatgcagacgtggatctttacgcacttctttttggagagagcgtcctaaatgatgctgttgccattgtactgtcctcgtctattgttgcctaccagccagcgggactgaacactcacgcctttgatgctgctgccttttttaagtcagttggcatttttctaggtatatttagtggctcttttaccatgggagctgtgactggtgttaatgccaacgtgactaagtttaccaaactgcactgcttccccctgctggagacggcgctgttcttcctcatgtcctggagcacgtttctcttggcagaagcctgcggatttacaggtgttgtagctgtccttttctgtggaatcacacaagctcattacacctacaacaatctgtcggtggaatcaagaagtcgaaccaagcagctctttgaggtgttacatttcctggcagagaacttcatcttctcctacatgggcctggcactgtttaccttccagaagcacgttttcagccccattttcatcatcggagcttttgttgccatcttcctgggcagagccgcgcacatctacccgctctccttcttcctcaacttgggcagaaggcataagattggctggaattttcaacacatgatgatgttttcaggcctcaggggagcaatggcatttgcgttggccatccgtgacacggcatcctatgctcgccagatgatgttcacgaccacccttctcattgtgttcttcactgtctggatcattggaggaggcacgacacccatgttgtcatggcttaacatcagagttggcgtcgaggagccctccgaagaggaccagaatgaacaccactggcagtacttcagagttggtgttgaccccgatcaagacccaccacccaacaacgacagctttcaagtcttacaaggggacggcccagattctgccagaggaaaccggacaaaacaggagagcgcatggatattcaggctgtggtacagctttgatcacaattacctgaagcccatcctcacacacagtggtcccccactaaccaccacgctccccgcctggtgtggcttactagctcgatgtctgaccagtccccaggtgtacgataaccaagagccactgagagaggaagactctgatttcatcctgaccgaaggcgacctgacattgacctacggggacagcacagtgactgcaaatggctcctcaagttcgcacaccgcctccacgagtctggagggcagccggagaacgaagagcagctcggaggaagtgctggagcgagacctgggaatgggagaccagaaggtttcgagccggggcacccgcctagtgtttcccctggaagataatgcttgactttccccccaagccctggcgcgatggggtaggctcccgatggggtgaggacagctgcaagccctagtgttgttggaggtggggcagtgactagattgaactaactcttctattttattggggtctgaagctattgtaacacttaaaatttaactcacaatgcagatggtgaggcaaaagtgtctctaaattcagacaaacgtagacctattcccacttttttcacatagtagtgcgctgtttcagagtt

SEQ ID NO: 1240 - DNA, 2436 bp, Homo sapiens; identical to SEQ ID NO: 1239

SEQ ID NO: 1241 - DNA, 2200 bp, Homo sapiens
ccgggaccatggagcctggtgacgcggcgcgccctggctcgggtcgggctaccggggcgccgccgccgcggctgctgctgctgccgctgctgctgggttgggggctgcgagtcgcggccgcggcctcggcctcctcctctggggcggcggcggaggacagcagcgccatggaggagctcgctactgagaaggaggcggaggagagccaccggcaagacagcgtgagcctgctcaccttcatcctgctgctcacgctcaccatcctcaccatctggctcttcaagcaccgccgggtgcgctttctgcacgagaccgggctggccatgatctatgggctcatcgttggggtgatcctgaggtatggtacccctgctaccagtggccgtgacaaatcactcagctgcactcaggaagacagggccttcagtaccttattagtgaatgtcagcggaaagttcttcgaatacactctgaaaggagaaatcagtcctggcaagatcaacagcgtagagcagaatgatatgctacggaaggtaacattcgatccagaagtatttttcaacattcttctgcctccaattatttttcatgctggatacagcttaaagaagagacactttttcagaaatcttggatctatactggcctatgccttcttggggactgctgtttcatgcttcattattggaaatctcatgtatggtgtggtgaagctcatgaagattatgggacagctctcagataaattttactacacagattgtctcttttttggagcaatcatctctgccactgacccagtgactgtgctggcgatatttaatgaattgcatgcagacgtggatctttacgcacttctttttggagagagcgtcctaaatgatgctgttgccattgtactgtcctcgtctattgttgcctaccagccagcgggactgaacactcacgcctttgatgctgctgccttttttaagtcagttggcatttttctaggtatatttagtggctcttttaccatgggagctgtgactggtgttaatgccaacgtgactaagtttaccaaactgcactgcttccccctgctggagacggcgctgttcttcctcatgtcctggagcacgtttctcttggcagaagcctgcggatttacaggtgttgtagctgtccttttctgtggaatcacacaagctcattacacctacaacaatctgtcggtggaatcaagaagtcgaaccaagcagctctttgaggtgttacatttcctggcagagaacttcatcttctcctacatgggcctggcactgtttaccttccagaagcacgttttcagccccattttcatcatcggagcttttgttgccatcttcctgggcagagccgcgcacatctacccgctctccttcttcctcaacttgggcagaaggcataagattggctggaattttcaacacatgatgatgttttcaggcctcaggggagcaatggcatttgcgttggccatccgtgacacggcatcctatgctcgccagatgatgttcacgaccacccttctcattgtgttcttcactgtctggatcattggaggaggcacgacacccatgttgtcatggcttaacatcagagttggcgtcgaggagccctccgaagaggaccagaatgaacaccactggcagtacttcagagttggtgttgaccccgatcaagacccaccacccaacaacgacagctttcaagtcttacaaggggacggcccagattctgccagaggaaaccggacaaaacaggagagcgcatggatattcaggctgtggtacagctttgatcacaattacctgaagcccatcctcacacacagtggtcccccactaaccaccacgctccccgcctggtgtggcttactagctcgatgtctgaccagtccccaggtgtacgataaccaagagccactgagagaggaagactctgatttcatcctgaccgaaggcgacctgacattgacctacggggacagcacagtgactgcaaatggctcctcaagttcgcacaccgcctccacgagtctggagggcagccggagaacgaagagcagctcggaggaagtgctggagcgagacctgggaatgggagaccagaaggtttcgagccggggcacccgcctagtgtttcccctggaagataatgcttgactttccccccaagc

SEQ ID NO: 1242 - DNA, 2436 bp, Homo sapiens; identical to SEQ ID NO: 1239

SEQ ID NO: 1243 - DNA, 3387 bp, Homo sapiens
agtcattggaggtgctttctgctgagtgagcgccctgggtggtgtgcataaatgagctgccacttcccagggagccctccgtgggctcttgctggtcagcccggggcctcagcccccgactggtccacacctgacccattcgccgccttcctgctctcccaggtgcaagccctggaacagcgcaaccagctgctggagacacgctggagcttcctgcagggccaggactcagccatcttcgacctcgggcatctctatgaggaatatcagggccggctgcaggaggaactgcgcaaagtgagccaggagcgggggcagctggaggccaacctgctgcaggtgctggagaaggttgaggagtttcgaatcaggtatgaggatgagatctccaagcgcacagacatggagttcacctttgttcagctgaagaaggtagcctgcccagcctgccccaggggctccttcctcatgggccctgggccctctttccctccagatatcctactctcctttatgcccaatcaaagccctcagaggcttaagtcccaggaccaacagacagacagggagatacccccatccccatccagctcctttttcgaggctctgagccagatctcctctggaatcacccccactctcacccaggaggcagccccccagcccactcctgccctgggaccctccattccctctcccaccactcaccactgctgccaaccccaggacctggatgcagagtgtcttcatcggactgaactggaaaccaagttaaaaagcctggagagcttcgtggagttgatgaaaaccatctatgagcaggagctgaaggacctggcagcacaggtgaaggatgtgtcggtgaccgtcggcatggacagccgctgccacatcgacctgagcggcatcgtggaggaggtgaaggcccagtatgacgccgtcgcggctcgcagcctggaggaggccgaggcatactctcggagccagctggaggagcaggccgcccgctcggccgagtatgggagcagcctccagagcagccgcagcgagatcgcggatctcaatgtgcgcatccagaagctgcggtcccagatcctctctgtcaagagccattgcctgaaactggaggagaacatcaagacagctgaggagcagggtgagctggccttccaggatgccaagaccaagctggcccagctggaggccgccctgcagcaggccaagcaggacatggcgcggcagctgcgcaagtaccaggagctgatgaacgtcaagctggccctggacatcgagatcgccacctacaggaagctggtggagggcgaggagggcaggatggactcgccctcagccactgtggtcagcgctgtgcagtccaggtgcaaaaccgctgcctccagatcaggcctctccaaggccccctcccgaaagaagaagggcagcaaaggccccgtgatcaaaatcaccgaaatgtcagagaagtacttctcgcaggagtcggaggtctcagagtaaggcggctggaccccaggaaccccagggcactccactgcagcaggagggacttaagctagactcaagaaagcagcttggagcctctaggttgagaagagaggcaaaacctgatattgaactgagagaggggttcaaaactgactgtgttttgtgggctgccacggtgggagaggagcatcaccagctcctcagagccactccgctccatatcagtatctcacagtcccatccttccaaccttctggccagaggttttcctgatgggtgagtcggaattaggggtcagttttgtctccacctcctcgctcctctgaggctcctcctccagcatcaggctctgccaaggcccctctgactcttgcccaatccttgaccttgactcctatctcaagccttgccttgtctctgcctcggaactgggactgggactggctcatccacctatgtgcgggagccgaggaggacggcgtgggccctgtcctgtatctggaattcctgggaaggctggctgctgaagaccctcttggctttcccgtgctctttgggctccccagagacctgacagtattagggagtgaagggaggaggggccctggctatttgggacctaagcctaggccccagagatcagcccgaacacccgcatcccttcctcctcccatgggtccctcccagtaggcagtagtcagaactggatgggctgcccccagccagctcccagcagcttctccgaaagctgctcttgccataatcaactccctgggagtggaagccagatggcagcttgagattgggcaggagcattcgatcttcctttcacctccctgccatgctggggtcctacccagcctggatctgagctctgtgcccccagccgggttgttcccagcctgagcaccgggctttggtgcaccaggccttggagacccctggtcccacccctgccgtgaagccccaggcccacttcccaagaatctcacttctcagggcctctgttctcctctccactgggccaaatagcctggccctcccctccttggcattcatgggggagcccaggaaccccccacacctatggggttagagctcctcctttcttctcactccttccccttcctccctccatgcccactccccctgcctccagcaggccaggaagaaggcacagtccaggcaagtctgggagcttccaagcccttgaggtccagctgtggggcccaaatgacagccttacaagggttctaccagagaggaaaattccacatcccaccagaagacaggggtgttggcaggcatactcctatctcctcctcttggctctcaatgctgaggcttgcagaggcatcccagcggcaccagcctcccactgcacagcttccttccctccttcactctcctctcccctccctgccccttgcctcacctcctcttctagactgcattagattcattcatctcattttccaggacatgttggccagaggtctgggcccatcccaggcctcaaggccctccaggcctgtggggagcactggagggttactgactctctggccatgggaactcagagattctcatccccaaagtcccaaaagagggtgctgattggtgcttttcctcaggctcttcattggtttccaagggagcaaatcctcagtggggatacaagacatataaagtatatattattttttcataacttatgtggcttttaacttattgcttcccttcctgtttctgcatgatcagtctgtatgtactatctggaaagataacacatactccagccacctcacctgattggctatcttggggccatgtccccttcttgctgccacaggatgaataaagtgttgagatttgtctatggag

SEQ ID NO: 1244 - DNA, 3859 bp, Homo sapiens
cgccccagctgtgaccagagcaaccagagcctgccacccgacgcaaccccaggctcactcgctcacccccctgggccctcctgcttccggccgggggcaccatggcctgccgctcctgcgtggttggcttcagcagcctcagcagctgtgaggtgaccccggtgggcagcccccggcctggaacctcaggatgggacagctgcagggcccccgggccgggcttcagctcccgcagcctcacaggctgctggtcggctggcactatctccaaggtgactgtgaaccccggcctgctggtgcccctggatgtcaagttggaccccgctgttcagcagctgaagaaccaggagaaggaggagatgaaggccctcaatgataaatttgcctccctaattggcaaggtgcaagccctggaacagcgcaaccagctgctggagacacgctggagcttcctgcagggccaggactcagccatcttcgacctcgggcatctctatgaggaatatcagggccggctgcaggaggaactgcgcaaagtgagccaggagcgggggcagctggaggccaacctgctgcaggtgctggagaaggttgaggagtttcgaatcaggtatgaggatgagatctccaagcgcacagacatggagttcacctttgttcagctgaagaaggacctggatgcagagtgtcttcatcggactgaactggaaaccaagttaaaaagcctggagagcttcgtggagttgatgaaaaccatctatgagcaggagctgaaggacctggcagcacaggtgaaggatgtgtcggtgaccgtcggcatggacagccgctgccacatcgacctgagcggcatcgtggaggaggtgaaggcccagtatgacgccgtcgcggctcgcagcctggaggaggccgaggcatactctcggagccagctggaggagcaggccgcccgctcggccgagtatgggagcagcctccagagcagccgcagcgagatcgcggatctcaatgtgcgcatccagaagctgcggtcccagatcctctctgtcaagagccattgcctgaaactggaggagaacatcaagacagctgaggagcagggtgagctggccttccaggatgccaagaccaagctggcccagctggaggccgccctgcagcaggccaagcaggacatggcgcggcagctgcgcaagtaccaggagctgatgaacgtcaagctggccctggacatcgagatcgccacctacaggaagctggtggagggcgaggagggcaggatggactcgccctcagccactgtggtcagcgctgtgcagtccaggtgcaaaaccgctgcctccagatcaggcctctccaaggccccctcccgaaagaagaagggcagcaaaggccccgtgatcaaaatcaccgaaatgtcagagaagtacttctcgcaggagtcggaggtctcagagtaaggcggctggaccccaggaaccccagggcactccactgcagcaggagggacttaagctagactcaagaaagcagcttggagcctctaggttgagaagagaggcaaaacctgatattgaactgagagaggggttcaaaactgactgtgttttgtgggctgccacggtgggagaggagcatcaccagctcctcagagccactccgctccatatcagtatctcacagtcccatccttccaaccttctggccagaggttttcctgatgggtgagtcggaattaggggtcagttttgtctccacctcctcgctcctctgaggctcctcctccagcatcaggctctgccaaggcccctctgactcttgcccaatccttgaccttgactcctatctcaagccttgccttgtctctgcctcggaactgggactgggactggctcatccacctatgtgcgggagccgaggaggacggcgtgggccctgtcctgtatctggaattcctgggaaggctggctgctgaagaccctcttggctttcccgtgctctttgggctccccagagacctgacagtattagggagtgaagggaggaggggccctggctatttgggacctaagcctaggccccagagatcagcccgaacacccgcatcccttcctcctcccatgggtccctcccagtaggcagtagtcagaactggatgggctgcccccagccagctcccagcagcttctccgaaagctgctcttgccataatcaactccctgggagtggaagccagatggcagcttgagattgggcaggagcattcgatcttcctttcacctccctgccatgctggggtcctacccagcctggatctgagctctgtgcccccagccgggttgttcccagcctgagcaccgggctttggtgcaccaggccttggagacccctggtcccacccctgccgtgaagccccaggcccacttcccaagaatctcacttctcagggcctctgttctcctctccactgggccaaatagcctggccctcccctccttggcattcatgggggagcccaggaaccccccacacctatggggttagagctcctcctttcttctcactccttccccttcctccctccatgcccactccccctgcctccagcaggccaggaagaaggcacagtccaggcaagtctgggagcttccaagcccttgaggtccagctgtggggcccaaatgacagccttacaagggttctaccagagaggaaaattccacatcccaccagaagacaggggtgttggcaggcatactcctatctcctcctcttggctctcaatgctgaggcttgcagaggcatcccagcggcaccagcctcccactgcacagcttccttccctccttcactctcctctcccctccctgccccttgcctcacctcctcttctagactgcattagattcattcatctcattttccaggacatgttggccagaggtctgggcccatcccaggcctcaaggccctccaggcctgtggggagcactggagggttactgactctctggccatgggaactcagagattctcatccccaaagtcccaaaagagggtgctgattggtgcttttcctcaggctcttcattggtttccaagggagcaaatcctcagtggggatacaagacatataaagtatatattattttttcataacttatgtggcttttaacttattgcttcccttcctgtttctgcatgatcagtctgtatgtactatctggaaagataacacatactccagccacctcacctgattggctatcttggggccatgtccccttcttgctgccacaggatgaataaagtgttgagatttgtctatggagaaagctgtgtgtctgtttttatctcccctctcaggaccagtcagccactggtcaatcaggctgatcatggaacattaggaattctccaattaagggagaaaaagtccagggacttagttatatcttcagaccagtgcagctgggacacacaaagttctcctgtctcaccatctgatatggtttggatgctcgtcccctccaaatctcatgttgaaatgtaattcccagtgttggaagtggagcctggtgggaagtatttggatcatgagagaggatccttcatgaatggctcagcaccatctccttggtgatgagtgagttctcactcaattcacatagatatggttgtttaaaagagtctgagacctctcccctctttctcgccatgtgatatgcctgctcccccttcaccttccgcctttactgtaagcttcctgaggccctcaccagaagctgagcaaatgttggtgccatgccagtacagcctgcagaattgtgagccaaaataaatgtcttttctttataaa

SEQ ID NO: 1245 - DNA, 3859 bp, Homo sapiens; identical to SEQ ID NO: 1244

SEQ ID NO: 1246 - DNA, 2338 bp, Homo sapiens
aatcgaaagtagactcttttctgaagcatttcctgggatcagcctgaccacgctccatactgggagaggcttctgggtcaaaggaccagtctgcagagggatcctgtggctggaagcgaggaggctccacacggccgttgcagctaccgcagccaggatctgggcatccaggcacggccatgacccctccgaggctcttctgggtgtggctgctggttgcaggaacccaagcaccaggtatccccagtgatgatgacttggaggttcccgggggctcacctgggttcaggcgtgaacgatggtgacatgcggctggccgatgggggcgccaccaaccagggccgcgtggagatcttctacagaggccagtggggcactgtgtgtgacaacctgtgggacctgactgatgccagcgtcgtctgccgggccctgggcttcgagaacgccacccaggctctgggcagagctgccttcgggcaaggatcaggccccatcatgctggacgaggtccagtgcacgggaaccgaggcctcactggccgactgcaagtccctgggctggctgaagagcaactgcaggcacgagagagacgctggtgtggtctgcaccaatgaaaccaggagcacccacaccctggacctctccagggagctctcggaggcccttggccagatctttgacagccagcggggctgcgacctgtccatcagcgtgaatgtgcagggcgaggacgccctgggcttctgtggccacacggtcatcctgactgccaacctggaggcccaggccctgtggaaggagccgggcagcaatgtcaccatgagtgtggatgctgagtgtgtgcccatggtcagggaccttctcaggtacttctactcccgaaggattgacatcaccctgtcgtcagtcaagtgcttccacaagctggcctctgcctatggggccaggcagctgcagggctactgcgcaagcctctttgccatcctcctcccccaggacccctcgttccagatgcccctggacctgtatgcctatgcagtggccacaggggacgccctgctggagaagctctgcctacagttcctggcctggaacttcgaggccttgacgcaggccgaggcctggcccagtgtccccacagacctgctccaactgctgctgcccaggagcgacctggcggtgcccagcgagctggccctactgaaggccgtggacacctggagctggggggagcgtgcctcccatgaggaggtggagggcttggtggagaagatccgcttccccatgatgctccctgaggagctctttgagctgcagttcaacctgtccctgtactggagccacgaggccctgttccagaagaagactctgcaggccctggaattccacactgtgcccttccagttgctggcccggtacaaaggcctgaacctcaccgaggatacctacaagccccggatttacacctcgcccacctggagtgcctttgtgacagacagttcctggagtgcacggaagtcacaactggtctatcagtccagacgggggcctttggtcaaatattcttctgattacttccaagccccctctgactacagatactacccctaccagtccttccagactccacaacaccccagcttcctcttccaggacaagagggtgtcctggtccctggtctacctccccaccatccagagctgctggaactacggcttctcctgctcctcggacgagctccctgtcctgggcctcaccaagtctggcggctcagatcgcaccattgcctacgaaaacaaagccctgatgctctgcgaagggctcttcgtggcagacgtcaccgatttcgagggctggaaggctgcgattcccagtgccctggacaccaacagctcgaagagcacctcctccttcccctgcccggcagggcacttcaacggcttccgcacggtcatccgccccttctacctgaccaactcctcaggtgtggactagacggcgtggcccaagggtggtgagaaccggagaaccccaggacgccctcactgcaggctcccctcctcggcttccttcctctctgcaatgaccttcaacaaccggccaccagatgtcgccctactcacctgagcgctcagcttcaagaaattactggaaggcttccactagggtccaccaggagttctcccaccacctcaccagtttccaggtggtaagcaccaggacgccctcgaggttgctctgggatccccccacagcccctggtcagtctgcccttgtcactggtctgaggtcattaaaattacattgaggttcctacatttgtttgtacagaaagtgt

SEQ ID NO: 1247 - DNA, 2338 bp, Homo sapiens; identical to SEQ ID NO: 1246

SEQ ID NO: 1248 - DNA, 2257 bp, Homo sapiens
aatcgaaagtagactcttttctgaagcatttcctgggatcagcctgaccacgctccatactgggagaggcttctgggtcaaaggaccagtctgcagagggatcctgtggctggaagcgaggaggctccacacggccgttgcagctaccgcagccaggatctgggcatccaggcacggccatgacccctccgaggctcttctgggtgtggctgctggttgcaggaacccaaggcgtgaatgatggtgacatgcggctggccgatgggggcgccaccaaccagggccgcgtggagatcttctacagaggccagtggggcactgtgtgtgacaacctgtgggacctgactgatgccagcgtcgtctgccgggccctgggcttcgagaacgccacccaggctctgggcagagctgccttcgggcaaggatcaggccccatcatgctggacgaggtccagtgcacgggaaccgaggcctcactggccgactgcaagtccctgggctggctgaagagcaactgcaggcacgagagagacgctggtgtggtctgcaccaatgaaaccaggagcacccacaccctggacctctccagggagctctcggaggcccttggccagatctttgacagccagcggggctgcgacctgtccatcagcgtgaatgtgcagggcgaggacgccctgggcttctgtggccacacggtcatcctgactgccaacctggaggcccaggccctgtggaaggagccgggcagcaatgtcaccatgagtgtggatgctgagtgtgtgcccatggtcagggaccttctcaggtacttctactcccgaaggattgacatcaccctgtcgtcagtcaagtgcttccacaagctggcctctgcctatggggccaggcagctgcagggctactgcgcaagcctctttgccatcctcctcccccaggacccctcgttccagatgcccctggacctgtatgcctatgcagtggccacaggggacgccctgctggagaagctctgcctacagttcctggcctggaacttcgaggccttgacgcaggccgaggcctggcccagtgtccccacagacctgctccaactgctgctgcccaggagcgacctggcggtgcccagcgagctggccctactgaaggccgtggacacctggagctggggggagcgtgcctcccatgaggaggtggagggcttggtggagaagatccgcttccccatgatgctccctgaggagctctttgagctgcagttcaacctgtccctgtactggagccacgaggccctgttccagaagaagactctgcaggccctggaattccacactgtgcccttccagttgctggcccggtacaaaggcctgaacctcaccgaggatacctacaagccccggatttacacctcgcccacctggagtgcctttgtgacagacagttcctggagtgcacggaagtcacaactggtctatcagtccagacgggggcctttggtcaaatattcttctgattacttccaagccccctctgactacagatactacccctaccagtccttccagactccacaacaccccagcttcctcttccaggacaagagggtgtcctggtccctggtctacctccccaccatccagagctgctggaactacggcttctcctgctcctcggacgagctccctgtcctgggcctcaccaagtctggcggctcagatcgcaccattgcctacgaaaacaaagccctgatgctctgcgaagggctcttcgtggcagacgtcaccgatttcgagggctggaaggctgcgattcccagtgccctggacaccaacagctcgaagagcacctcctccttcccctgcccggcagggcacttcaacggcttccgcacggtcatccgccccttctacctgaccaactcctcaggtgtggactagacggcgtggcccaagggtggtgagaaccggagaaccccaggacgccctcactgcaggctcccctcctcggcttccttcctctctgcaatgaccttcaacaaccggccaccagatgtcgccctactcacctgagcgctcagcttcaagaaattactggaaggcttccactagggtccaccaggagttctcccaccacctcaccagtttccaggtggtaagcaccaggacgccctcgaggttgctctgggatccccccacagcccctggtcagtctgcccttgtcactggtctgaggtcattaaaattacattgaggttcct

SEQ ID NO: 1249 - DNA, 2280 bp, Homo sapiens
aatcgaaagtagactcttttctgaagcatttcctgggatcagcctgaccacgctccatactgggagaggcttctgggtcaaaggaccagtctgcagagggatcctgtggctggaagcgaggaggctccacacggccgttgcagctaccgcagccaggatctgggcatccaggcacggccatgacccctccgaggctcttctgggtgtggctgctggttgcaggaacccaaggcgtgaacgatggtgacatgcggctggccgatgggggcgccaccaaccagggccgcgtggagatcttctacagaggccagtggggcactgtgtgtgacaacctgtgggacctgactgatgccagcgtcgtctgccgggccctgggcttcgagaacgccacccaggctctgggcagagctgccttcgggcaaggatcaggccccatcatgctggacgaggtccagtgcacgggaaccgaggcctcactggccgactgcaagtccctgggctggctgaagagcaactgcaggcacgagagagacgctggtgtggtctgcaccaatgaaaccaggagcacccacaccctggacctctccagggagctctcggaggcccttggccagatctttgacagccagcggggctgcgacctgtccatcagcgtgaatgtgcagggcgaggacgccctgggcttctgtggccacacggtcatcctgactgccaacctggaggcccaggccctgtggaaggagccgggcagcaatgtcaccatgagtgtggatgctgagtgtgtgcccatggtcagggaccttctcaggtacttctactcccgaaggattgacatcaccctgtcgtcagtcaagtgcttccacaagctggcctctgcctatggggccaggcagctgcagggctactgcgcaagcctctttgccatcctcctcccccaggacccctcgttccagatgcccctggacctgtatgcctatgcagtggccacaggggacgccctgctggagaagctctgcctacagttcctggcctggaacttcgaggccttgacgcaggccgaggcctggcccagtgtccccacagacctgctccaactgctgctgcccaggagcgacctggcggtgcccagcgagctggccctactgaaggccgtggacacctggagctggggggagcgtgcctcccatgaggaggtggagggcttggtggagaagatccgcttccccatgatgctccctgaggagctctttgagctgcagttcaacctgtccctgtactggagccacgaggccctgttccagaagaagactctgcaggccctggaattccacactgtgcccttccagttgctggcccggtacaaaggcctgaacctcaccgaggatacctacaagccccggatttacacctcgcccacctggagtgcctttgtgacagacagttcctggagtgcacggaagtcacaactggtctatcagtccagacgggggcctttggtcaaatattcttctgattacttccaagccccctctgactacagatactacccctaccagtccttccagactccacaacaccccagcttcctcttccaggacaagagggtgtcctggtccctggtctacctccccaccatccagagctgctggaactacggcttctcctgctcctcggacgagctccctgtcctgggcctcaccaagtctggcggctcagatcgcaccattgcctacgaaaacaaagccctgatgctctgcgaagggctcttcgtggcagacgtcaccgatttcgagggctggaaggctgcgattcccagtgccctggacaccaacagctcgaagagcacctcctccttcccctgcccggcagggcacttcaacggcttccgcacggtcatccgccccttctacctgaccaactcctcaggtgtggactagacggcgtggcccaagggtggtgagaaccggagaaccccaggacgccctcactgcaggctcccctcctcggcttccttcctctctgcaatgaccttcaacaaccggccaccagatgtcgccctactcacctgagcgctcagcttcaagaaattactggaaggcttccactagggtccaccaggagttctcccaccacctcaccagtttccaggtggtaagcaccaggacgccctcgaggttgctctgggatccccccacagcccctggtcagtctgcccttgtcactggtctgaggtcattaaaattacattgaggttcctacatttgtttgtacagaaagtgt

SEQ ID NO: 1250 - DNA, 1251 bp, Homo sapiens
gttcagggcggggccggtcggtgagtcagcggctctctgatccagcccgggagaggaccgagctggaggagctgggtgtggggtgcgttgggctggtggggaggcctagtttgggtgcaagtaggtctgattgagcttgtgttgtgctgaagggacagccctgggtctaggggagagagtccctgagtgtgagacccgccttccccggtcccagcccctcccagttcccccagggacggccacttcctggtccccgacgcaaccatggctgaagaacaaccgcaggtcgaattgttcgtgaaggctggcagtgatggggccaagattgggaactgcccattctcccagagactgttcatggtactgtggctcaagggagtcaccttcaatgttaccaccgttgacaccaaaaggcggaccgagacagtgcagaagctgtgcccaggggggcagctcccattcctgctgtatggcactgaagtgcacacagacaccaacaagattgaggaatttctggaggcagtgctgtgccctcccaggtaccccaagctggcagctctgaaccctgagtccaacacagctgggctggacatatttgccaaattttctgcctacatcaagaattcaaacccagcactcaatgacaatctggagaagggactcctgaaagccctgaaggttttagacaattacttaacatcccccctcccagaagaagtggatgaaaccagtgctgaagatgaaggtgtctctcagaggaagtttttggatggcaacgagctcaccctggctgactgcaacctgttgccaaagttacacatagtacaggtggtgtgtaagaagtaccggggattcaccatccccgaggccttccggggagtgcatcggtacttgagcaatgcctacgcccgggaagaattcgcttccacctgtccagatgatgaggagatcgagctcgcctatgagcaagtggcaaaggccctcaaataagcccctcctgggactccctcaaccccctccattttctccacaaaggccctggtggtttccacattgctacccaatggacacactccaaaatggccagtgggcagggaatcctggagcacttgttccgggatggtgtggtggaagaggggatgagggaaagaaatggggggcctgggtcagatttttattgtggggtgggatgagtaggacaacatatttcagtaataaaatacagaataaaaatcaagtgtttttacgcaa

SEQ ID NO: 1251 - DNA, 1258 bp, Homo sapiens
cggcgctgagctggaattcgcggccgcgtcgacgcggctctctgatccagcccgggagaggaccgagctggaggagctgggtgtggggtgcgttgggctggtggggaggcctagtttgggtgcaagtaggtctgattgagcttgtgttgtgctgaagggacagccctgggtctaggggagagagtccctgagtgtgagacccgccttccccggtcccagcccctcccagttcccccagggacggccacttcctggtccccgacgcaaccatggctgaagaacaaccgcaggtcgaattgttcgtgaaggctggcagtgatggggccaagattgggaactgcccattctcccagagactgttcatggtactgtggctcaagggagtcaccttcaatgttaccaccgttgacaccaaaaggcggaccgagacagtgcagaagctgtgcccaggggggcagctcccattcctgctgtatggcactgaagtgcacacagacaccaacaagattgaggaatttctggaggcagtgctgtgccctcccaggtaccccaagctggcagctctgaaccctgagtccaacacagctgggctggacatatttgccaaattttctgcctacatcaagaattcaaacccagcactcaatgacaatctggagaagggactcctgaaagccctgaaggttttagacaattacttaacatcccccctcccagaagaagtggatgaaaccagtgctgaagatgaaggtgtctctcagaggaagtttttggatggcaacgagctcaccctggctgactgcaacctgttgccaaagttacacatagtacaggtggtgtgtaagaagtaccggggattcaccatccccgaggccttccggggagtgcatcggtacttgagcaatgcctacgcccgggaagaattcgcttccacctgtccagatgatgaggagatcgagctcgcctatgagcaagtggcaaaggccctcaaataagcccctcctgggactccctcaaccccctccattttctccacaaaggccctggtggtttccacattgctacccaatggacacactccaaaatggccagtgggcagggaatcctggagcacttgttccgggatggtgtggtggaagaggggatgagggaaagaaatggggggcctgggtcagatttttattgtggggtgggatgagtaggacaacatatttcagtaataaaatacagaataaaaatcaagtgtttttaaaaaaaa

SEQ ID NO: 1252 - DNA, 1251 bp, Homo sapiens; identical to SEQ ID NO: 1250

SEQ ID NO: 1253 - DNA, 8230 bp, Homo sapiens
ccgcccgccctgcagagcagccatggaggaggtggtgattgccggcatgtccgggaagctgccagagtcggagaacttgcaggagttctgggacaacctcatcggcggtgtggacatggtcacggacgatgaccgtcgctggaaggcggggctctacggcctgccccggcggtccggcaagctgaaggacctgtctaggtttgatgcctccttcttcggagtccaccccaagcaggcacacacgatggaccctcagctgcggctgctgctggaagtcacctatgaagccatcgtggacggaggcatcaacccagattcactccgaggaacacacactggcgtctgggtgggcgtgagcggctctgagacctcggaggccctgagccgagaccccgagacactcgtgggctacagcatggtgggctgccagcgagcgatgatggccaaccggctctccttcttcttcgacttcagagggcccagcatcgcactggacacagcctgctcctccagcctgatggccctgcagaacgcctaccaggccatccacagcgggcagtgccctgccgccatcgtggggggcatcaatgtcctgctgaagcccaacacctccgtgcagttcttgaggctggggatgctcagccccgagggcacctgcaaggccttcgacacagcggggaatgggtactgccgctcggagggtgtggtggccgtcctgctgaccaagaagtccctggcccggcgggtgtacgccaccatcctgaacgccggcaccaatacagatggcttcaaggagcaaggcgtgaccttcccctcaggggatatccaggagcagctcatccgctcgttgtaccagtcggccggagtggcccctgagtcatttgaatacatcgaagcccacggcacaggcaccaaggtgggcgacccccaggagctgaatggcatcacccgagccctgtgcgccacccgccaggagccgctgctcatcggctccaccaagtccaacatggggcacccggagccagcctcggggctggcagccctggccaaggtgctgctgtccctggagcacgggctctgggcccccaacctgcacttccatagccccaaccctgagatcccagcgctgttggatgggcggctgcaggtggtggaccagcccctgcccgtccgtggcggcaacgtgggcatcaactcctttggcttcgggggctccaacgtgcacatcatcctgaggcccaacacgcagccgccccccgcacccgccccacatgccaccctgccccgtctgctgcgggccagcggacgcacccctgaggccgtgcagaagctgctggagcagggcctccggcacagccaggacctggctttcctgagcatgctgaacgacatcgcggctgtccccgccaccgccatgcccttccgtggctacgctgtgctgggtggtgagcgcggtggcccagaggtgcagcaggtgcccgctggcgagcgcccgctctggttcatctgctctgggatgggcacacagtggcgcgggatggggctgagcctcatgcgcctggaccgcttccgagattccatcctacgctccgatgaggctgtgaagccattcggcctgaaggtgtcacagctgctgctgagcacagacgagagcacctttgatgacatcgtccattcgtttgtgagcctgactgccatccagataggcctcatagacctgctgagctgcatggggctgaggccagatggcatcgtcggccactccctgggggaggtggcctgtggctacgccgacggctgcctgtcccaggaggaggccgtcctcgctgcctactggaggggacagtgcatcaaagaagcccatctcccgccgggcgccatggcagccgtgggcttgtcctgggaggagtgtaaacagcgctgccccccgggcgtggtgcccgcctgccacaactccaaggacacagtcaccatctcgggacctcaggccccggtgtttgagttcgtggagcagctgaggaaggagggtgtgtttgccaaggaggtgcggaccggcggtatggccttccactcctacttcatggaggccatcgcacccccactgctgcaggagctcaagaaggtgatccgggagccgaagccacgttcagcccgctggctcagcacctctatccccaaggcccagtggcacagcagcctggcacgcacgtcctccgccgagtacaatgtcaacaacctggtgagccctgtgctgttccaggaggccctgtggcacgtgcctgagcacgcggtggtgctggagatcgcgccccacgccctgctgcaggctgtcctgaagcgtggcctgaagccgagctgcaccatcatccccctgatgaagaaggatcacagggacaacctggagttcttcctggccggcatcggcaggctgcacctctcaggcatcgacgccaaccccaatgccttgttcccacctgtggagttcccagctccccgaggaactcccctcatctccccactcatcaagtgggaccacagcctggcctgggacgtgccggccgccgaggacttccccaacggttcaggttccccctcagccgccatctacaacatcgacaccagctccgagtctcctgaccactacctggtggaccacaccctcgacggtcgcgtcctcttccccgccactggctacctgagcatagtgtggaagacgctggcccgcgccctgggcctgggcgtcgagcagctgcctgtggtgtttgaggatgtggtgctgcaccaggccaccatcctgcccaagactgggacagtgtccctggaggtacggctcctggaggcctcccgtgccttcgaggtgtcagagaacggcaacctggtagtgagtgggaaggtgtaccagtgggatgaccctgaccccaggctcttcgaccacccggaaagccccacccccaaccccacggagcccctcttcctggcccaggctgaagtttacaaggagctgcgtctgcgtggctacgactacggccctcatttccagggcatcctggaggccagcctggaaggtgactcggggaggctgctgtggaaggataactgggtgagcttcatggacaccatgctgcagatgtccatcctgggctcggccaagcacggcctgtacctgcccacccgtgtcaccgccatccacatcgaccctgccacccacaggcagaagctgtacacactgcaggacaaggcccaagtggctgacgtggtggtgagcaggtggctgagggtcacagtggcgggaggcgtccacatctccgggctccacactgagtcggccccgcggcggcagcaggagcagcaggtgcccatcctggagaagttttgcttcactccccacacggaggaggggtgcctgtctgagcgcgctgccctgcaggaggagctgcaactgtgcaaggggctggtgcaggcactgcagaccaaggtgacccagcaggggctgaagatggtggtgcccggactggatggggcccagatcccccgggacccctcacagcaggaactgccccggctgttgtcggctgcctgcaggcttcagctcaacgggaacctgcagctggagctggcgcaggtgctggcccaggagaggcccaagctgccagaggaccctctgctcagcggcctcctggactccccggcactcaaggcctgcctggacactgccgtggagaacatgcccagcctgaagatgaaggtggtggaggtgctggctggccacggtcacctgtattcccgcatcccaggcctgctcagcccccatcccctgctgcagctgagctacacggccaccgaccgccacccccaggccctggaggctgcccaggccgagctgcagcagcacgacgttgcccagggccagtgggatcccgcagaccctgcccccagcgccctgggcagcgccgacctcctggtgtgcaactgtgctgtggctgccctcggggacccggcctcagctctcagcaacatggtggctgccctgagagaagggggctttctgctcctgcacacactgctccgggggcaccccctcggggacatcgtggccttcctcacctccactgagccgcagtatggccagggcatcctgagccaggacgcgtgggagagcctcttctccagggtgtcgctgcgcctggtgggcctgaagaagtccttctacggctccacgctcttcctgtgccgccggcccaccccgcaggacagccccatcttcctgccggtggacgataccagcttccgctgggtggagtctctgaagggcatcctggctgacgaagactcttcccggcctgtgtggctgaaggccatcaactgtgccacctcgggcgtggtgggcttggtgaactgtctccgccgagagcccggcgggaaccgcctccggtgtgtgctgctctccaacctcagcagcacctcccacgtcccggaggtggacccgggctccgcagaactgcagaaggtgttgcagggagacctggtgatgaacgtctaccgcgacggggcctggggggctttccgccacttcctgctggaggaggacaagcctgaggagccgacggcacatgcctttgtgagcaccctcacccggggggacctgtcctccatccgctgggtctgctcctcgctgcgccatgcccagcccacctgccctggcgcccagctctgcacggtctactacgcctccctcaacttccgcgacatcatgctggccactggcaagctgtcccctgatgccatcccagggaagtggacctcccaggacagcctgctaggtatggagttctcgggccgagacgccagcggcaagcgtgtgatgggactggtgcctgccaagggcctggccacctctgtcctgctgtcaccggacttcctctgggatgtgccttccaactggacgctggaggaggcggcctcggtgcctgtcgtctacagcacggcctactacgcgctggtggtgcgtgggcgggtgcgccccggggagacgctgctcatccactcgggctcgggcggcgtgggccaggccgccatcgccatcgccctcagtctgggctgccgcgtcttcaccaccgtggggtcggctgagaagcgggcgtacctccaggccaggttcccccagctcgacagcaccagcttcgccaactcccgggacacatccttcgagcagcatgtgctgtggcacacgggcgggaagggcgttgacctggtcttgaactccttggcggaagagaagctgcaggccagcgtgaggtgcttggctacgcacggtcgcttcctggaaattggcaaattcgacctttctcagaaccacccgctcggcatggctatcttcctgaagaacgtgacattccacggggtcctactggatgcgttcttcaacgagagcagtgctgactggcgggaggtgtgggcgcttgtgcaggccggcatccgggatggggtggtacggcccctcaagtgcacggtgttccatggggcccaggtggaggacgccttccgctacatggcccaagggaagcacattggcaaagtcgtcgtgcaggtgcttgcggaggagccggaggcagtgctgaagggggccaaacccaagctgatgtcggccatctccaagaccttctgcccggcccacaagagctacatcatcgctggtggtctgggtggcttcggcctggagttggcgcagtggctgatacagcgtggggtgcagaagctcgtgttgacttctcgctccgggatccggacaggctaccaggccaagcaggtccgccggtggaggcgccagggcgtacaggtgcaggtgtccaccagcaacatcagctcactggagggggcccggggcctcattgccgaggcggcgcagcttgggcccgtgggcggcgtcttcaacctggccgtggtcttgagagatggcttgctggagaaccagaccccagagttcttccaggacgtctgcaagcccaagtacagcggcaccctgaacctggacagggtgacccgagaggcgtgccctgagctggactactttgtggtcttctcctctgtgagctgcgggcgtggcaatgcgggacagagcaactacggctttgccaattccgccatggagcgtatctgtgagaaacgccggcacgaaggcctcccaggcctggccgtgcagtggggcgccatcggcgacgtgggcattttggtggagacgatgagcaccaacgacacgatcgtcagtggcacgctgccccagcgcatggcgtcctgcctggaggtgctggacctcttcctgaaccagccccacatggtcctgagcagctttgtgctggctgagaaggctgcggcctatagggacagggacagccagcgggacctggtggaggccgtggcacacatcctgggcatccgcgacttggctgctgtcaacctggacagctcactggcggacctgggcctggactcgctcatgagcgtggaggtgcgccagacgctggagcgtgagctcaacctggtgctgtccgtgcgcgaggtgcggcaactcacgctccggaaactgcaggagctgtcctcaaaggcggatgaggccagcgagctggcatgccccacgcccaaggaggatggtctggcccagcagcagactcagctgaacctgcgctccctgctggtgaacccggagggccccaccctgatgcggctcaactccgtgcagagctcggagcggcccctgttcctggtgcacccaatcgagggctccaccaccgtgttccacagcctggcctcccggctcagcatccccacctatggcctgcagtgcacccgagctgcgccccttgacagcatccacagcctggctgcctactacatcgactgcatcaggcaggtgcagcccgagggcccctaccgcgtggccggctactcctacggggcctgcgtggcctttgaaatgtgctcccagctgcaggcccagcagagcccagcccccacccacaacagcctcttcctgttcgacggctcgcccacctacgtactggcctacacccagagctaccgggcaaagctgaccccaggctgtgaggctgaggctgagacggaggccatatgcttcttcgtgcagcagttcacggacatggagcacaacagggtgctggaggcgctgctgccgctgaagggcctagaggagcgtgtggcagccgccgtggacctgatcatcaagagccaccagggcctggaccgccaggagctgagctttgcggcccggtccttctactacaagctgcgtgccgctgagcagtacacacccaaggccaagtaccatggcaacgtgatgctactgcgcgccaagacgggtggcgcctacggcgaggacctgggcgcggactacaacctctcccaggtatgcgacgggaaagtatccgtccacgtcatcgagggtgaccaccgcacgctgctggagggcagcggcctggagtccatcatcagcatcatccacagctccctggctgagccacgcgtgagcgtgcgggagggctaggcccgtgcccccgcctgccaccggaggtcactccaccatccccaccccaccccaccccacccccgccatgcaacgggattgaagggtcctgccggtgggaccctgtccggcccagtgccactgccccccgaggctgctagacgtaggtgttaggcatgtcccacccacccgccgcctcccacggcacctcggggaacaccagagctgccgacttggagactcctggtctgtgaagagccggtggtgcccgtgcccgcaggaactgggctgggcctcgtgcgcccgtggggtctgcgcttggtctttctgtgcttggatttgcatatttattgcattgctggtagagacccccaggcctgtccaccctgccaagactcctcaggcagcgtgtgggtcccgcactctgcccccatttccccgatgccacacccagcggccccccgcacagccacccgtggggtgctgcccttatgcccggcgccgggcaccaactccatgtttggtgtttgtctgtgtttgtttttcaagaaatgattcaaattgctgcttggattttgaaatttactgtaactgtcagtgtacacgtctggaccccgtttcatttttacaccaatttggtaaaaatgctgctctcagcctcccacaattaaaccgcatgtgatctccaccacc

SEQ ID NO: 1254 - DNA, 8481 bp, Homo sapiens
gagagacggcagcggccccggcctccctctccgccgcgcttcagcctcccgctccgccgcgctccagcctcgctctccgccgcccgcaccgccgcccgcgccctcaccagagcagccatggaggaggtggtgattgccggcatgtccgggaagctgccagagtcggagaacttgcaggagttctgggacaacctcatcggcggtgtggacatggtcacggacgatgaccgtcgctggaaggcggggctctacggcctgccccggcggtccggcaagctgaaggacctgtctaggtttgatgcctccttcttcggagtccaccccaagcaggcacacacgatggaccctcagctgcggctgctgctggaagtcacctatgaagccatcgtggacggaggcatcaacccagattcactccgaggaacacacactggcgtctgggtgggcgtgagcggctctgagacctcggaggccctgagccgagaccccgagacactcgtgggctacagcatggtgggctgccagcgagcgatgatggccaaccggctctccttcttcttcgacttcagagggcccagcatcgcactggacacagcctgctcctccagcctgatggccctgcagaacgcctaccaggccatccacagcgggcagtgccctgccgccatcgtggggggcatcaatgtcctgctgaagcccaacacctccgtgcagttcttgaggctggggatgctcagccccgagggcacctgcaaggccttcgacacagcggggaatgggtactgccgctcggagggtgtggtggccgtcctgctgaccaagaagtccctggcccggcgggtgtacgccaccatcctgaacgccggcaccaatacagatggcttcaaggagcaaggcgtgaccttcccctcaggggatatccaggagcagctcatccgctcgttgtaccagtcggccggagtggcccctgagtcatttgaatacatcgaagcccacggcacaggcaccaaggtgggcgacccccaggagctgaatggcatcacccgagccctgtgcgccacccgccaggagccgctgctcatcggctccaccaagtccaacatggggcacccggagccagcctcggggctggcagccctggccaaggtgctgctgtccctggagcacgggctctgggcccccaacctgcacttccatagccccaaccctgagatcccagcgctgttggatgggcggctgcaggtggtggaccagcccctgcccgtccgtggcggcaacgtgggcatcaactcctttggcttcgggggctccaacgtgcacatcatcctgaggcccaacacgcagccgccccccgcacccgccccacatgccaccctgccccgtctgctgcgggccagcggacgcacccctgaggccgtgcagaagctgctggagcagggcctccggcacagccaggacctggctttcctgagcatgctgaacgacatcgcggctgtccccgccaccgccatgcccttccgtggctacgctgtgctgggtggtgagcgcggtggcccagaggtgcagcaggtgcccgctggcgagcgcccgctctggttcatctgctctgggatgggcacacagtggcgcgggatggggctgagcctcatgcgcctggaccgcttccgagattccatcctacgctccgatgaggctgtgaagccattcggcctgaaggtgtcacagctgctgctgagcacagacgagagcacctttgatgacatcgtccattcgtttgtgagcctgactgccatccagataggcctcatagacctgctgagctgcatggggctgaggccagatggcatcgtcggccactccctgggggaggtggcctgtggctacgccgacggctgcctgtcccaggaggaggccgtcctcgctgcctactggaggggacagtgcatcaaagaagcccatctcccgccgggcgccatggcagccgtgggcttgtcctgggaggagtgtaaacagcgctgccccccgggcgtggtgcccgcctgccacaactccaaggacacagtcaccatctcgggacctcaggccccggtgtttgagttcgtggagcagctgaggaaggagggtgtgtttgccaaggaggtgcggaccggcggtatggccttccactcctacttcatggaggccatcgcacccccactgctgcaggagctcaagaaggtgatccgggagccgaagccacgttcagcccgctggctcagcacctctatccccgaggcccagtggcacagcagcctggcacgcacgtcctccgccgagtacaatgtcaacaacctggtgagccctgtgctgttccaggaggccctgtggcacgtgcctgagcacgcggtggtgctggagatcgcgccccacgccctgctgcaggctgtcctgaagcgtggcctgaagccgagctgcaccatcatccccctgatgaagaaggatcacagggacaacctggagttcttcctggccggcatcggcaggctgcacctctcaggcatcgacgccaaccccaatgccttgttcccacctgtggagttcccagctccccgaggaactcccctcatctccccactcatcaagtgggaccacagcctggcctgggacgtgccggccgccgaggacttccccaacggttcaggttccccctcagccgccatctacaacatcgacaccagctccgagtctcctgaccactacctggtggaccacaccctcgacggtcgcgtcctcttccccgccactggctacctgagcatagtgtggaagacgctggcccgcgccctgggcctgggcgtcgagcagctgcctgtggtgtttgaggatgtggtgctgcaccaggccaccatcctgcccaagactgggacagtgtccctggaggtacggctcctggaggcctcccgtgccttcgaggtgtcagagaacggcaacctggtagtgagtgggaaggtgtaccagtgggatgaccctgaccccaggctcttcgaccacccggaaagccccacccccaaccccacggagcccctcttcctggcccaggctgaagtttacaaggagctgcgtctgcgtggctacgactacggccctcatttccagggcatcctggaggccagcctggaaggtgactcggggaggctgctgtggaaggataactgggtgagcttcatggacaccatgctgcagatgtccatcctgggctcggccaagcacggcctgtacctgcccacccgtgtcaccgccatccacatcgaccctgccacccacaggcagaagctgtacacactgcaggacaaggcccaagtggctgacgtggtggtgagcaggtggctgagggtcacagtggccggaggcgtccacatctccgggctccacactgagtcggccccgcggcggcagcaggagcagcaggtgcccatcctggagaagttttgcttcactccccacacggaggaggggtgcctgtctgagcgcgctgccctgcaggaggagctgcaactgtgcaaggggctggtgcaggcactgcagaccaaggtgacccagcaggggctgaagatggtggtgcccggactggatggggcccagatcccccgggacccctcacagcaggaactgccccggctgttgtcggctgcctgcaggcttcagctcaacgggaacctgcagctggagctggcgcaggtgctggcccaggagaggcccaagctgccagaggaccctctgctcagcggcctcctggactccccggcactcaaggcctgcctggacactgccgtggagaacatgcccagcctgaagatgaaggtggtggaggtgctggctggccacggtcacctgtattcccgcatcccaggcctgctcagcccccatcccctgctgcagctgagctacacggccaccgaccgccacccccaggccctggaggctgcccaggccgagctgcagcagcacgacgttgcccagggccagtgggatcccgcagaccctgcccccagcgccctgggcagcgccgacctcctggtgtgcaactgtgctgtggctgccctcggggacccggcctcagctctcagcaacatggtggctgccctgagagaagggggctttctgctcctgcacacactgctccgggggcaccccctcggggacatcgtggccttcctcacctccactgagccgcagtatggccagggcatcctgagccaggacgcgtgggagagcctcttctccagggtgtcgctgcgcctggtgggcctgaagaagtccttctacggctccacgctcttcctgtgccgccggcccaccccgcaggacagccccatcttcctgccggtggacgataccagcttccgctgggtggagtctctgaagggcatcctggctgacgaagactcttcccggcctgtgtggctgaaggccatcaactgtgccacctcgggcgtggtgggcttggtgaactgtctccgccgagagcccggcgggaaccgcctccggtgtgtgctgctctccaacctcagcagcacctcccacgtcccggaggtggacccgggctccgcagaactgcagaaggtgttgcagggagacctggtgatgaacgtctaccgcgacggggcctggggggctttccgccacttcctgctggaggaggacaagcctgaggagccgacggcacatgcctttgtgagcaccctcacccggggggacctgtcctccatccgctgggtctgctcctcgctgcgccatgcccagcccacctgccctggcgcccagctctgcacggtctactacgcctccctcaacttccgcgacatcatgctggccactggcaagctgtcccctgatgccatcccagggaagtggacctcccaggacagcctgctaggtatggagttctcgggccgagacgccagcggcaagcgtgtgatgggactggtgcctgccaagggcctggccacctctgtcctgctgtcaccggacttcctctgggatgtgccttccaactggacgctggaggaggcggcctcggtgcctgtcgtctacagcacggcctactacgcgctggtggtgcgtgggcgggtgcgccccggggagacgctgctcatccactcgggctcgggcggcgtgggccaggccgccatcgccatcgccctcagtctgggctgccgcgtcttcaccaccgtggggtcggctgagaagcgggcgtacctccaggccaggttcccccagctcgacagcaccagcttcgccaactcccgggacacatccttcgagcagcatgtgctgtggcacacgggcgggaagggcgttgacctggtcttgaactccttggcggaagagaagctgcaggccagcgtgaggtgcttggctacgcacggtcgcttcctggaaattggcaaattcgacctttctcagaaccacccgctcggcatggctatcttcctgaagaacgtgacattccacggggtcctactggatgcgttcttcaacgagagcagtgctgactggcgggaggtgtgggcgcttgtgcaggccggcatccgggatggggtggtacggcccctcaagtgcacggtgttccatggggcccaggtggaggacgccttccgctacatggcccaagggaagcacattggcaaagtcgtcgtgcaggtgcttgcggaggagccggaggcagtgctgaagggggccaaacccaagctgatgtcggccatctccaagaccttctgcccggcccacaagagctacatcatcgctggtggtctgggtggcttcggcctggagttggcgcagtggctgatacagcgtggggtgcagaagctcgtgttgacttctcgctccgggatccggacaggctaccaggccaagcaggtccgccggtggaggcgccagggcgtacaggtgcaggtgtccaccagcaacatcagctcactggagggggcccggggcctcattgccgaggcggcgcagcttgggcccgtgggcggcgtcttcaacctggccgtggtcttgagagatggcttgctggagaaccagaccccagagttcttccaggacgtctgcaagcccaagtacagcggcaccctgaacctggacagggtgacccgagaggcgtgccctgagctggactactttgtggtcttctcctctgtgagctgcgggcgtggcaatgcgggacagagcaactacggctttgccaattccgccatggagcgtatctgtgagaaacgccggcacgaaggcctcccaggcctggccgtgcagtggggcgccatcggcgacgtgggcattttggtggagacgatgagcaccaacgacacgatcgtcagtggcacgctgccccagcgcatggcgtcctgcctggaggtgctggacctcttcctgaaccagccccacatggtcctgagcagctttgtgctggctgagaaggctgcggcctatagggacagggacagccagcgggacctggtggaggccgtggcacacatcctgggcatccgcgacttggctgctgtcaacctggacagctcactggcggacctgggcctggactcgctcatgagcgtggaggtgcgccagacgctggagcgtgagctcaacctggtgctgtccgtgcgcgaggtgcggcaactcacgctccggaaactgcaggagctgtcctcaaaggcggatgaggccagcgagctggcatgccccacgcccaaggaggatggtctggcccagcagcagactcagctgaacctgcgctccctgctggtgaacccggagggccccaccctgatgcggctcaactccgtgcagagctcggagcggcccctgttcctggtgcacccaatcgagggctccaccaccgtgttccacagcctggcctcccggctcagcatccccacctatggcctgcagtgcacccgagctgcgccccttgacagcatccacagcctggctgcctactacatcgactgcatcaggcaggtgcagcccgagggcccctaccgcgtggccggctactcctacggggcctgcgtggcctttgaaatgtgctcccagctgcaggcccagcagagcccagcccccacccacaacagcctcttcctgttcgacggctcgcccacctacgtactggcctacacccagagctaccgggcaaagctgaccccaggctgtgaggctgaggctgagacggaggccatatgcttcttcgtgcagcagttcacggacatggagcacaacagggtgctggaggcgctgctgccgctgaagggcctagaggagcgtgtggcagccgccgtggacctgatcatcaagagccaccagggcctggaccgccaggagctgagctttgcggcccggtccttctactacaagctgcgtgccgctgagcagtacacacccaaggccaagtaccatggcaacgtgatgctactgcgcgccaagacgggtggcgcctacggcgaggacctgggcgcggactacaacctctcccaggtatgcgacgggaaagtatccgtccacgtcatcgagggtgaccaccgcacgctgctggagggcagcggcctggagtccatcatcagcatcatccacagctccctggctgagccacgcgtgagcgtgcgggagggctaggcccgtgcccccgcctgccaccggaggtcactccaccatccccaccccaccccaccccacccccgccatgcaacgggattgaagggtcctgccggtgggaccctgtccggcccagtgccactgccccccgaggctgctagatgtaggtgttaggcatgtcccacccacccgccgcctcccacggcacctcggggacaccagagctgccgacttggagactcctggtctgtgaagagccggtggtgcccgtgcccgcaggaactgggctgggcctcgtgcgcccgtggggtctgcgcttggtctttctgtgcttggatttgcatatttattgcattgctggtagagacccccaggcctgtccaccctgccaagactcctcaggcagcgtgtgggtcccgcactctgcccccatttccccgatgtcccctgcgggcgcgggcagccacccaagcctgctggctgcggccccctctcggccaggcattggctcagcccgctgagtggggggtcgtgggccagtccccgaggagctgggcccctgcacaggcacacagggcccggccacacccagcggccccccgcacagccacccgtggggtgctgcccttatgcccggcgccgggcaccaactccatgtttggtgtttgtctgtgtttgtttttcaagaaatgattcaaattgctgcttggattttgaaatttactgtaactgtcagtgtacacgtctggaccccgtttcatttttacaccaatttggtaaaaatgctgctctcagcctcccacaattaaaccgcatgtgatctccaaaaaaaaaaaaaaaaaaaaaaaa

SEQ ID NO: 1255 - DNA, 6980 bp, Homo sapiens
ctttgccttcaagtacaggccggggtccggaagcggtgataccccttctctttcccagtggccctcaaacttccttttcccgggtccttaagcgggccccgccgacagaggccaatcagagggcagcgcgagggggcggggccatagtttaaactaattgtgcgctcacagcgctggcgcgagcccacgaagaggtacgattccggagaatcgcgaggcagagcgggagcgcgcagccaggtggaaactaattctaagccagactgctggagatcaccctgttctagtgtgtggaggcttccaccaggaggcgcattggagtgactgtctggcatcaccaagatgacactccacgccacccggggggctgcactcctctcttgggtgaacagtctacacgtggctgaccctgtggaggctgtgctgcagctccaggactgcagcatcttcatcaagatcattgacagaatccatggcactgaagagggacagcaaatcttgaagcagccggtgtcagagagactggactttgtgtgcagttttctgcagaaaaatcgaaaacatccctcttccccagaatgcctggtatctgcacagaaggtgctagagggatcagagctggaactggcgaagatgaccatgctgctcttataccactctaccatgagctccaaaagtcccagggactgggaacagtttgaatataaaattcaggctgagttggctgtcattcttaaatttgtgctggaccatgaggacgggctaaaccttaatgaggacctagagaacttcctacagaaagctcctgtgccttctacctgttctagcacattccctgaagagctctccccacctagccaccaggccaagagggagattcgcttcctagagctacagaaggttgcctcctcttccagtgggaacaactttctctcaggttctccagcttctcccatgggtgatatcctgcagaccccacagttccagatgagacggctgaagaagcagcttgctgatgagagaagtaatagggatgagctggagctggagctagctgagaaccgcaagctcctcaccgagaaggatgcacagatagccatgatgcagcagcgcattgaccgcctagccctgctgaatgagaagcaggcggccagcccactggagcccaaggagcttgaggagctgcgtgacaagaatgagagccttaccatgcggctgcatgaaaccctgaagcagtgccaggacctgaagacagagaagagccagatggatcgcaaaatcaaccagctttcggaggagaatggagacctttcctttaagctgcgggagtttgccagtcatctgcagcagctacaggatgccctcaatgagctgacggaggagcacagcaaggccactcaggagtggctagagaagcaggcccagctggagaaggagctcagcgcagccctgcaggacaagaaatgccttgaagagaagaacgaaatccttcagggaaaactttcacagctggaagaacacttgtcccagctgcaggataacccaccccaggagaagggcgaggtgctgggtgatgtcttgcagctggaaaccttgaagcaagaggcagccactcttgctgcaaacaacacacagctccaagccagggtagagatgctggagactgagcgaggccagcaggaagccaagctgcttgctgagcggggccacttcgaagaagaaaagcagcagctgtctagcctgatcactgacctgcagagctccatctccaacctcagccaggccaaggaagagctggagcaggcctcccaggctcatggggcccggttgactgcccaggtggcctctctgacctctgagctcaccacactcaatgccaccatccagcaacaggatcaagaactggctggcctgaagcagcaggccaaagagaagcaggcccagctagcacagaccctccaacagcaagaacaggcctcccagggcctccgccaccaggtggagcagctaagcagtagcctgaagcagaaggagcagcagttgaaggaggtagcggagaagcaggaggcaactaggcaggaccatgcccagcaactggccactgctgcagaggagcgagaggcctccttaagggagcgggatgcggctctcaagcagctggaggcactggagaaggagaaggctgccaagctggagattctgcagcagcaacttcaggtggctaatgaagcccgggacagtgcccagacctcagtgacacaggcccagcgggagaaggcagagctgagccggaaggtggaggaactccaggcctgtgttgagacagcccgccaggaacagcatgaggcccaggcccaggttgcagagctagagttgcagctgcggtctgagcagcaaaaagcaactgagaaagaaagggtggcccaggagaaggaccagctccaggagcagctccaggccctcaaagagtccttgaaggtcaccaagggcagccttgaagaggagaagcgcagggctgcagatgccctggaagagcagcagcgttgtatctctgagctgaaggcagagacccgaagcctggtggagcagcataagcgggaacgaaaggagctggaagaagagagggctgggcgcaaggggctggaggctcgattacagcagcttggggaggcccatcaggctgagactgaagtcctgcggcgggagctggcagaggccatggctgcccagcacacagctgagagtgagtgtgagcagctcgtcaaagaagtagctgcctggcgtgagcggtatgaggatagccagcaagaggaggcacagtatggcgccatgttccaggaacagctgatgactttgaaggaggaatgtgagaaggcccgccaggagctgcaggaggcaaaggagaaggtggcaggcatagaatcccacagcgagctccagataagccggcagcagaacgaactagctgagctccatgccaacctggccagagcactccagcaggtccaagagaaggaagtcagggcccagaagcttgcagatgacctctccactctgcaggaaaagatggctgccaccagcaaagaggtggcccgcttggagaccttggtgcgcaaggcaggtgagcagcaggaaacagcctcccgggagttagtcaaggagcctgcgagggcaggagacagacagcccgagtggctggaagagcaacagggacgccagttctgcagcacacaggcagcgctgcaggctatggagcgggaggcagagcagatgggcaatgagctggaacggctgcgggccgcgctgatggagagccaggggcagcagcaggaggagcgtgggcagcaggaaagggaggtggcgcggctgacccaggagcggggccgtgcccaggctgaccttgccctggagaaggcggccagagcagagcttgagatgcggctgcagaacgccctcaacgagcagcgtgtggagttcgctaccctgcaagaggcactggctcatgccctgacggaaaaggaaggcaaggaccaggagttggccaagcttcgtggtctggaggcagcccagataaaagagctggaggaacttcggcaaaccgtgaagcaactgaaggaacagctggctaagaaagaaaaggagcacgcatctggctcaggagcccaatctgaggctgctggcaggacagagccaacaggccccaagctggaggcactgcgggcagaggtgagcaagctggaacagcaatgccagaagcagcaggagcaggctgacagcctggaacgcagcctcgaggctgagcgggcctcccgggctgagcgggacagtgctctggagactctgcagggccagttagaggagaaggcccaggagctagggcacagtcagagtgccttagcctcggcccaacgggagttggctgccttccgcaccaaggtacaagaccacagcaaggctgaagatgagtggaaggcccaggtggcccggggccggcaagaggctgagaggaaaaatagcctcatcagcagcttggaggaggaggtgtccatcctgaatcgccaggtcctggagaaggagggggagagcaaggagttgaagcggctggtgatggccgagtcagagaagagccagaagctggaggagaggctgcgcctgctgcaggcagagacagccagcaacagtgccagagctgcagaacgcagctctgctctgcgggaggaggtgcagagcctccgggaggaggctgagaaacagcgggtggcttcagagaacctgcggcaggagctgacctcacaggctgagcgtgcggaggagctgggccaagaattgaaggcgtggcaggagaagttcttccagaaagagcaggccctctccaccctgcagctcgagcacaccagcacacaggccctggtgagtgagctgctgccagctaagcacctctgccagcagctgcaggccgagcaggccgctgccgagaaacgccaccgtgaggagctggagcagagcaagcaggccgctgggggactgcgggcagagctgctgcgggcccagcgggagcttggggagctgattcctctgcggcagaaggtggcagagcaggagcgaacagctcagcagctgcgggcagagaaggccagctatgcagagcagctgagcatgctgaagaaggcgcatggcctgctggcagaggagaaccgggggctgggtgagcgggccaaccttggccggcagtttctggaagtggagttggaccaggcccgggagaagtatgtccaagagttggcagccgtacgtgctgatgctgagacccgtctggctgaggtgcagcgagaagcacagagcactgcccgggagctggaggtgatgactgccaagtatgagggtgccaaggtcaaggtcctggaggagaggcagcggttccaggaagagaggcagaaactcactgcccaggtggagcagctagaggtatttcagagagagcaaactaagcaggtggaagaactgagtaagaaactggctgactctgaccaagccagcaaggtgcagcagcagaagctgaaggctgtccaggctcagggaggcgagagccagcaggaggcccagcgcctccaggcccagctgaatgaactgcaagcccagttgagccagaaggagcaggcagctgagcactataagctgcagatggagaaagccaaaacacattatgatgccaagaagcagcagaaccaagagctgcaggagcagctgcggagcctggagcagctgcagaaggaaaacaaagagctgcgagctgaagctgaacggctgggccatgagctacagcaggctgggctgaagaccaaggaggctgaacagacctgccgccaccttactgcccaggtgcgcagcctggaggcacaggttgcccatgcagaccagcagcttcgagacctgggcaaattccaggtggcaactgatgctttaaagagccgtgagccccaggctaagccccagctggacttgagtattgacagcctggatctgagctgcgaggaggggaccccactcagtatcaccagcaagctgcctcgtacccagccagacggcaccagcgtccctggagaaccagcctcacctatctcccagcgcctgccccccaaggtagaatccctggagagtctctacttcactcccatccctgctcggagtcaggcccccctggagagcagcctggactccctgggagacgtcttcctggactcgggtcgtaagacccgctccgctcgtcggcgcaccacgcagatcatcaacatcaccatgaccaagaagctagatgtggaagagccagacagcgccaactcatcgttctacagcacgcggtctgctcctgcttcccaggctagcctgcgagccacctcctctactcagtctctagctcgcctgggttctcccgattatggcaactcagccctgctcagcttgcctggctaccgccccaccactcgcagttctgctcgtcgttcccaggccggggtgtccagtggggcccctccaggaaggaacagcttctacatgggcacttgccaggatgagcctgagcagctggatgactggaaccgcattgcagagctgcagcagcgcaatcgagtgtgccccccacatctgaagacctgctatcccctggagtccaggccttccctgagcctgggcaccatcacagatgaggagatgaaaactggagacccccaagagaccctgcgccgagccagcatgcagccaatccagatagccgagggcactggcatcaccacccggcagcagcgcaaacgggtctccctagagccccaccagggccctggaactcctgagtctaagaaggccaccagctgtttcccacgccccatgactccccgagaccgacatgaagggcgcaaacagagcactactgaggcccagaagaaagcagctccagcttctactaaacaggctgaccggcgccagtcgatggccttcagcatcctcaacacacccaagaagctagggaacagccttctgcggcggggagcctcaaagaaggccctgtccaaggcttcccccaacactcgcagtggaacccgccgttctccgcgcattgccaccaccacagccagcgccgccactgctgccgccattggtgccacccctcgagccaagggcaaggtagaggcactggcaggatgggggagggaaacccgatgagagcatgggcaccccccagaccgccccaccaagtagcatccaagatggggccacgccaggctgctggagggtgtggggtaagaggtgtccctgtcctggtagctcctctccaaggagagaagacagatggccccattctcatggagagcacccagagctgctcaggcacagccagcaactgataaccctggggctcacaagggaggggatccagacaggggcgtgggagcaggaagagatcttcccagccagtgggtgcaggc

SEQ ID NO: 1256 - DNA, 8342 bp, Homo sapiens
ctttgccttcaagtacaggccggggtccggaagcggtgataccccttctctttcccagtggccctcaaacttccttttcccgggtccttaagcgggccccgccgacagaggccaatcagagggcagcgcgagggggcggggccatagtttaaactaattgtgcgctcacagcgctggcgcgagcccacgaagaggtacgattccggagaatcgcgaggcagagcgggagcgcgcagccaggtggaaactaattctaagccagactgctggagatcaccctgttctagtgtgtggaggcttccaccaggaggcgcattggagtgactgtctggcatcaccaagatgacactccacgccacccggggggctgcactcctctcttgggtgaacagtctacacgtggctgaccctgtggaggctgtgctgcagctccaggactgcagcatcttcatcaagatcattgacagaatccatggcactgaagagggacagcaaatcttgaagcagccggtgtcagagagactggactttgtgtgcagttttctgcagaaaaatcgaaaacatccctcttccccagaatgcctggtatctgcacagaaggtgctagagggatcagagctggaactggcgaagatgaccatgctgctcttataccactctaccatgagctccaaaagtcccagggactgggaacagtttgaatataaaattcaggctgagttggctgtcattcttaaatttgtgctggaccatgaggacgggctaaaccttaatgaggacctagagaacttcctacagaaagctcctgtgccttctacctgttctagcacattccctgaagagctctccccacctagccaccaggccaagagggagattcgcttcctagagctacagaaggttgcctcctcttccagtgggaacaactttctctcaggttctccagcttctcccatgggtgatatcctgcagaccccacagttccagatgagacggctgaagaagcagcttgctgatgagagaagtaatagggatgagctggagctggagctagctgagaaccgcaagctcctcaccgagaaggatgcacagatagccatgatgcagcagcgcattgaccgcctagccctgctgaatgagaagcaggcggccagcccactggagcccaaggagcttgaggagctgcgtgacaagaatgagagccttaccatgcggctgcatgaaaccctgaagcagtgccaggacctgaagacagagaagagccagatggatcgcaaaatcaaccagctttcggaggagaatggagacctttcctttaagctgcgggagtttgccagtcatctgcagcagctacaggatgccctcaatgagctgacggaggagcacagcaaggccactcaggagtggctagagaagcaggcccagctggagaaggagctcagcgcagccctgcaggacaagaaatgccttgaagagaagaacgaaatccttcagggaaaactttcacagctggaagaacacttgtcccagctgcaggataacccaccccaggagaagggcgaggtgctgggtgatgtcttgcagctggaaaccttgaagcaagaggcagccactcttgctgcaaacaacacacagctccaagccagggtagagatgctggagactgagcgaggccagcaggaagccaagctgcttgctgagcggggccacttcgaagaagaaaagcagcagctgtctagcctgatcactgacctgcagagctccatctccaacctcagccaggccaaggaagagctggagcaggcctcccaggctcatggggcccggttgactgcccaggtggcctctctgacctctgagctcaccacactcaatgccaccatccagcaacaggatcaagaactggctggcctgaagcagcaggccaaagagaagcaggcccagctagcacagaccctccaacagcaagaacaggcctcccagggcctccgccaccaggtggagcagctaagcagtagcctgaagcagaaggagcagcagttgaaggaggtagcggagaagcaggaggcaactaggcaggaccatgcccagcaactggccactgctgcagaggagcgagaggcctccttaagggagcgggatgcggctctcaagcagctggaggcactggagaaggagaaggctgccaagctggagattctgcagcagcaacttcaggtggctaatgaagcccgggacagtgcccagacctcagtgacacaggcccagcgggagaaggcagagctgagccggaaggtggaggaactccaggcctgtgttgagacagcccgccaggaacagcatgaggcccaggcccaggttgcagagctagagttgcagctgcggtctgagcagcaaaaagcaactgagaaagaaagggtggcccaggagaaggaccagctccaggagcagctccaggccctcaaagagtccttgaaggtcaccaagggcagccttgaagaggagaagcgcagggctgcagatgccctggaagagcagcagcgttgtatctctgagctgaaggcagagacccgaagcctggtggagcagcataagcgggaacgaaaggagctggaagaagagagggctgggcgcaaggggctggaggctcgattacagcagcttggggaggcccatcaggctgagactgaagtcctgcggcgggagctggcagaggccatggctgcccagcacacagctgagagtgagtgtgagcagctcgtcaaagaagtagctgcctggcgtgagcggtatgaggatagccagcaagaggaggcacagtatggcgccatgttccaggaacagctgatgactttgaaggaggaatgtgagaaggcccgccaggagctgcaggaggcaaaggagaaggtggcaggcatagaatcccacagcgagctccagataagccggcagcagaacgaactagctgagctccatgccaacctggccagagcactccagcaggtccaagagaaggaagtcagggcccagaagcttgcagatgacctctccactctgcaggaaaagatggctgccaccagcaaagaggtggcccgcttggagaccttggtgcgcaaggcaggtgagcagcaggaaacagcctcccgggagttagtcaaggagcctgcgagggcaggagacagacagcccgagtggctggaagagcaacagggacgccagttctgcagcacacaggcagcgctgcaggctatggagcgggaggcagagcagatgggcaatgagctggaacggctgcgggccgcgctgatggagagccaggggcagcagcaggaggagcgtgggcagcaggaaagggaggtggcgcggctgacccaggagcggggccgtgcccaggctgaccttgccctggagaaggcggccagagcagagcttgagatgcggctgcagaacgccctcaacgagcagcgtgtggagttcgctaccctgcaagaggcactggctcatgccctgacggaaaaggaaggcaaggaccaggagttggccaagcttcgtggtctggaggcagcccagataaaagagctggaggaacttcggcaaaccgtgaagcaactgaaggaacagctggctaagaaagaaaaggagcacgcatctggctcaggagcccaatctgaggctgctggcaggacagagccaacaggccccaagctggaggcactgcgggcagaggtgagcaagctggaacagcaatgccagaagcagcaggagcaggctgacagcctggaacgcagcctcgaggctgagcgggcctcccgggctgagcgggacagtgctctggagactctgcagggccagttagaggagaaggcccaggagctagggcacagtcagagtgccttagcctcggcccaacgggagttggctgccttccgcaccaaggtacaagaccacagcaaggctgaagatgagtggaaggcccaggtggcccggggccggcaagaggctgagaggaaaaatagcctcatcagcagcttggaggaggaggtgtccatcctgaatcgccaggtcctggagaaggagggggagagcaaggagttgaagcggctggtgatggccgagtcagagaagagccagaagctggaggagaggctgcgcctgctgcaggcagagacagccagcaacagtgccagagctgcagaacgcagctctgctctgcgggaggaggtgcagagcctccgggaggaggctgagaaacagcgggtggcttcagagaacctgcggcaggagctgacctcacaggctgagcgtgcggaggagctgggccaagaattgaaggcgtggcaggagaagttcttccagaaagagcaggccctctccaccctgcagctcgagcacaccagcacacaggccctggtgagtgagctgctgccagctaagcacctctgccagcagctgcaggccgagcaggccgctgccgagaaacgccaccgtgaggagctggagcagagcaagcaggccgctgggggactgcgggcagagctgctgcgggcccagcgggagcttggggagctgattcctctgcggcagaaggtggcagagcaggagcgaacagctcagcagctgcgggcagagaaggccagctatgcagagcagctgagcatgctgaagaaggcgcatggcctgctggcagaggagaaccgggggctgggtgagcgggccaaccttggccggcagtttctggaagtggagttggaccaggcccgggagaagtatgtccaagagttggcagccgtacgtgctgatgctgagacccgtctggctgaggtgcagcgagaagcacagagcactgcccgggagctggaggtgatgactgccaagtatgagggtgccaaggtcaaggtcctggaggagaggcagcggttccaggaagagaggcagaaactcactgcccaggtggaagaactgagtaagaaactggctgactctgaccaagccagcaaggtgcagcagcagaagctgaaggctgtccaggctcagggaggcgagagccagcaggaggcccagcgcctccaggcccagctgaatgaactgcaagcccagttgagccagaaggagcaggcagctgagcactataagctgcagatggagaaagccaaaacacattatgatgccaagaagcagcagaaccaagagctgcaggagcagctgcggagcctggagcagctgcagaaggaaaacaaagagctgcgagctgaagctgaacggctgggccatgagctacagcaggctgggctgaagaccaaggaggctgaacagacctgccgccaccttactgcccaggtgcgcagcctggaggcacaggttgcccatgcagaccagcagcttcgagacctgggcaaattccaggtggcaactgatgctttaaagagccgtgagccccaggctaagccccagctggacttgagtattgacagcctggatctgagctgcgaggaggggaccccactcagtatcaccagcaagctgcctcgtacccagccagacggcaccagcgtccctggagaaccagcctcacctatctcccagcgcctgccccccaaggtagaatccctggagagtctctacttcactcccatccctgctcggagtcaggcccccctggagagcagcctggactccctgggagacgtcttcctggactcgggtcgtaagacccgctccgctcgtcggcgcaccacgcagatcatcaacatcaccatgaccaagaagctagatgtggaagagccagacagcgccaactcatcgttctacagcacgcggtctgctcctgcttcccaggctagcctgcgagccacctcctctactcagtctctagctcgcctgggttctcccgattatggcaactcagccctgctcagcttgcctggctaccgccccaccactcgcagttctgctcgtcgttcccaggccggggtgtccagtggggcccctccaggaaggaacagcttctacatgggcacttgccaggatgagcctgagcagctggatgactggaaccgcattgcagagctgcagcagcgcaatcgagtgtgccccccacatctgaagacctgctatcccctggagtccaggccttccctgagcctgggcaccatcacagatgaggagatgaaaactggagacccccaagagaccctgcgccgagccagcatgcagccaatccagatagccgagggcactggcatcaccacccggcagcagcgcaaacgggtctccctagagccccaccagggccctggaactcctgagtctaagaaggccaccagctgtttcccacgccccatgactccccgagaccgacatgaagggcgcaaacagagcactactgaggcccagaagaaagcagctccagcttctactaaacaggctgaccggcgccagtcgatggccttcagcatcctcaacacacccaagaagctagggaacagccttctgcggcggggagcctcaaagaaggccctgtccaaggcttcccccaacactcgcagtggaacccgccgttctccgcgcattgccaccaccacagccagcgccgccactgctgccgccattggtgccacccctcgagccaagggcaaggcaaagcactaaagggccagtaccagtgagtggccccacctgtgtccccgatgctgccgtcacctggtcctccgcctactgtccctctcagtgccttctctcagctcccaggccaacagtagccaaacccctagagacagtgatgcctgcccgcaccctggcctggtccctggtccttcactggcgccttctcggagctggcccagggggcctggagcatggacagtgtgggcgctctccctaccttgcctccttttttcttaaagcaaagtcacttctccatcacaaccagatttgaggctggttttgatggctgggtccttgggcctggccagtcttcctcttagcctctggatctagaagggaccataagaggagtaggccctggttcctgctgtcctggtggctgggcccagcaggggccctcactcttgaagtccaggactgggtctgacctggtgggagcacctgccagaggatgctctttcccaggacggatgggccctgtgtctcaggagtggggttgggggacagccttcagcagcagctcacaccctaccttccccagacttgcactggggtgggatttggagtgatgggaaggtttttaagggccggggatggatcttttctaaatgttattacttgtaaataaagtctatttttctcccgtgagtactgagttgacttgatcggtgtgggaaaaagaggaatataggctctttgaagcctaccttgttcctgctgagtcttccataccacctcctttctctcatcccttttcctgaggccacatctttccaggctcttcccactctccattagtggcctctgctcccggggagcattatgggctgttctctcttttctttttcaagcgcctgtgttcccctgaagcaggtgttgtcttcagcttctgtgtggcagtccctctctcccatactccctcgtgggacaggcaaagttcctgggagtggaactgaagcctaaatgaacagatgtcaggatgcctccattgaataatcctttatgaggacccatgtggggatgacacagatacagtgtggatccgaagcagctgctgcccccatcccttccctggaacagtccattagagtgaagggggaaaaaaaaaaacatacagcacgaagataggaagtctgcagaatgcggccagagctgaaagaggatgacttcactgaagaggcagcatttcaaccaggcttgagcgttcccctgctggggcggtgaggaagacgggactaaatgagcagagacatgggagtgggagctgtctgggaaaagcaagaatagttgggaggcttccagaaagtcatgtgggaaatgcaggtagggccctggagtgcaaggctaaggcatcaacagtcttggtggtttctgagcagtagagcagtgtgaggagtaggacgttaggaaggctaatggataggtggagagagaatggcaggaggaggaggcattataaggaggctgtgattttctaggtaggtgggaatggagtttgaatttggtgagagaagggacccaaagcagagaaggagggggtgtgttgcgcatccacgcagcctacaggcagtcagggactgttcactccaggtagacaggtaggacccaagctctggtcaaggttgtgctgctgctggccctgtgctgagtcttaaccctgctgctgtggactgctgtgg

SEQ ID NO: 1257 - DNA, 2148 bp, Homo sapiens
ctttgccttcaagtacaggccggggtccggaagcggtgataccccttctctttcccagtggccctcaaacttccttttcccgggtccttaagcgggccccgccgacagaggccaatcagagggcagcgcgagggggcggggccatagtttaaactaattgtgcgctcacagcgctggcgcgagcccacgaagaggtacgattccggagaatcgcgaggcagagcgggagcgcgcagccaggtggaaactaattctaagccagactgctggagatcaccctgttctagtgtgtggaggcttccaccaggaggcgcattggagtgactgtctggcatcaccaagatgacactccacgccacccggggggctgcactcctctcttgggtgaacagtctacacgtggctgaccctgtggaggctgtgctgcagctccaggactgcagcatcttcatcaagatcattgacagaatccatggcactgaagagggacagcaaatcttgaagcagccggtgtcagagagactggactttgtgtgcagttttctgcagaaaaatcgaaaacatccctcttccccagaatgcctggtatctgcacagaaggtgctagagggatcagagctggaactggcgaagatgaccatgctgctcttataccactctaccatgagctccaaaagtcccagggactgggaacagtttgaatataaaattcaggctgagttggctgtcattcttaaatttgtgctggaccatgaggacgggctaaaccttaatgaggacctagagaacttcctacagaaagctcctgtgccttctacctgttctagcacattccctgaagagctctccccacctagccaccaggccaagagggagattcgcttcctagagctacagaaggttgcctcctcttccagtgggaacaactttctctcaggttctccagcttctcccatgggtgatatcctgcagaccccacagttccagatgagacggctgaagaagcagcttgctgatgagagaagtaatagggatgagctggagctggagctagctgagaaccgcaagctcctcaccgagaaggatgcacagatagccatgatgcagcagcgcattgaccgcctagccctgctgaatgagaagcaggcggccagcccactggagcccaaggagcttgaggagctgcgtgacaagaatgagagccttaccatgcggctgcatgaaaccctgaagcagtgccaggacctgaagacagagaagagccagatggatcgcaaaatcaaccagctttcggaggagaatggagacctttcctttaagctgcgggagtttgccagtcatctgcagcagctacaggatgccctcaatgagctgacggaggagcacagcaaggccactcaggagtggctagagaagcaggcccagctggagaaggagctcagcgcagccctgcaggacaaggtaaccctctgctggggtcacagccacagtcttgaccacatgtgcaaagctgagtccagtttaccactgtgctcttctgggcctttgggtattaagttgctttctcttcaaggttcaatagtgtgctgtaattgaaagattgtgggcttcagtctagtacaccttttttttttaacttatttttttttttccccagtcaatgccctcactttatagtacacctttcaatcctatctctgctgttcacaagatgtggatcttggacaagttaatcagtctgtttttctaagcatcctttccctaaaatgggagtagtaacgagtagctgcctcatcacctattatgagaaaacgtatgtaaagcacttcacacatcgtgtagtgtaaagtaagctctcagtgaaccagttgtgattgttactattggtaagaacccaatttggccacttactaataaccatgtagcccttgatcaaggcacttagcatctgcttcaggttcttgctctgtaagaggaatggtagtagctgcctcccacataagctgggtgtggtgatgcatgcctgtagtcccagctactcgggaggctgagacagaagaagctctcgaatctgggaggtggaggttgcagtaagccaagatctcgccactgcactccagcctaggcgatagagcgagactctgtctc

SEQ ID NO: 1258 - DNA, 3572 bp, Homo sapiens
ctttgccttcaagtacaggccggggtccggaagcggtgataccccttctctttcccagtggccctcaaacttccttttcccgggtccttaagcgggccccgccgacagaggccaatcagagggcagcgcgagggggcggggccatagtttaaactaattgtgcgctcacagcgctggcgcgagcccacgaagaggtacgattccggagaatcgcgaggcagagcgggagcgcgcagccaggtggaaactaattctaagccagactgctggagatcaccctgttctagtgtgtggaggcttccaccaggaggcgcattggagtgactgtctggcatcaccaagatgacactccacgccacccggggggctgcactcctctcttgggtgaacagtctacacgtggctgaccctgtggaggctgtgctgcagctccaggactgcagcatcttcatcaagatcattgacagaatccatggcactgaagagggacagcaaatcttgaagcagccggtgtcagagagactggactttgtgtgcagttttctgcagaaaaatcgaaaacatccctcttccccagaatgcctggtatctgcacagaaggtgctagagggatcagagctggaactggcgaagatgaccatgctgctcttataccactctaccatgagctccaaaagtcccagggactgggaacagtttgaatataaaattcaggctgagttggctgtcattcttaaatttgtgctggaccatgaggacgggctaaaccttaatgaggacctagagaacttcctacagaaagctcctgtgccttctacctgttctagcacattccctgaagagctctccccacctagccaccaggccaagagggagattcgcttcctagagctacagaaggttgcctcctcttccagtgggaacaactttctctcaggttctccagcttctcccatgggtgatatcctgcagaccccacagttccagatgagacggctgaagaagcagcttgctgatgagagaagtaatagggatgagctggagctggagctagctgagaaccgcaagctcctcaccgagaaggatgcacagatagccatgatgcagcagcgcattgaccgcctagccctgctgaatgagaagcaggcggccagcccactggagcccaaggagcttgaggagctgcgtgacaagaatgagagccttaccatgcggctgcatgaaaccctgaagcagtgccaggacctgaagacagagaagagccagatggatcgcaaaatcaaccagctttcggaggagaatggagacctttcctttaagctgcgggagtttgccagtcatctgcagcagctacaggatgccctcaatgagctgacggaggagcacagcaaggccactcaggagtggctagagaagcaggcccagctggagaaggagctcagcgcagccctgcaggacaagaaatgccttgaagagaagaacgaaatccttcagggaaaactttcacagctggaagaacacttgtcccagctgcaggataacccaccccaggagaagggcgaggtgctgggtgatgtcttgcaggtggaagaactgagtaagaaactggctgactctgaccaagccagcaaggtgcagcagcagaagctgaaggctgtccaggctcagggaggcgagagccagcaggaggcccagcgcctccaggcccagctgaatgaactgcaagcccagttgagccagaaggagcaggcagctgagcactataagctgcagatggagaaagccaaaacacattatgatgccaagaagcagcagaaccaagagctgcaggagcagctgcggagcctggagcagctgcagaaggaaaacaaagagctgcgagctgaagctgaacggctgggccatgagctacagcaggctgggctgaagaccaaggaggctgaacagacctgccgccaccttactgcccaggtgcgcagcctggaggcacaggttgcccatgcagaccagcagcttcgagacctgggcaaattccaggtggcaactgatgctttaaagagccgtgagccccaggctaagccccagctggacttgagtattgacagcctggatctgagctgcgaggaggggaccccactcagtatcaccagcaagctgcctcgtacccagccagacggcaccagcgtccctggagaaccagcctcacctatctcccagcgcctgccccccaaggtagaatccctggagagtctctacttcactcccatccctgctcggagtcaggcccccctggagagcagcctggactccctgggagacgtcttcctggactcgggtcgtaagacccgctccgctcgtcggcgcaccacgcagatcatcaacatcaccatgaccaagaagctagatgtggaagagccagacagcgccaactcatcgttctacagcacgcggtctgctcctgcttcccaggctagcctgcgagccacctcctctactcagtctctagctcgcctgggttctcccgattatggcaactcagccctgctcagcttgcctggctaccgccccaccactcgcagttctgctcgtcgttcccaggccggggtgtccagtggggcccctccaggaaggaacagcttctacatgggcacttgccaggatgagcctgagcagctggatgactggaaccgcattgcagagctgcagcagcgcaatcgagtgtgccccccacatctgaagacctgctatcccctggagtccaggccttccctgagcctgggcaccatcacagatgaggagatgaaaactggagacccccaagagaccctgcgccgagccagcatgcagccaatccagatagccgagggcactggcatcaccacccggcagcagcgcaaacgggtctccctagagccccaccagggccctggaactcctgagtctaagaaggccaccagctgtttcccacgccccatgactccccgagaccgacatgaagggcgcaaacagagcactactgaggcccagaagaaagcagctccagcttctactaaacaggctgaccggcgccagtcgatggccttcagcatcctcaacacacccaagaagctagggaacagccttctgcggcggggagcctcaaagaaggccctgtccaaggcttcccccaacactcgcagtggaacccgccgttctccgcgcattgccaccaccacagccagcgccgccactgctgccgccattggtgccacccctcgagccaagggcaaggtagaggcactggcaggatgggggagggaaacccgatgagagcatgggcaccccccagaccgccccaccaagtagcatccaagatggggccacgccaggctgctggagggtgtggggtaagaggtgtccctgtcctggtagctcctctccaaggagagaagacagatggccccattctcatggagagcacccagagctgctcaggcacagccagcaactgataaccctggggctcacaagggaggggatccagacaggggcgtgggagcaggaagagatcttcccagccagtgggtgcaggc

SEQ ID NO: 1259 - DNA, 6992 bp, Homo sapiens
ctttgccttcaagtacaggccggggtccggaagcggtgataccccttctctttcccagtggccctcaaacttccttttcccgggtccttaagcgggccccgccgacagaggccaatcagagggcagcgcgagggggcggggccatagtttaaactaattgtgcgctcacagcgctggcgcgagcccacgaagaggtacgattccggagaatcgcgaggcagagcgggagcgcgcagccaggtggaaactaattctaagccagactgctggagatcaccctgttctagtgtgtggaggcttccaccaggaggcgcattggagtgactgtctggcatcaccaagatgacactccacgccacccggggggctgcactcctctcttgggtgaacagtctacacgtggctgaccctgtggaggctgtgctgcagctccaggactgcagcatcttcatcaagatcattgacagaatccatggcactgaagagggacagcaaatcttgaagcagccggtgtcagagagactggactttgtgtgcagttttctgcagaaaaatcgaaaacatccctcttccccagaatgcctggtatctgcacagaaggtgctagagggatcagagctggaactggcgaagatgaccatgctgctcttataccactctaccatgagctccaaaagtcccagggactgggaacagtttgaatataaaattcaggctgagttggctgtcattcttaaatttgtgctggaccatgaggacgggctaaaccttaatgaggacctagagaacttcctacagaaagctcctgtgccttctacctgttctagcacattccctgaagagctctccccacctagccaccaggccaagagggagattcgcttcctagagctacagaaggttgcctcctcttccagtgggaacaactttctctcaggttctccagcttctcccatgggtgatatcctgcagaccccacagttccagatgagacggctgaagaagcagcttgctgatgagagaagtaatagggatgagctggagctggagctagctgagaaccgcaagctcctcaccgagaaggatgcacagatagccatgatgcagcagcgcattgaccgcctagccctgctgaatgagaagcaggcggccagcccactggagcccaaggagcttgaggagctgcgtgacaagaatgagagccttaccatgcggctgcatgaaaccctgaagcagtgccaggacctgaagacagagaagagccagatggatcgcaaaatcaaccagctttcggaggagaatggagacctttcctttaagctgcgggagtttgccagtcatctgcagcagctacaggatgccctcaatgagctgacggaggagcacagcaaggccactcaggagtggctagagaagcaggcccagctggagaaggagctcagcgcagccctgcaggacaagaaatgccttgaagagaagaacgaaatccttcagggaaaactttcacagctggaagaacacttgtcccagctgcaggataacccaccccaggagaagggcgaggtgctgggtgatgtcttgcagctggaaaccttgaagcaagaggcagccactcttgctgcaaacaacacacagctccaagccagggtagagatgctggagactgagcgaggccagcaggaagccaagctgcttgctgagcggggccacttcgaagaagaaaagcagcagctgtctagcctgatcactgacctgcagagctccatctccaacctcagccaggccaaggaagagctggagcaggcctcccaggctcatggggcccggttgactgcccaggtggcctctctgacctctgagctcaccacactcaatgccaccatccagcaacaggatcaagaactggctggcctgaagcagcaggccaaagagaagcaggcccagctagcacagaccctccaacagcaagaacaggcctcccagggcctccgccaccaggtggagcagctaagcagtagcctgaagcagaaggagcagcagttgaaggaggtagcggagaagcaggaggcaactaggcaggaccatgcccagcaactggccactgctgcagaggagcgagaggcctccttaagggagcgggatgcggctctcaagcagctggaggcactggagaaggagaaggctgccaagctggagattctgcagcagcaacttcaggtggctaatgaagcccgggacagtgcccagacctcagtgacacaggcccagcgggagaaggcagagctgagccggaaggtggaggaactccaggcctgtgttgagacagcccgccaggaacagcatgaggcccaggcccaggttgcagagctagagttgcagctgcggtctgagcagcaaaaagcaactgagaaagaaagggtggcccaggagaaggaccagctccaggagcagctccaggccctcaaagagtccttgaaggtcaccaagggcagccttgaagaggagaagcgcagggctgcagatgccctggaagagcagcagcgttgtatctctgagctgaaggcagagacccgaagcctggtggagcagcataagcgggaacgaaaggagctggaagaagagagggctgggcgcaaggggctggaggctcgattacagcagcttggggaggcccatcaggctgagactgaagtcctgcggcgggagctggcagaggccatggctgcccagcacacagctgagagtgagtgtgagcagctcgtcaaagaagtagctgcctggcgtgagcggtatgaggatagccagcaagaggaggcacagtatggcgccatgttccaggaacagctgatgactttgaaggaggaatgtgagaaggcccgccaggagctgcaggaggcaaaggagaaggtggcaggcatagaatcccacagcgagctccagataagccggcagcagaacgaactagctgagctccatgccaacctggccagagcactccagcaggtccaagagaaggaagtcagggcccagaagcttgcagatgacctctccactctgcaggaaaagatggctgccaccagcaaagaggtggcccgcttggagaccttggtgcgcaaggcaggtgagcagcaggaaacagcctcccgggagttagtcaaggagcctgcgagggcaggagacagacagcccgagtggctggaagagcaacagggacgccagttctgcagcacacaggcagcgctgcaggctatggagcgggaggcagagcagatgggcaatgagctggaacggctgcgggccgcgctgatggagagccaggggcagcagcaggaggagcgtgggcagcaggaaagggaggtggcgcggctgacccaggagcggggccgtgcccaggctgaccttgccctggagaaggcggccagagcagagcttgagatgcggctgcagaacgccctcaacgagcagcgtgtggagttcgctaccctgcaagaggcactggctcatgccctgacggaaaaggaaggcaaggaccaggagttggccaagcttcgtggtctggaggcagcccagataaaagagctggaggaacttcggcaaaccgtgaagcaactgaaggaacagctggctaagaaagaaaaggagcacgcatctggctcaggagcccaatctgaggctgctggcaggacagagccaacaggccccaagctggaggcactgcgggcagaggtgagcaagctggaacagcaatgccagaagcagcaggagcaggctgacagcctggaacgcagcctcgaggctgagcgggcctcccgggctgagcgggacagtgctctggagactctgcagggccagttagaggagaaggcccaggagctagggcacagtcagagtgccttagcctcggcccaacgggagttggctgccttccgcaccaaggtacaagaccacagcaaggctgaagatgagtggaaggcccaggtggcccggggccggcaagaggctgagaggaaaaatagcctcatcagcagcttggaggaggaggtgtccatcctgaatcgccaggtcctggagaaggagggggagagcaaggagttgaagcggctggtgatggccgagtcagagaagagccagaagctggaggagaggctgcgcctgctgcaggcagagacagccagcaacagtgccagagctgcagaacgcagctctgctctgcgggaggaggtgcagagcctccgggaggaggctgagaaacagcgggtggcttcagagaacctgcggcaggagctgacctcacaggctgagcgtgcggaggagctgggccaagaattgaaggcgtggcaggagaagttcttccagaaagagcaggccctctccaccctgcagctcgagcacaccagcacacaggccctggtgagtgagctgctgccagctaagcacctctgccagcagctgcaggccgagcaggccgctgccgagaaacgccaccgtgaggagctggagcagagcaagcaggccgctgggggactgcgggcagagctgctgcgggcccagcgggagcttggggagctgattcctctgcggcagaaggtggcagagcaggagcgaacagctcagcagctgcgggcagagaaggccagctatgcagagcagctgagcatgctgaagaaggcgcatggcctgctggcagaggagaaccgggggctgggtgagcgggccaaccttggccggcagtttctggaagtggagttggaccaggcccgggagaagtatgtccaagagttggcagccgtacgtgctgatgctgagacccgtctggctgaggtgcagcgagaagcacagagcactgcccgggagctggaggtgatgactgccaagtatgagggtgccaaggtcaaggtcctggaggagaggcagcggttccaggaagagaggcagaaactcactgcccaggtggaagaactgagtaagaaactggctgactctgaccaagccagcaaggtgcagcagcagaagctgaaggctgtccaggctcagggaggcgagagccagcaggaggcccagcgcctccaggcccagctgaatgaactgcaagcccagttgagccagaaggagcaggcagctgagcactataagctgcagatggagaaagccaaaacacattatgatgccaagaagcagcagaaccaagagctgcaggagcagctgcggagcctggagcagctgcagaaggaaaacaaagagctgcgagctgaagctgaacggctgggccatgagctacagcaggctgggctgaagaccaaggaggctgaacagacctgccgccaccttactgcccaggtgcgcagcctggaggcacaggttgcccatgcagaccagcagcttcgagacctgggcaaattccaggtggcaactgatgctttaaagagccgtgagccccaggctaagccccagctggacttgagtattgacagcctggatctgagctgcgaggaggggaccccactcagtatcaccagacataaagcactcatgacaattatacctgatttgtcccccaacaaccctctgagcaagctgcctcgtacccagccagacggcaccagcgtccctggagaaccagcctcacctatctcccagcgcctgccccccaaggtagaatccctggagagtctctacttcactcccatccctgctcggagtcaggcccccctggagagcagcctggactccctgggagacgtcttcctggactcgggtcgtaagacccgctccgctcgtcggcgcaccacgcagatcatcaacatcaccatgaccaagaagctagatgtggaagagccagacagcgccaactcatcgttctacagcacgcggtctgctcctgcttcccaggctagcctgcgagccacctcctctactcagtctctagctcgcctgggttctcccgattatggcaactcagccctgctcagcttgcctggctaccgccccaccactcgcagttctgctcgtcgttcccaggccggggtgtccagtggggcccctccaggaaggaacagcttctacatgggcacttgccaggatgagcctgagcagctggatgactggaaccgcattgcagagctgcagcagcgcaatcgagtgtgccccccacatctgaagacctgctatcccctggagtccaggccttccctgagcctgggcaccatcacagatgaggagatgaaaactggagacccccaagagaccctgcgccgagccagcatgcagccaatccagatagccgagggcactggcatcaccacccggcagcagcgcaaacgggtctccctagagccccaccagggccctggaactcctgagtctaagaaggccaccagctgtttcccacgccccatgactccccgagaccgacatgaagggcgcaaacagagcactactgaggcccagaagaaagcagctccagcttctactaaacaggctgaccggcgccagtcgatggccttcagcatcctcaacacacccaagaagctagggaacagccttctgcggcggggagcctcaaagaaggccctgtccaaggcttcccccaacactcgcagtggaacccgccgttctccgcgcattgccaccaccacagccagcgccgccactgctgccgccattggtgccacccctcgagccaagggcaaggtagaggcactggcaggatgggggagggaaacccgatgagagcatgggcaccccccagaccgccccaccaagtagcatccaagatggggccacgccaggctgctggagggtgtggggtaagaggtgtccctgtcctggtagctcctctccaaggagagaagacagatggccccattctcatggagagcacccagagctgctcaggcacagccagcaactgataaccctggggctcacaagggaggggatccagacaggggcgtgggagcaggaagagatcttcccagccagtgggtgcaggc

SEQ ID NO: 1260 - DNA, 6980 bp, Homo sapiens; identical to SEQ ID NO: 1255

SEQ ID NO: 1261 - DNA, 8342 bp, Homo sapiens; identical to SEQ ID NO: 1256

SEQ ID NO: 1262 - DNA, 4844 bp, Homo sapiens
catggcttcccttctgcttgctgtctgatccacagaacgctggggttgcccaggataatgtgaggctgagctcactaagagtgggtgggttaggggaatgaataatcattcctgtccctttgccccttccctaggtggaaactaattctaagccagactgctggagatcaccctgttctagtgtgtggaggcttccaccaggaggcgcattggagtgactgtctggcatcaccaagatgacactccacgccacccggggggctgcactcctctcttgggtgaacagtctacacgtggctgaccctgtggaggctgtgctgcagctccaggactgcagcatcttcatcaagatcattgacagaatccatggcactgaagagggacagcaaatcttgaagcagccggtgtcagagagactggactttgtgtgcagttttctgcagaaaaatcgaaaacatccctcttccccagaatgcctggtatctgcacagaaggtgctagagggatcagagctggaactggcgaagatgaccatgctgctcttataccactctaccatgagctccaaaagtcccagggactgggaacagtttgaatataaaattcaggctgagttggctgtcattcttaaatttgtgctggaccatgaggacgggctaaaccttaatgaggacctagagaacttcctacagaaagctcctgtgccttctacctgttctagcacattccctgaagagctctccccacctagccaccaggccaagagggagattcgcttcctagagctacagaaggttgcctcctcttccagtgggaacaactttctctcaggttctccagcttctcccatgggtgatatcctgcagaccccacagttccagatgagacggctgaagaagcagcttgctgatgagagaagtaatagggatgagctggagctggagctagctgagaaccgcaagctcctcaccgagaaggatgcacagatagccatgatgcagcagcgcattgaccgcctagccctgctgaatgagaagcaggcggccagcccactggagcccaaggagcttgaggagctgcgtgacaagaatgagagccttaccatgcggctgcatgaaaccctgaagcagtgccaggacctgaagacagagaagagccagatggatcgcaaaatcaaccagctttcggaggagaatggagacctttcctttaagctgcgggagtttgccagtcatctgcagcagctacaggatgccctcaatgagctgacggaggagcacagcaaggccactcaggagtggctagagaagcaggcccagctggagaaggagctcagcgcagccctgcaggacaagaaatgccttgaagagaagaacgaaatccttcagggaaaactttcacagctggaagaacacttgtcccagctgcaggataacccaccccaggagaagggcgaggtgctgggtgatgtcttgcagctggaaaccttgaagcaagaggcagccactcttgctgcaaacaacacacagctccaagccagggtagagatgctggagactgagcgaggccagcaggaagccaagctgcttgctgagcggggccacttcgaagaagaaaagcagcagctgtctagcctgatcactgacctgcagagctccatctccaacctcagccaggccaaggaagagctggagcaggcctcccaggctcatggggcccggttgactgcccaggtggcctctctgacctctgagctcaccacactcaatgccaccatccagcaacaggatcaagaactggctggcctgaagcagcaggccaaagagaagcaggcccagctagcacagaccctccaacagcaagaacaggcctcccagggcctccgccaccaggtggagcagctaagcagtagcctgaagcagaaggagcagcagttgaaggaggtagcggagaagcaggaggcaactaggcaggaccatgcccagcaactggccactgctgcagaggagcgagaggcctccttaagggagcgggatgcggctctcaagcagctggaggcactggagaaggagaaggctgccaagctggagattctgcagcagcaacttcaggtggctaatgaagcccgggacagtgcccagacctcagtgacacaggcccagcgggagaaggcagagctgagccggaaggtggaggaactccaggcctgtgttgagacagcccgccaggaacagcatgaggcccaggcccaggttgcagagctagagttgcagctgcggtctgagcagcaaaaagcaactgagaaagaaagggtggcccaggagaaggaccagctccaggagcagctccaggccctcaaagagtccttgaaggtcaccaagggcagccttgaagaggagaagcgcagggctgcagatgccctggaagagcagcagcgttgtatctctgagctgaaggcagagacccgaagcctggtggagcagcataagcgggaacgaaaggagctggaagaagagagggctgggcgcaaggggctggaggctcgattacagcagcttggggaggcccatcaggctgagactgaagtcctgcggcgggagctggcagaggccatggctgcccagcacacagctgagagtgagtgtgagcagctcgtcaaagaagtagctgcctggcgtgagcggtatgaggatagccagcaagaggaggcacagtatggcgccatgttccaggaacagctgatgactttgaaggaggaatgtgagaaggcccgccaggagctgcaggaggcaaaggagaaggtggcaggcatagaatcccacagcgagctccagataagccggcagcagaacgaactagctgagctccatgccaacctggccagagcactccagcaggtccaagagaaggaagtcagggcccagaagcttgcagatgacctctccactctgcaggaaaagatggctgccaccagcaaagaggtggcccgcttggagaccttggtgcgcaaggcaggtgagcagcaggaaacagcctcccgggagttagtcaaggagcctgcgagggcaggagacagacagcccgagtggctggaagagcaacagggacgccagttctgcagcacacaggcagcgctgcaggctatggagcgggaggcagagcagatgggcaatgagctggaacggctgcgggccgcgctgatggagagccaggggcagcagcaggaggagcgtgggcagcaggaaagggaggtggcgcggctgacccaggagcggggccgtgcccaggctgaccttgccctggagaaggcggccagagcagagcttgagatgcggctgcagaacgccctcaacgagcagcgtgtggagttcgctaccctgcaagaggcactggctcatgccctgacggaaaaggaaggcaaggaccaggagttggccaagcttcgtggtctggaggcagcccagataaaagagctggaggaacttcggcaaaccgtgaagcaactgaaggaacagctggctaagaaagaaaaggagcacgcatctggctcaggagcccaatctgaggctgctggcaggacagagccaacaggccccaagctggaggcactgcgggcagaggtgagcaagctggaacagcaatgccagaagcagcaggagcaggctgacagcctggaacgcagcctcgaggctgagcgggcctcccgggctgagcgggacagtgctctggagactctgcagggccagttagaggagaaggcccaggagctagggcacagtcagagtgccttagcctcggcccaacgggagttggctgccttccgcaccaaggtacaagaccacagcaaggctgaagatgagtggaaggcccaggtggcccggggccggcaagaggctgagaggaaaaatagcctcatcagcagcttggaggaggaggtgtccatcctgaatcgccaggtcctggagaaggagggggagagcaaggagttgaagcggctggtgatggccgagtcagagaagagccagaagctggaggagaggctgcgcctgctgcaggcagagacagccagcaacagtgccagagctgcagaacgcagctctgctctgcgggaggaggtgcagagcctccgggaggaggctgagaaacagcgggtggcttcagagaacctgcggcaggagctgacctcacaggctgagcgtgcggaggagctgggccaagaattgaaggcgtggcaggagaagttcttccagaaagagcaggccctctccaccctgcagctcgagcacaccagcacacaggccctggtgagtgagctgctgccagctaagcacctctgccagcagctgcaggccgagcaggccgctgccgagaaacgccaccgtgaggagctggagcagagcaagcaggccgctgggggactgcgggcagagctgctgcgggcccagcgggagcttggggagctgattcctctgcggcagaaggtggcagagcaggagcgaacagctcagcagctgcgggcagagaaggccagctatgcagagcagctgagcatgctgaagaaggcgcatggcctgctggcagaggagaaccgggggctgggtgagcgggccaaccttggccggcagtttctggaagtggagttggaccaggcccgggagaagtatgtccaagagttggcagccgtacgtgctgatgctgagacccgtctggctgaggtgcagcgagaagcacagagcactgcccgggagctggaggtgatgactgccaagtatgagggtgccaaggtcaaggtcctggaggagaggcagcggttccaggaagagaggcagaaactcactgcccag

SEQ ID NO: 1263 - DNA, 6938 bp, Homo sapiens
ctttgccttcaagtacaggccggggtccggaagcggtgataccccttctctttcccagtggccctcaaacttccttttcccgggtccttaagcgggccccgccgacagaggccaatcagagggcagcgcgagggggcggggccatagtttaaactaattgtgcgctcacagcgctggcgcgagcccacgaagaggtacgattccggagaatcgcgaggcagagcgggagcgcgcagccaggtggaaactaattctaagccagactgctggagatcaccctgttctagtgtgtggaggcttccaccaggaggcgcattggagtgactgtctggcatcaccaagatgacactccacgccacccggggggctgcactcctctcttgggtgaacagtctacacgtggctgaccctgtggaggctgtgctgcagctccaggactgcagcatcttcatcaagatcattgacagaatccatggcactgaagagggacagcaaatcttgaagcagccggtgtcagagagactggactttgtgtgcagttttctgcagaaaaatcgaaaacatccctcttccccagaatgcctggtatctgcacagaaggtgctagagggatcagagctggaactggcgaagatgaccatgctgctcttataccactctaccatgagctccaaaagtcccagggactgggaacagtttgaatataaaattcaggctgagttggctgtcattcttaaatttgtgctggaccatgaggacgggctaaaccttaatgaggacctagagaacttcctacagaaagctcctgtgccttctacctgttctagcacattccctgaagagctctccccacctagccaccaggccaagagggagattcgcttcctagagctacagaaggttgcctcctcttccagtgggaacaactttctctcaggttctccagcttctcccatgggtgatatcctgcagaccccacagttccagatgagacggctgaagaagcagcttgctgatgagagaagtaatagggatgagctggagctggagctagctgagaaccgcaagctcctcaccgagaaggatgcacagatagccatgatgcagcagcgcattgaccgcctagccctgctgaatgagaagcaggcggccagcccactggagcccaaggagcttgaggagctgcgtgacaagaatgagagccttaccatgcggctgcatgaaaccctgaagcagtgccaggacctgaagacagagaagagccagatggatcgcaaaatcaaccagctttcggaggagaatggagacctttcctttaagctgcgggagtttgccagtcatctgcagcagctacaggatgccctcaatgagctgacggaggagcacagcaaggccactcaggagtggctagagaagcaggcccagctggagaaggagctcagcgcagccctgcaggacaagaaatgccttgaagagaagaacgaaatccttcagggaaaactttcacagctggaagaacacttgtcccagctgcaggataacccaccccaggagaagggcgaggtgctgggtgatgtcttgcagctggaaaccttgaagcaagaggcagccactcttgctgcaaacaacacacagctccaagccagggtagagatgctggagactgagcgaggccagcaggaagccaagctgcttgctgagcggggccacttcgaagaagaaaagcagcagctgtctagcctgatcactgacctgcagagctccatctccaacctcagccaggccaaggaagagctggagcaggcctcccaggctcatggggcccggttgactgcccaggtggcctctctgacctctgagctcaccacactcaatgccaccatccagcaacaggatcaagaactggctggcctgaagcagcaggccaaagagaagcaggcccagctagcacagaccctccaacagcaagaacaggcctcccagggcctccgccaccaggtggagcagctaagcagtagcctgaagcagaaggagcagcagttgaaggaggtagcggagaagcaggaggcaactaggcaggaccatgcccagcaactggccactgctgcagaggagcgagaggcctccttaagggagcgggatgcggctctcaagcagctggaggcactggagaaggagaaggctgccaagctggagattctgcagcagcaacttcaggtggctaatgaagcccgggacagtgcccagacctcagtgacacaggcccagcgggagaaggcagagctgagccggaaggtggaggaactccaggcctgtgttgagacagcccgccaggaacagcatgaggcccaggcccaggttgcagagctagagttgcagctgcggtctgagcagcaaaaagcaactgagaaagaaagggtggcccaggagaaggaccagctccaggagcagctccaggccctcaaagagtccttgaaggtcaccaagggcagccttgaagaggagaagcgcagggctgcagatgccctggaagagcagcagcgttgtatctctgagctgaaggcagagacccgaagcctggtggagcagcataagcgggaacgaaaggagctggaagaagagagggctgggcgcaaggggctggaggctcgattacagcagcttggggaggcccatcaggctgagactgaagtcctgcggcgggagctggcagaggccatggctgcccagcacacagctgagagtgagtgtgagcagctcgtcaaagaagtagctgcctggcgtgagcggtatgaggatagccagcaagaggaggcacagtatggcgccatgttccaggaacagctgatgactttgaaggaggaatgtgagaaggcccgccaggagctgcaggaggcaaaggagaaggtggcaggcatagaatcccacagcgagctccagataagccggcagcagaacgaactagctgagctccatgccaacctggccagagcactccagcaggtccaagagaaggaagtcagggcccagaagcttgcagatgacctctccactctgcaggaaaagatggctgccaccagcaaagaggtggcccgcttggagaccttggtgcgcaaggcaggtgagcagcaggaaacagcctcccgggagttagtcaaggagcctgcgagggcaggagacagacagcccgagtggctggaagagcaacagggacgccagttctgcagcacacaggcagcgctgcaggctatggagcgggaggcagagcagatgggcaatgagctggaacggctgcgggccgcgctgatggagagccaggggcagcagcaggaggagcgtgggcagcaggaaagggaggtggcgcggctgacccaggagcggggccgtgcccaggctgaccttgccctggagaaggcggccagagcagagcttgagatgcggctgcagaacgccctcaacgagcagcgtgtggagttcgctaccctgcaagaggcactggctcatgccctgacggaaaaggaaggcaaggaccaggagttggccaagcttcgtggtctggaggcagcccagataaaagagctggaggaacttcggcaaaccgtgaagcaactgaaggaacagctggctaagaaagaaaaggagcacgcatctggctcaggagcccaatctgaggctgctggcaggacagagccaacaggccccaagctggaggcactgcgggcagaggtgagcaagctggaacagcaatgccagaagcagcaggagcaggctgacagcctggaacgcagcctcgaggctgagcgggcctcccgggctgagcgggacagtgctctggagactctgcagggccagttagaggagaaggcccaggagctagggcacagtcagagtgccttagcctcggcccaacgggagttggctgccttccgcaccaaggtacaagaccacagcaaggctgaagatgagtggaaggcccaggtggcccggggccggcaagaggctgagaggaaaaatagcctcatcagcagcttggaggaggaggtgtccatcctgaatcgccaggtcctggagaaggagggggagagcaaggagttgaagcggctggtgatggccgagtcagagaagagccagaagctggaggagaggctgcgcctgctgcaggcagagacagccagcaacagtgccagagctgcagaacgcagctctgctctgcgggaggaggtgcagagcctccgggaggaggctgagaaacagcgggtggcttcagagaacctgcggcaggagctgacctcacaggctgagcgtgcggaggagctgggccaagaattgaaggcgtggcaggagaagttcttccagaaagagcaggccctctccaccctgcagctcgagcacaccagcacacaggccctggtgagtgagctgctgccagctaagcacctctgccagcagctgcaggccgagcaggccgctgccgagaaacgccaccgtgaggagctggagcagagcaagcaggccgctgggggactgcgggcagagctgctgcgggcccagcgggagcttggggagctgattcctctgcggcagaaggtggcagagcaggagcgaacagctcagcagctgcgggcagagaaggccagctatgcagagcagctgagcatgctgaagaaggcgcatggcctgctggcagaggagaaccgggggctgggtgagcgggccaaccttggccggcagtttctggaagtggagttggaccaggcccgggagaagtatgtccaagagttggcagccgtacgtgctgatgctgagacccgtctggctgaggtgcagcgagaagcacagagcactgcccgggagctggaggtgatgactgccaagtatgagggtgccaaggtcaaggtcctggaggagaggcagcggttccaggaagagaggcagaaactcactgcccaggtggaagaactgagtaagaaactggctgactctgaccaagccagcaaggtgcagcagcagaagctgaaggctgtccaggctcagggaggcgagagccagcaggaggcccagcgcctccaggcccagctgaatgaactgcaagcccagttgagccagaaggagcaggcagctgagcactataagctgcagatggagaaagccaaaacacattatgatgccaagaagcagcagaaccaagagctgcaggagcagctgcggagcctggagcagctgcagaaggaaaacaaagagctgcgagctgaagctgaacggctgggccatgagctacagcaggctgggctgaagaccaaggaggctgaacagacctgccgccaccttactgcccaggtgcgcagcctggaggcacaggttgcccatgcagaccagcagcttcgagacctgggcaaattccaggtggcaactgatgctttaaagagccgtgagccccaggctaagccccagctggacttgagtattgacagcctggatctgagctgcgaggaggggaccccactcagtatcaccagcaagctgcctcgtacccagccagacggcaccagcgtccctggagaaccagcctcacctatctcccagcgcctgccccccaaggtagaatccctggagagtctctacttcactcccatccctgctcggagtcaggcccccctggagagcagcctggactccctgggagacgtcttcctggactcgggtcgtaagacccgctccgctcgtcggcgcaccacgcagatcatcaacatcaccatgaccaagaagctagatgtggaagagccagacagcgccaactcatcgttctacagcacgcggtctgctcctgcttcccaggctagcctgcgagccacctcctctactcagtctctagctcgcctgggttctcccgattatggcaactcagccctgctcagcttgcctggctaccgccccaccactcgcagttctgctcgtcgttcccaggccggggtgtccagtggggcccctccaggaaggaacagcttctacatgggcacttgccaggatgagcctgagcagctggatgactggaaccgcattgcagagctgcagcagcgcaatcgagtgtgccccccacatctgaagacctgctatcccctggagtccaggccttccctgagcctgggcaccatcacagatgaggagatgaaaactggagacccccaagagaccctgcgccgagccagcatgcagccaatccagatagccgagggcactggcatcaccacccggcagcagcgcaaacgggtctccctagagccccaccagggccctggaactcctgagtctaagaaggccaccagctgtttcccacgccccatgactccccgagaccgacatgaagggcgcaaacagagcactactgaggcccagaagaaagcagctccagcttctactaaacaggctgaccggcgccagtcgatggccttcagcatcctcaacacacccaagaagctagggaacagccttctgcggcggggagcctcaaagaaggccctgtccaaggcttcccccaacactcgcagtggaacccgccgttctccgcgcattgccaccaccacagccagcgccgccactgctgccgccattggtgccacccctcgagccaagggcaaggtagaggcactggcaggatgggggagggaaacccgatgagagcatgggcaccccccagaccgccccaccaagtagcatccaagatggggccacgccaggctgctggagggtgtggggtaagaggtgtccctgtcctggtagctcctctccaaggagagaagacagatggccccattctcatggagagcacccagagctgctcaggcacagccagcaactgataaccctggggctcacaagggaggggatccagacaggggcgtgggagcaggaagagatcttcccagccagtgggtgcaggc

SEQ ID NO: 1264 - DNA, 3572 bp, Homo sapiens; identical to SEQ ID NO: 1258

SEQ ID NO: 1265 - DNA, 9 bp, Homo sapiens
ggccagaca

SEQ ID NO: 1266 - DNA, 4844 bp, Homo sapiens; identical to SEQ ID NO: 1262

SEQ ID NO: 1267 - DNA, 2397 bp, Homo sapiens
gcaagaactgaaacgaatggggattgaactgctttgcctgttctttctatttctaggaaggaatgatcacgtacaaggtggctgtgccctgggaggtgcagaaacctgtgaagactgcctgcttattggacctcagtgtgcctggtgtgctcaggagaattttactcatccatctggagttggcgaaaggtgtgataccccagcaaaccttttagctaaaggatgtcaattaaacttcatcgaaaaccctgtctcccaagtagaaatacttaaaaataagcctctcagtgtaggcagacagaaaaatagttctgacattgttcagattgcgcctcaaagcttgatccttaagttgagaccaggtggtgcgcagactctgcaggtgcatgtccgccagactgaggactacccggtggatttgtattacctcatggacctctccgcctccatggatgacgacctcaacacaataaaggagctgggctcccggctttccaaagagatgtctaaattaaccagcaactttagactgggcttcggatcttttgtggaaaaacctgtatcccctttcgtgaaaacaacaccagaagaaattgccaacccttgcagtagtattccatacttctgtttacctacatttggattcaagcacattttgccattgacaaatgatgctgaaagattcaatgaaattgtgaagaatcagaaaatttctgctaatattgacacacccgaaggtggatttgatgcaattatgcaagctgctgtgtgtaaggaaaaaattggctggcggaatgactccctccacctcctggtctttgtgagtgatgctgattctcattttggaatggacagcaaactagcaggcatcgtcattcctaatgacgggctctgtcacttggacagcaagaatgaatactccatgtcaactgtcttggaatatccaacaattggacaactcattgataaactggtacaaaacaacgtgttattgatcttcgctgtaacccaagaacaagttcatttatatgagaattacgcaaaacttattcctggagctacagtaggtctacttcagaaggactccggaaacattctccagctgatcatctcagcttatgaagaactgcggtctgaggtggaactggaagtattaggagacactgaaggactcaacttgtcatttacagccatctgtaacaacggtaccctcttccaacaccaaaagaaatgctctcacatgaaagtgggagacacagcttccttcagcgtgactgtgaatatcccacactgcgagagaagaagcaggcacattatcataaagcctgtggggctgggggatgccctggaattacttgtcagcccagaatgcaactgcgactgtcagaaagaagtggaagtgaacagctccaaatgtcaccacgggaacggctctttccagtgtggggtgtgtgcctgccaccctggccacatggggcctcgctgtgagtgtggcgaggacatgctgagcacagattcctgcaaggaggccccagatcatccctcctgcagcggaaggggtgactgctactgtgggcagtgtatctgccacttgtctccctatggaaacatttatgggccttattgccagtgtgacaatttctcctgcgtgagacacaaagggctgctctgcggaggtaacggcgactgtgactgtggtgaatgtgtgtgcaggagcggctggactggcgagtactgcaactgcaccaccagcacggactcctgcgtctctgaagatggagtgctctgcagcgggcgcggggactgtgtttgtggcaagtgtgtttgcacaaaccctggagcctcaggaccaacctgtgaacgatgtcctacctgtggtgacccctgtaactctaaacggagctgcattgagtgccacctgtcagcagctggccaagcccgagaagaatgtgtggacaagtgcaaactagctggtgcgaccatcagtgaagaagaagatttctcaaaggatggttctgtttcctgctctctgcaaggagaaaatgaatgtcttattacattcctaataactacagataatgaggggaaaaccatcattcacagcatcaatgaaaaagattgtccgaagcctccaaacattcccatgatcatgttaggggtttccctggctattcttctcatcggggttgtcctactgtgcatctggaagctactggtgtcatttcatgatcgtaaagaagttgccaaatttgaagcagaacgatcaaaagccaagtggcaaacgggaaccaatccactctacagaggatccacaagtacttttaaaaatgtaacttataaacacagggaaaaacaaaaggtagacctttccacagattgctagaactactttatgca

SEQ ID NO: 1268 - DNA, 3574 bp, Homo sapiens
cccttttgggtcggtagttcagcgccggcgccggtgtgcgagccgcggcagagtgaggcaggcaacccgaggtgcggagcgacctgcggaggctgagccccgctttctcccagggtttcttatcagccagccgccgctgtccccgggggagtaggaggctcctgacaggccgcgcagaacgcggccagggcagaaagcggcggcaggagaagcaggcagggggccggaggacgcagaccgagacccgaggcggaggcggaccgcgagccggccatgtcggtggtggggttggacgtgggctcgcagagctgctacatcgcggtagcccgggccgggggcatcgagaccatcgccaatgagttcagcgaccggtgcaccccgtcagtcatatcatttggatcaaaaaatagaacaatcggagttgcagccaaaaatcagcaaatcactcatgcaaacaatacggtgtctaacttcaaaagatttcatggccgagcattcaatgaccccttcattcaaaaggagaaggaaaacttgagttacgatttggttccattgaaaaatggtggagttggaataaaggtaatgtacatgggtgaagaacatctatttagtgtggagcagataacagccatgttgttgactaagctgaaggaaactgctgaaaacagcctcaagaaaccagtaacagattgtgttatttcagtcccctccttctttacagatgctgagaggcgatctgtgttagatgctgcacagattgttggcctaaactgtttaagacttatgaatgacatgacagctgttgctttgaattacggaatttataagcaggatctcccaagcctggatgagaaacctcggatagtggtttttgttgatatgggacattcagcttttcaagtgtctgcttgtgcttttaacaagggaaaattgaaggtactgggaacagcttttgatcctttcttaggaggaaaaaacttcgatgaaaagttagtggaacatttttgtgcagaatttaaaactaagtacaagttggatgcaaaatccaaaatacgagcactcctacgtctgtatcaggaatgtgaaaaactgaaaaagctaatgagctctaacagcacagaccttccactgaatatcgaatgctttatgaatgataaagatgtttccggaaagatgaacaggtcacaatttgaagaactctgtgctgaacttctgcaaaagatagaagtacccctttattcactgttggaacaaactcatctcaaagtagaagatgtgagtgcagttgagattgttggaggcgctacacgaattccagctgtgaaggaaagaattgccaaattctttggaaaagatattagcacaacactcaatgcagatgaagcagtagccagaggatgtgcattacagtgtgcaatactttccccggcatttaaagttagagaattttccgtcacagatgcagttccttttccaatatctctgatctggaaccatgattcagaagatactgaaggtgttcatgaagtctttagtcgaaaccatgctgctcctttctccaaagttctcacctttctgagaagggggccttttgagctagaagctttctattctgatccccaaggagttccatatccagaagcaaaaataggccgctttgtagttcagaatgtttctgcacagaaagatggagaaaaatctagagtaaaagtcaaagtgcgagtcaacacccatggcattttcaccatctctacggcatctatggtggagaaagtcccaactgaggagaatgaaatgtcttctgaagctgacatggagtgtctgaatcagagaccaccagaaaacccagacactgatgcaaatgaaaaaaaagttgaccagcctccagaagctaaaaagcccaaaataaaggtggtgaatgttgagctgcctattgaagccaacttggtctggcagttagggaaagaccttcttaacatgtatattgagacagagggtaagatgataatgcaagataaattggaaaaagaaaggaatgatgctaaaaatgcagttgaggaatatgtgtatgagttcagagacaagctgtgtggaccatatgaaaaatttatatgtgagcaggatcatcaaaattttttgagactcctcacagaaactgaagactggctgtatgaagaaggagaggaccaagctaaacaagcatatgttgacaagttggaagaattaatgaaaattggcactccagttaaagttcggtttcaggaagctgaagaacggccaaaaatgtttgaagaactaggacagaggctgcagcattatgccaagatagcagctgacttcagaaataaggatgagaaatacaaccatattgatgagtctgaaatgaaaaaagtggagaagtctgttaatgaagtgatggaatggatgaataatgtcatgaatgctcaggctaaaaagagtcttgatcaggatccagttgtacgtgctcaggaaattaaaacaaaaatcaaggaattgaacaacacatgtgaacccgttgtaacacaaccgaaaccaaaaattgaatcacccaaactggaaagaactccaaatggcccaaatattgataaaaaggaagaagatttagaagacaaaaacaattttggtgctgaacctccacatcagaatggtgaatgttaccctaatgagaaaaattctgttaatatggacttggactagataaccttaaattggcctattccttcaattaataaaatatttttgccatagtatgtgactctacataacatactgaaactatttatattttcttttttaaggatatttagaaattttgtgtattatatggaaaaagaaaaaaagcttaagtctgtagtctttatgatcctaaaagggaaaattgccttggtaactttcagattcctgtggaattgtgaattcatactaagctttctgtgcagtctcaccatttgcatcactgaggatgaaactgacttttgtcttttggattcctgccaaggtagttttcttgcattttgctctccattcagcatgtgtgtgggtgtggatgtttataaacaagactaagtctgacttcataagggctttctaaaaccatttctgtccaagagaaaatgactttttgctttgatattaaaaattcaatgagtaaaacaaaagctagtcaaatgtgttagcagcatgcagaacaaaaactttaaactttctctctcactatacagtatattgtcatgtgaaagtgtggaatggaagaaatgtcgatcctgttgtaactgattgtgaacacttttatgagctttaaaataaagttcatcttatggtgtcatttctaaactgttgattttgtcactaatttaaaaaatgagatgagggagaatatgaattattctagcagaaatgaagttagtgtccagtttttcttttttactgcttatgttctctcttttctaagtgaaaatgtttttctcctgacagaaaaatagcatatgtttattacattaaagcattttaaaaatactataaagtgaataaaacttaaaatcttgccacccag

SEQ ID NO: 1269 - DNA, 3706 bp, Homo sapiens
cccttttgggtcggtagttcagcgccggcgccggtgtgcgagccgcggcagagtgaggcaggcaacccgaggtgcggagcgacctgcggaggctgagccccgctttctcccagggtttcttatcagccagccgccgctgtccccgggggagtaggaggctcctgacaggccgcgcagaacgcggccagggcagaaagcggcggcaggagaagcaggcagggggccggaggacgcagaccgagacccgaggcggaggcggaccgcgagccggccatgtcggtggtggggttggacgtgggctcgcagagctgctacatcgcggtagcccgggccgggggcatcgagaccatcgccaatgagttcagcgaccggtgcaccccgtcagtcatatcatttggatcaaaaaatagaacaatcggagttgcagccaaaaatcagcaaatcactcatgcaaacaatacggtgtctaacttcaaaagatttcatggccgagcattcaatgaccccttcattcaaaaggagaaggaaaacttgagttacgatttggttccattgaaaaatggtggagttggaataaaggtaatgtacatgggtgaagaacatctatttagtgtggagcagataacagccatgttgttgactaagctgaaggaaactgctgaaaacagcctcaagaaaccagtaacagattgtgttatttcagtcccctccttctttacagatgctgagaggcgatctgtgttagatgctgcacagattgttggcctaaactgtttaagacttatgaatgacatgacagctgttgctttgaattacggaatttataagcaggatctcccaagcctggatgagaaacctcggatagtggtttttgttgatatgggacattcagcttttcaagtgtctgcttgtgcttttaacaagggaaaattgaaggtactgggaacagcttttgatcctttcttaggaggaaaaaacttcgatgaaaagttagtggaacatttttgtgcagaatttaaaactaagtacaagttggatgcaaaatccaaaatacgagcactcctacgtctgtatcaggaatgtgaaaaactgaaaaagctaatgagctctaacagcacagaccttccactgaatatcgaatgctttatgaatgataaagatgtttccggaaagatgaacaggtcacaatttgaagaactctgtgctgaacttctgcaaaagatagaagtacccctttattcactgttggaacaaactcatctcaaagtagaagatgtgagtgcagttgagattgttggaggcgctacacgaattccagctgtgaaggaaagaattgccaaattctttggaaaagatattagcacaacactcaatgcagatgaagcagtagccagaggatgtgcattacagtgtgcaatactttccccggcatttaaagttagagaattttccgtcacagatgcagttccttttccaatatctctgatctggaaccatgattcagaagatactgaaggtgttcatgaagtctttagtcgaaaccatgctgctcctttctccaaagttctcacctttctgagaagggggccttttgagctagaagctttctattctgatccccaaggagttccatatccagaagcaaaaataggccgctttgtagttcagaatgtttctgcacagaaagatggagaaaaatctagagtaaaagtcaaagtgcgagtcaacacccatggcattttcaccatctctacggcatctatggtggagaaagtcccaactgaggagaatgaaatgtcttctgaagctgacatggagtgtctgaatcagagaccaccagaaaacccagacactgataaaaatgtccagcaagacaacagtgaagctggaacacagccccaggtacaaactgatgctcaacaaacctcacagtctcccccttcacctgaacttacctcagaagaaaacaaaatcccagatgctgacaaagcaaatgaaaaaaaagttgaccagcctccagaagctaaaaagcccaaaataaaggtggtgaatgttgagctgcctattgaagccaacttggtctggcagttagggaaagaccttcttaacatgtatattgagacagagggtaagatgataatgcaagataaattggaaaaagaaaggaatgatgctaaaaatgcagttgaggaatatgtgtatgagttcagagacaagctgtgtggaccatatgaaaaatttatatgtgagcaggatcatcaaaattttttgagactcctcacagaaactgaagactggctgtatgaagaaggagaggaccaagctaaacaagcatatgttgacaagttggaagaattaatgaaaattggcactccagttaaagttcggtttcaggaagctgaagaacggccaaaaatgtttgaagaactaggacagaggctgcagcattatgccaagatagcagctgacttcagaaataaggatgagaaatacaaccatattgatgagtctgaaatgaaaaaagtggagaagtctgttaatgaagtgatggaatggatgaataatgtcatgaatgctcaggctaaaaagagtcttgatcaggatccagttgtacgtgctcaggaaattaaaacaaaaatcaaggaattgaacaacacatgtgaacccgttgtaacacaaccgaaaccaaaaattgaatcacccaaactggaaagaactccaaatggcccaaatattgataaaaaggaagaagatttagaagacaaaaacaattttggtgctgaacctccacatcagaatggtgaatgttaccctaatgagaaaaattctgttaatatggacttggactagataaccttaaattggcctattccttcaattaataaaatatttttgccatagtatgtgactctacataacatactgaaactatttatattttcttttttaaggatatttagaaattttgtgtattatatggaaaaagaaaaaaagcttaagtctgtagtctttatgatcctaaaagggaaaattgccttggtaactttcagattcctgtggaattgtgaattcatactaagctttctgtgcagtctcaccatttgcatcactgaggatgaaactgacttttgtcttttggattcctgccaaggtagttttcttgcattttgctctccattcagcatgtgtgtgggtgtggatgtttataaacaagactaagtctgacttcataagggctttctaaaaccatttctgtccaagagaaaatgactttttgctttgatattaaaaattcaatgagtaaaacaaaagctagtcaaatgtgttagcagcatgcagaacaaaaactttaaactttctctctcactatacagtatattgtcatgtgaaagtgtggaatggaagaaatgtcgatcctgttgtaactgattgtgaacacttttatgagctttaaaataaagttcatcttatggtgtcatttctaaactgttgattttgtcactaatttaaaaaatgagatgagggagaatatgaattattctagcagaaatgaagttagtgtccagtttttcttttttactgcttatgttctctcttttctaagtgaaaatgtttttctcctgacagaaaaatagcatatgtttattacattaaagcattttaaaaatactataaagtgaataaaacttaaaatcttgccacccag

SEQ ID NO: 1270 - DNA, 3574 bp, Homo sapiens; identical to SEQ ID NO: 1268

SEQ ID NO: 1271 - DNA, 3706 bp, Homo sapiens; identical to SEQ ID NO: 1269

SEQ ID NO: 1272 - DNA, 3623 bp, Homo sapiens
ccacgcgtccgccccttttgggtcggtagttcagcgccggcgccggtgtgcgagccgcggcagagtgaggcaggcaacccgaggtgcggagcgacctgcggaggctgagccccgctttctcccagggtttcttatcagccagccgccgctgtccccgggggagtaggaggctcctgacaggccgcggctgtctgtgtgtccttctgagtgtcagaggaacggccagaccccgcgggccggagcagaacgcggccagggcagaaagcggcggcaggagaagcaggcagggggccggaggacgtagaccgagacccgaggcggaggcggaccgcgagccggccatgtcggtggtggggttggacgtgggctcgcagagctgctacatcgcggtagcccgggccgggggcatcgagaccatcgccaatgagttcagcgaccggtgcaccccgtcagtcatatcatttggatcaaaaaatagaacaatcggagttgcagccaaaaatcagcaaatcactcatgcaaacaatacggtgtctaacttcaaaagatttcatggccgagcattcaatgaccccttcattcaaaaggagaaggaaaacttgagttacgatttggttccattgaaaaatggtggagttggaataaaggtaatgtacatgggtgaagaacatctatttagtgtggagcagataacagccatgttgttgactaagctgaaggaaactgctgaaaacagcctcaagaaaccagtaacagattgtgttatttcagtcccctccttctttacagatgctgagaggcgatctgtgttagatgctgcacagattgttggcctaaactgtttaagacttatgaatgacatgacagctgttgctttgaattacggaatttataagcaggatctcccaagcctggatgagaaacctcggatagtggtttttgttgatatgggacattcagcttttcaagtgtctgcttgtgcttttaacaagggaaaattgaaggtactgggaacagcttttgatcctttcttaggaggaaaaaacttcgatgaaaagttagtggaacatttttgtgcagaatttaaaactaagtacaagttggatgcaaaatccaaaatacgagcactcctacgtctgtatcaggaatgtgaaaaactgaaaaagctaatgagctctaacagcacagaccttccactgaatatcgaatgctttatgaatgataaagatgtttccggaaagatgaacaggtcacaatttgaagaactctgtgctgaacttctgcaaaagatagaagtacccctttattcactgttggaacaaactcatctcaaagtagaagatgtgagtgcagttgagattgttggaggcgctacacgaattccagctgtgaaggaaagaattgccaaattctttggaaaagatattagcacaacactcaatgcagatgaagcagtagccagaggatgtgcattacagtgtgcaatactttccccggcatttaaagttagagaattttccgtcacagatgcagttccttttccaatatctctgatctggaaccatgattcagaagatactgaaggtgttcatgaagtctttagtcgaaaccatgctgctcctttctccaaagttctcacctttctgagaagggggccttttgagctagaagctttctattctgatccccaaggagttccatatccagaagcaaaaataggccgctttgtagttcagaatgtttctgcacagaaagatggagaaaaatctagagtaaaagtcaaagtgcgagtcaacacccatggcattttcaccatctctacggcatctatggtggagaaagtcccaactgaggagaatgaaatgtcttctgaagctgacatggagtgtctgaatcagagaccaccagaaaacccagacactgataaaaatgtccagcaagacaacagtgaagctggaacacagccccaggtacaaactgatgctcaacaaacctcacagtctcccccttcacctgaacttacctcagaagaaaacaaaatcccagatgctgacaaagcaaatgaaaaaaaagttgaccagcctccagaagctaaaaagcccaaaataaaggtggtgaatgttgagctgcctattgaagccaacttggtctggcagttagggaaagaccttcttaacatgtatattgagacagagggtaagatgataatgcaagataaattggaaaaagaaaggaatgatgctaaaaatgcagttgaggaatatgtgtatgagttcagagacaagctgtgtggaccatatgaaaaatttatatgtgagcaggatcatcaaaattttttgagactcctcacagaaactgaagactggctgtatgaagaaggagaggaccaagctaaacaagcatatgttgacaagttggaagaattaatgaaaattggcactccagttaaagttcggtttcaggaagctgaagaacggccaaaaatgtttgaagaactaggacagaggctgcagcattatgccaagatagcagctgacttcagaaataaggatgagaaatacaaccatattgatgagtctgaaatgaaaaaagtggagaagtctgttaatgaagtgatggaatggatgaataatgtcatgaatgctcaggctaaaaagagtcttgatcaggatccagttgtacgtgctcaggaaattaaaacaaaaatcaaggaattgaacaacacatgtgaacccgttgtaacacaaccgaaaccaaaaattgaatcacccaaactggaaagaactccaaatggcccaaatattgataaaaaggaagaagatttagaagacaaaaacaattttggtgctgaacctccacatcagaatggtgaatgttaccctaatgagaaaaattctgttaatatggacttggactagataaccttaaattggcctattccttcaattaataaaatatttttgccatagtatgtgactctacataacatactgaaactatttatattttcttttttaaggatatttagaaattttgtgtattatatggaaaaagaaaaaaagcttaagtctgtagtctttatgatcctaaaagggaaaattgccttggtaactttcagattcctgtggaattgtgaattcatactaagctttctgtgcagtctcaccatttgcatcactgaggatgaaactgacttttgtcttttggagaaaaaaaactgtactgcttgttcaagagggctgtgattaaaatctttaagcatttgttcctgccaaggtagttttcttgcattttgctctccattcagcatgtgtgtgggtgtggatgtttataaacaagactaagtctgacttcataagggctttctaaaaccatttctgtccaagagaaaatgactttttgctttgatattaaaaattcaatgagtaaaacaaaagctagtcaaatgtgttagcagcatgcagaacaaaaactttaaactttctctctcactatacagtatattgtcatgtgaaagtgtggaatggaagaaatgtcgatcctgttgtaactgattgtgaacacttttatgagctttaaaataaagttcatcttatggtgtcatttctaaaaaaaaaaaaaaa

SEQ ID NO: 1273 - DNA, 3706 bp, Homo sapiens; identical to SEQ ID NO: 1269

SEQ ID NO: 1274 - DNA, 3706 bp, Homo sapiens; identical to SEQ ID NO: 1269

SEQ ID NO: 1275 - DNA, 3633 bp, Homo sapiens
agaccaaggtcagcggagagtaggcatgtagcttctgcagttgctcctcctcaccctccgcgacctgatttcctagaagggctctgtcacccgaaaagattttccactggcttagaggagggagggcccgccttcccccgttatccattggctgctcgttccgccgcaagttgggggcggggttagggcgcctttcgattgcatcagctggtccagccgaggccaagtcccgggcgctagcccacctcccacccgcctcttggctcctctcctctaggccgtcgctttcgggttctctcatcgcttcgtcgttcgccaatgtttgaggagaaggccagcagtccttcagggaagatgggaggcgaggagaagccgattggtgctggtgaagagaagcaaaaggaaggaggcaaaaagaagaacaaagaaggatctggagatggaggtcgagctgagttgaatccttggcctgaatatatttacacacgtcttgagatgtataatatactaaaagcagaacatgattccattctggcagaaaaggcagaaaaagatagcaagccaattaaagtcactttgcctgatggtaaacaggttgatgcggaatcttggaaaactacaccatatcaaattgcctgtggaattagtcaaggcctggccgacaacaccgttattgctaaagtaaataatgttgtgtgggacctggaccgccctctggaagaagattgtaccttggagcttctcaagtttgaggatgaggaagctcaggcagtgtattggcactctagtgctcacataatgggtgaagccatggaaagagtctatggtggatgtttatgctacggtccgccaatagaaaatggattctattatgacatgtacctcgaagaagggggtgtgtctagcaatgatttctcttctctggaggctttgtgtaagaaaatcattaaagaaaaacaagcttttgaaagactggaagttaagaaagaaactttactggcaatgtttaagtacaacaagttcaaatgccggatattgaatgaaaaggtgaatactccaactaccacagtctatagatgtggccctttgatagatctctgccggggtcctcatgttagacacacgggcaaaattaaggctttaaaaatacacaaaaattcctccacgtactgggaaggcaaagcagatatggagactctccagagaatttatggcatttcattcccagatcctaaaatgttgaaagagtgggagaagttccaagaggaagctaaaaaccgagatcataggaaaattggcagggaccaagaactatatttctttcatgaactcagccctggaagttgcttttttctgccaaaaggagcctacatttataatgcacttattgaattcattaggagcgaatataggaaaagaggattccaggaggtagtcaccccaaacatcttcaacagccgactctggatgacctcgggccactggcagcactacagcgagaacatgttctcctttgaggtggagaaggagctgtttgccctgaaacccatgaactgcccaggacactgccttatgtttgatcatcggccaaggtcctggcgagaactgcctctgcggctagctgattttggggtacttcataggaacgagctgtctggagcactcacaggactcacccgggtacgaagattccaacaggatgatgctcacatattctgtgccatggagcagattgaagatgaaataaaaggttgtttggattttctacgtacggtatatagcgtatttggattttcttttaaactaaacctttctactcgcccggaaaaattccttggagatatcgaagtatgggatcaagctgagaaacaacttgaaaacagtctgaatgaatttggtgaaaagtgggagttaaactctggagatggagctttctatggcccaaagattgacatacagattaaagatgcgattgggcggtaccaccagtgtgcaaccatccagctggatttccagttgcccatcagatttaatcttacttatgtaagccatgatggtgatgataagaaaaggccagtgattgttcatcgagccatcttgggatcagtggaaagaatgattgctatcctcacagaaaactatgggggcaaatggcccttttggctgtcccctcgccaggtaatggtagttccagtgggaccaacctgtgatgaatatgcccaaaaggtacgacaacaattccacgatgccaaattcatggcagacattgatctggatccaggctgtacattgaataaaaagattcgaaatgcacagttagcacagtataacttcattttagttgttggtgaaaaagagaaaatcagtggcactgttaatatccgcacaagagacaataaggtccacggggaacgcaccatttctgaaactatcgagcggctacagcagctcaaagagttccgcagcaaacaggcagaagaagaattttaatgaaaaaattacccagattggctccatggaaaaggaggaacagcgtttccgtaaaattgactttgtactctgaaaacgtcaatttatattgaacttggaggagtttggcaaagtctgaataggtcaacctgcaggcgtaactatttttgacctagtcagtttttaaacaatgtgcatttgaaggagttaattaaaagagagccaataaaatgattttactcattcagtatctgagtactggaagtgaaacatgaggaatgctttagtgtaatgtgggagaacttttttgtaaatttaatgcaattgaaaaagttttcaaattcaattaagataactagaattggattatggtgtaaaaataaaaaaaaaatttattcacataagtttcaagactgctctgtccctcacatgtacacatacatgcctgagacagataatgtggttcagtatttatctttacagttttacagcaaatataatgcagggtggatggagacggggtaggtctgcagcatcataatgctattcataaactgggtgtgagctgggtgctggcttctcagaggataaacacttttgggagtgtcatttttacttaatgttggatggacaccttttcaaacaaaaactaccatggatctattacagagtagatttgcacaaatgtttaagataaaacgtgaatcttcagagaaatatctgtttatggcagactgttctggaccatagaatcacttggtttacaaattccctattttctcataagggatcattttcaaaatcttctaccaataaatggtgattgaaaggacagcacaaagtaaataatttcttatgtggataaatactaattcctccttgttagaatgatattttaaaagtaacatcttttttttaattttttttgagacaagatcctttgtcccccaggctggagtgtggtgccatgatctcggctcactgcaacctcagcctcccaagtaggtgggactaaagacatgtgccaccatgcctggctgatgtttgtattttctatagagatggtttcatcatgttgcccaggctggtatcaaactcctggataaaagagacccacctgcctcagtctcccaaagtgctgggattacaggtgtgagccaccac

SEQ ID NO: 1276 - DNA, 3442 bp, Homo sapiens
agaccaaggtcagcggagagtaggcatgtagcttctgcagttgctcctcctcaccctccgcgacctgatttcctagaagggctctgtcacccgaaaagattttccactggcttagaggagggagggcccgccttcccccgttatccattggctgctcgttccgccgcaagttgggggcggggttagggcgcctttcgattgcatcagctggtccagccgaggccaagtcccgggcgctagcccacctcccacccgcctcttggctcctctcctctaggccgtcgctttcgggttctctcatcgcttcgtcgttcgccaatgtttgaggagaaggccagcagtccttcagggaagatgggaggcgaggagaagccgattggtgctggtgaagagaagcaaaaggaaggaggcaaaaagaagaacaaagaaggatctggagatggaggtcgagctgagtcaaggcctggccgacaacaccgttattgctaaagtaaataatgttgtgtgggacctggaccgccctctggaagaagattgtaccttggagcttctcaagtttgaggatgaggaagctcaggcagtgtattggcactctagtgctcacataatgggtgaagccatggaaagagtctatggtggatgtttatgctacggtccgccaatagaaaatggattctattatgacatgtacctcgaagaagggggtgtgtctagcaatgatttctcttctctggaggctttgtgtaagaaaatcattaaagaaaaacaagcttttgaaagactggaagttaagaaagaaactttactggcaatgtttaagtacaacaagttcaaatgccggatattgaatgaaaaggtgaatactccaactaccacagtctatagatgtggccctttgatagatctctgccggggtcctcatgttagacacacgggcaaaattaaggctttaaaaatacacaaaaattcctccacgtactgggaaggcaaagcagatatggagactctccagagaatttatggcatttcattcccagatcctaaaatgttgaaagagtgggagaagttccaagaggaagctaaaaaccgagatcataggaaaattggcagggaccaagaactatatttctttcatgaactcagccctggaagttgcttttttctgccaaaaggagcctacatttataatgcacttattgaattcattaggagcgaatataggaaaagaggattccaggaggtagtcaccccaaacatcttcaacagccgactctggatgacctcgggccactggcagcactacagcgagaacatgttctcctttgaggtggagaaggagctgtttgccctgaaacccatgaactgcccaggacactgccttatgtttgatcatcggccaaggtcctggcgagaactgcctctgcggctagctgattttggggtacttcataggaacgagctgtctggagcactcacaggactcacccgggtacgaagattccaacaggatgatgctcacatattctgtgccatggagcagattgaagatgaaataaaaggttgtttggattttctacgtacggtatatagcgtatttggattttcttttaaactaaacctttctactcgcccggaaaaattccttggagatatcgaagtatgggatcaagctgagaaacaacttgaaaacagtctgaatgaatttggtgaaaagtgggagttaaactctggagatggagctttctatggcccaaagattgacatacagattaaagatgcgattgggcggtaccaccagtgtgcaaccatccagctggatttccagttgcccatcagatttaatcttacttatgtaagccatgatggtgatgataagaaaaggccagtgattgttcatcgagccatcttgggatcagtggaaagaatgattgctatcctcacagaaaactatgggggcaaatggcccttttggctgtcccctcgccaggtaatggtagttccagtgggaccaacctgtgatgaatatgcccaaaaggtacgacaacaattccacgatgccaaattcatggcagacattgatctggatccaggctgtacattgaataaaaagattcgaaatgcacagttagcacagtataacttcattttagttgttggtgaaaaagagaaaatcagtggcactgttaatatccgcacaagagacaataaggtccacggggaacgcaccatttctgaaactatcgagcggctacagcagctcaaagagttccgcagcaaacaggcagaagaagaattttaatgaaaaaattacccagattggctccatggaaaaggaggaacagcgtttccgtaaaattgactttgtactctgaaaacgtcaatttatattgaacttggaggagtttggcaaagtctgaataggtcaacctgcaggcgtaactatttttgacctagtcagtttttaaacaatgtgcatttgaaggagttaattaaaagagagccaataaaatgattttactcattcagtatctgagtactggaagtgaaacatgaggaatgctttagtgtaatgtgggagaacttttttgtaaatttaatgcaattgaaaaagttttcaaattcaattaagataactagaattggattatggtgtaaaaataaaaaaaaaatttattcacataagtttcaagactgctctgtccctcacatgtacacatacatgcctgagacagataatgtggttcagtatttatctttacagttttacagcaaatataatgcagggtggatggagacggggtaggtctgcagcatcataatgctattcataaactgggtgtgagctgggtgctggcttctcagaggataaacacttttgggagtgtcatttttacttaatgttggatggacaccttttcaaacaaaaactaccatggatctattacagagtagatttgcacaaatgtttaagataaaacgtgaatcttcagagaaatatctgtttatggcagactgttctggaccatagaatcacttggtttacaaattccctattttctcataagggatcattttcaaaatcttctaccaataaatggtgattgaaaggacagcacaaagtaaataatttcttatgtggataaatactaattcctccttgttagaatgatattttaaaagtaacatcttttttttaattttttttgagacaagatcctttgtcccccaggctggagtgtggtgccatgatctcggctcactgcaacctcagcctcccaagtaggtgggactaaagacatgtgccaccatgcctggctgatgtttgtattttctatagagatggtttcatcatgttgcccaggctggtatcaaactcctggataaaagagacccacctgcctcagtctcccaaagtgctgggattacaggtgtgagccaccac

SEQ ID NO: 1277 - DNA, 13235 bp, Homo sapiens
atggcgggctccggagccggtgtgcgttgctccctgctgcggctgcaggagaccttgtccgctgcggaccgctgcggtgctgccctggccggtcatcaactgatccgcggcctggggcaggaatgcgtcctgagcagcagccccgcggtgctggcattacagacatctttagttttttccagagatttcggtttgcttgtatttgtccggaagtcactcaacagtattgaatttcgtgaatgtagagaagaaatcctaaagtttttatgtattttcttagaaaaaatgggccagaagatcgcaccttactctgttgaaattaagaacacttgtaccagtgtttatacaaaagatagagctgctaaatgtaaaattccagccctggaccttcttattaagttacttcagacttttagaagttctagactcatggatgaatttaaaattggagaattatttagtaaattctatggagaacttgcattgaaaaaaaaaataccagatacagttttagaaaaagtatatgagctcctaggattattgggtgaagttcatcctagtgagatgataaataatgcagaaaacctgttccgcgcttttctgggtgaacttaagacccagatgacatcagcagtaagagagcccaaactacctgttctggcaggatgtctgaaggggttgtcctcacttctgtgcaacttcactaagtccatggaagaagatccccagacttcaagggagatttttaattttgtactaaaggcaattcgtcctcagattgatctgaagagatatgctgtgccctcagctggcttgcgcctatttgccctgcatgcatctcagtttagcacctgccttctggacaactacgtgtctctatttgaagtcttgttaaagtggtgtgcccacacaaatgtagaattgaaaaaagctgcactttcagccctggaatcctttctgaaacaggtttctaatatggtggcgaaaaatgcagaaatgcataaaaataaactgcagtactttatggagcagttttatggaatcatcagaaatgtggattcgaacaacaaggagttatctattgctatccgtggatatggactttttgcaggaccgtgcaaggttataaacgcaaaagatgttgacttcatgtacgttgagctcattcagcgctgcaagcagatgttcctcacccagacagacactggtgacgaccgtgtttatcagatgccaagcttcctccagtctgttgcaagcgtcttgctgtaccttgacacagttcctgaggtgtatactccagttctggagcacctcgtggtgatgcagatagacagtttcccacagtacagtccaaaaatgcagctggtgtgttgcagagccatagtgaaggtgttcctagctttggcagcaaaagggccagttctcaggaattgcattagtactgtggtgcatcagggtttaatcagaatatgttctaaaccagtggtccttccaaagggccctgagtctgaatctgaagaccaccgtgcttcaggggaagtcagaactggcaaatggaaggtgcccacatacaaagactacgtggatctcttcagacatctcctgagctctgaccagatgatggattctattttagcagatgaagcatttttctctgtgaattcctccagtgaaagtctgaatcatttactttatgatgaatttgtaaaatccgttttgaagattgttgagaaattggatcttacacttgaaatacagactgttggggaacaagagaatggagatgaggcgcctggtgtttggatgatcccaacttcagatccagcggctaacttgcatccagctaaacctaaagatttttcggctttcattaacctggtggaattttgcagagagattctccctgagaaacaagcagaattttttgaaccatgggtgtactcattttcatatgaattaattttgcaatctacaaggttgcccctcatcagtggtttctacaaattgctttctattacagtaagaaatgccaagaaaataaaatatttcgagggagttagtccaaagagtctgaaacactctcctgaagacccagaaaagtattcttgctttgctttatttgtgaaatttggcaaagaggtggcagttaaaatgaagcagtacaaagatgaacttttggcctcttgtttgacctttcttctgtccttgccacacaacatcattgaactcgatgttagagcctacgttcctgcactgcagatggctttcaaactgggcctgagctatacccccttggcagaagtaggcctgaatgctctagaagaatggtcaatttatattgacagacatgtaatgcagccttattacaaagacattctcccctgcctggatggatacctgaagacttcagccttgtcagatgagaccaagaataactgggaagtgtcagctctttctcgggctgcccagaaaggatttaataaagtggtgttaaagcatctgaagaagacaaagaacctttcatcaaacgaagcaatatccttagaagaaataagaattagagtagtacaaatgcttggatctctaggaggacaaataaacaaaaatcttctgacagtcacgtcctcagatgagatgatgaagagctatgtggcctgggacagagagaagcggctgagctttgcagtgccctttagagagatgaaacctgtcattttcctggatgtgttcctgcctcgagtcacagaattagcgctcacagccagtgacagacaaactaaagttgcagcctgtgaacttttacatagcatggttatgtttatgttgggcaaagccacgcagatgccagaagggggacagggagccccacccatgtaccagctctataagcggacgtttcctgtgctgcttcgacttgcgtgtgatgttgatcaggtgacaaggcaactgtatgagccactagttatgcagctgattcactggttcactaacaacaagaaatttgaaagtcaggatactgttgccttactagaagctatattggatggaattgtggaccctgttgacagtactttaagagatttttgtggtcggtgtattcgagaattccttaaatggtccattaagcaaataacaccacagcagcaggagaagagtccagtaaacaccaaatcgcttttcaagcgactttatagccttgcgcttcaccccaatgctttcaagaggctgggagcatcacttgcctttaataatatctacagggaattcagggaagaagagtctctggtggaacagtttgtgtttgaagccttggtgatatacatggagagtctggccttagcacatgcagatgagaagtccttaggtacaattcaacagtgttgtgatgccattgatcacctatgccgcatcattgaaaagaagcatgtttctttaaataaagcaaagaaacgacgtttgccgcgaggatttccaccttccgcatcattgtgtttattggatctggtcaagtggcttttagctcattgtgggaggccccagacagaatgtcgacacaaatccattgaactcttttataaattcgttcctttattgccaggcaacagatcccctaatttgtggctgaaagatgttctcaaggaagaaggtgtctcttttctcatcaacacctttgaggggggtggctgtggccagccctcgggcatcctggcccagcccaccctcttgtaccttcgggggccattcagcctgcaggccacgctatgctggctggacctgctcctggccgcgttggagtgctacaacacgttcattggcgagagaactgtaggagcgctccaggtcctaggtactgaagcccagtcttcacttttgaaagcagtggctttcttcttagaaagcattgccatgcatgacattatagcagcagaaaagtgctttggcactggggcagcaggtaacagaacaagcccacaagagggagaaaggtacaactacagcaaatgcaccgttgtggtccggattatggagtttaccacgactctgctaaacacctccccggaaggatggaagctcctgaagaaggacttgtgtaatacacacctgatgagagtcctggtgcagacgctgtgtgagcccgcaagcataggtttcaacatcggagacgtccaggttatggctcatcttcctgatgtttgtgtgaatctgatgaaagctctaaagatgtccccatacaaagatatcctagagacccatctgagagagaaaataacagcacagagcattgaggagctttgtgccgtcaacttgtatggccctgacgcgcaagtggacaggagcaggctggctgctgttgtgtctgcctgtaaacagcttcacagagctgggcttctgcataatatattaccgtctcagtccacagatttgcatcattctgttggcacagaacttctttccctggtttataaaggcattgcccctggagatgagagacagtgtctgccttctctagacctcagttgtaagcagctggccagcggacttctggagttagcctttgcttttggaggactgtgtgagcgccttgtgagtcttctcctgaacccagcggtgctgtccacggcgtccttgggcagctcacagggcagcgtcatccacttctcccatggggagtatttctatagcttgttctcagaaacgatcaacacggaattattgaaaaatctggatcttgctgtattggagctcatgcagtcttcagtggataataccaaaatggtgagtgccgttttgaacggcatgttagaccagagcttcagggagcgagcaaaccagaaacaccaaggactgaaacttgcgactacaattctgcaacactggaagaagtgtgattcatggtgggccaaagattcccctctcgaaactaaaatggcagtgctggccttactggcaaaaattttacagattgattcatctgtatcttttaatacaagtcatggttcattccctgaagtctttacaacatatattagtctacttgctgacacaaagctggatctacatttaaagggccaagctgtcactcttcttccattcttcaccagcctcactggaggcagtctggaggaacttagacgtgttctggagcagctcatcgttgctcacttccccatgcagtccagggaatttcctccaggaactccgcggttcaataattatgtggactgcatgaaaaagtttctagatgcattggaattatctcaaagccctatgttgttggaattgatgacagaagttctttgtcgggaacagcagcatgtcatggaagaattatttcaatccagtttcaggaggattgccagaaggggttcatgtgtcacacaagtaggccttctggaaagcgtgtatgaaatgttcaggaaggatgacccccgcctaagtttcacacgccagtcctttgtggaccgctccctcctcactctgctgtggcactgtagcctggatgctttgagagaattcttcagcacaattgtggtggatgccattgatgtgttgaagtccaggtttacaaagctaaatgaatctacctttgatactcaaatcaccaagaagatgggctactataagattctagacgtgatgtattctcgccttcccaaagatgatgttcatgctaaggaatcaaaaattaatcaagttttccatggctcgtgtattacagaaggaaatgaacttacaaagacattgattaaattgtgctacgatgcatttacagagaacatggcaggagagaatcagctgctggagaggagaagactttaccattgtgcagcatacaactgcgccatatctgtcatctgctgtgtcttcaatgagttaaaattttaccaaggttttctgtttagtgaaaaaccagaaaagaacttgcttatttttgaaaatctgatcgacctgaagcgccgctataattttcctgtagaagttgaggttcctatggaaagaaagaaaaagtacattgaaattaggaaagaagccagagaagcagcaaatggggattcagatggtccttcctatatgtcttccctgtcatatttggcagacagtaccctgagtgaggaaatgagtcaatttgatttctcaaccggagttcagagctattcatacagctcccaagaccctagacctgccactggtcgttttcggagacgggagcagcgggaccccacggtgcatgatgatgtgctggagctggagatggacgagctcaatcggcatgagtgcatggcgcccctgacggccctggtcaagcacatgcacagaagcctgggcccgcctcaaggagaagaggattcagtgccaagagatcttccttcttggatgaaattcctccatggcaaactgggaaatccaatagtaccattaaatatccgtctcttcttagccaagcttgttattaatacagaagaggtctttcgcccttacgcgaagcactggcttagccccttgctgcagctggctgcttctgaaaacaatggaggagaaggaattcactacatggtggttgagatagtggccactattctttcatggacaggcttggccactccaacaggggtccctaaagatgaagtgttagcaaatcgattgcttaatttcctaatgaaacatgtctttcatccaaaaagagctgtgtttagacacaaccttgaaattataaagacccttgtcgagtgctggaaggattgtttatccatcccttataggttaatatttgaaaagttttccggtaaagatcctaattctaaagacaactcagtagggattcaattgctaggcatcgtgatggccaatgacctgcctccctatgacccacagtgtggcatccagagtagcgaatacttccaggctttggtgaataatatgtcctttgtaagatataaagaagtgtatgccgctgcagcagaagttctaggacttatacttcgatatgttatggagagaaaaaacatactggaggagtctctgtgtgaactggttgcgaaacaattgaagcaacatcagaatactatggaggacaagtttattgtgtgcttgaacaaagtgaccaagagcttccctcctcttgcagacaggttcatgaatgctgtgttctttctgctgccaaaatttcatggagtgttgaaaacactctgtctggaggtggtactttgtcgtgtggagggaatgacagagctgtacttccagttaaagagcaaggacttcgttcaagtcatgagacatagagatgatgaaagacaaaaagtatgtttggacataatttataagatgatgccaaagttaaaaccagtagaactccgagaacttctgaaccccgttgtggaattcgtttcccatccttctacaacatgtagggaacaaatgtataatattctcatgtggattcatgataattacagagatccagaaagtgagacagataatgactcccaggaaatatttaagttggcaaaagatgtgctgattcaaggattgatcgatgagaaccctggacttcaattaattattcgaaatttctggagccatgaaactaggttaccttcaaataccttggaccggttgctggcactaaattccttatattctcctaagatagaagtgcactttttaagtttagcaacaaattttctgctcgaaatgaccagcatgagcccagattatccaaaccccatgttcgagcatcctctgtcagaatgcgaatttcaggaatataccattgattctgattggcgtttccgaagtactgttctcactccgatgtttgtggagacccaggcctcccagggcactctccagacccgtacccaggaagggtccctctcagctcgctggccagtggcagggcagataagggccacccagcagcagcatgacttcacactgacacagactgcagatggaagaagctcatttgattggctgaccgggagcagcactgacccgctggtcgaccacaccagtccctcatctgactccttgctgtttgcccacaagaggagtgaaaggttacagagagcacccttgaagtcagtggggcctgattttgggaaaaaaaggctgggccttccaggggacgaggtggataacaaagtgaaaggtgcggccggccggacggacctactacgactgcgcagacggtttatgagggaccaggagaagctcagtttgatgtatgccagaaaaggcgttgctgagcaaaaacgagagaaggaaatcaagagtgagttaaaaatgaagcaggatgcccaggtcgttctgtacagaagctaccggcacggagaccttcctgacattcagatcaagcacagcagcctcatcaccccgttacaggccgtggcccagagggacccaataattgcaaaacagctctttagcagcttgttttctggaattttgaaagagatggataaatttaagacactgtctgaaaaaaacaacatcactcaaaagttgcttcaagacttcaatcgttttcttaataccaccttctctttctttccaccctttgtctcttgtattcaggacattagctgtcagcacgcagccctgctgagcctcgacccagcggctgttagcgctggttgcctggccagcctacagcagcccgtgggcatccgcctgctagaggaggctctgctccgcctgctgcctgctgagctgcctgccaagcgagtccgtgggaaggcccgcctccctcctgatgtcctcagatgggtggagcttgctaagctgtatagatcaattggagaatacgacgtcctccgtgggatttttaccagtgagataggaacaaagcaaatcactcagagtgcattattagcagaagccagaagtgattattctgaagctgctaagcagtatgatgaggctctcaataaacaagactgggtagatggtgagcccacagaagccgagaaggatttttgggaacttgcatcccttgactgttacaaccaccttgctgagtggaaatcacttgaatactgttctacagccagtatagacagtgagaaccccccagacctaaataaaatctggagtgaaccattttatcaggaaacatatctaccttacatgatccgcagcaagctgaagctgctgctccagggagaggctgaccagtccctgctgacatttattgacaaagctatgcacggggagctccagaaggcgattctagagcttcattacagtcaagagctgagtctgctttacctcctgcaagatgatgttgacagagccaaatattacattcaaaatggcattcagagttttatgcagaattattctagtattgatgtcctcttacaccaaagtagactcaccaaattgcagtctgtacaggctttaacagaaattcaggagttcatcagctttataagcaaacaaggcaatttatcatctcaagttccccttaagagacttctgaacacctggacaaacagatatccagatgctaaaatggacccaatgaacatctgggatgacatcatcacaaatcgatgtttctttctcagcaaaatagaggagaagcttacccctcttccagaagataatagtatgaatgtggatcaagatggagaccccagtgacaggatggaagtgcaagagcaggaagaagatatcagctccctgatcaggagttgcaagttttccatgaaaatgaagatgatagacagtgcccggaagcagaacaatttctcacttgctatgaaactactgaaggagctgcataaagagtcaaaaaccagagacgattggctggtgagctgggtgcagagctactgccgcctgagccactgccggagccggtcccagggctgctctgagcaggtgctcactgtgctgaaaacagtctctttgttggatgagaacaacgtgtcaagctacttaagcaaaaatattctggctttccgtgaccagaacattctcttgggtacaacttacaggatcatagcgaatgctctcagcagtgagccagcctgccttgctgaaatcgaggaggacaaggctagaagaatcttagagctttctggatccagttcagaggattcagagaaggtgatcgcgggtctgtaccagagagcattccagcacctctctgaggctgtgcaggcggctgaggaggaggcccagcctccctcctggagctgtgggcctgcagctggggtgattgatgcttacatgacgctggcagatttctgtgaccaacagctgcgcaaggaggaagagaatgcatcagttattgattctgcagaactgcaggcgtatccagcacttgtggtggagaaaatgttgaaagctttaaaattaaattccaatgaagccagattgaagtttcctagattacttcagattatagaacggtatccagaggagactttgagcctcatgacaaaagagatctcttccgttccctgctggcagttcatcagctggatcagccacatggtggccttactggacaaagaccaagccgttgctgttcagcactctgtggaagaaatcactgataactacccgcaggctattgtttatcccttcatcataagcagcgaaagctattccttcaaggatacttctactggtcataagaataaggagtttgtggcaaggattaaaagtaagttggatcaaggaggagtgattcaagattttattaatgccttagatcagctctctaatcctgaactgctctttaaggattggagcaatgatgtaagagctgaactagcaaaaacccctgtaaataaaaaaaacattgaaaaaatgtatgaaagaatgtatgcagccttgggtgacccaaaggctccaggcctgggggcctttagaaggaagtttattcagacttttggaaaagaatttgataaacattttgggaaaggaggttctaaactactgagaatgaagctcagtgacttcaacgacattaccaacatgctacttttaaaaatgaacaaagactcaaagccccctgggaatctgaaagaatgttcaccctggatgagcgacttcaaagtggagttcctgagaaatgagctggagattcccggtcagtatgacggtaggggaaagccattgccagagtaccacgtgcgaatcgccgggtttgatgagcgggtagtcatggcgtctctgcgaaggcccaagcgcatcatcatccgtggccatgacgagagggaacaccctttcctggtgaagggtggcgaggacctgcggcaggaccagcgcgtggagcagctcttccaggtcatgaatgggatcctggcccaagactccgcctgcagccagagggccctgcagctgaggacctatagcgttgtgcccatgacctccaggttaggattaattgagtggcttgaaaatactgttaccttgaaggaccttcttttgaacaccatgtcccaagaggagaaggcggcttacctgagtgatcccagggcaccgccgtgtgaatataaagattggctgacaaaaatgtcaggaaaacatgatgttggagcttacatgctaatgtataagggcgctaatcgtactgaaacagtcacgtcttttagaaaacgagaaagtaaagtgcctgctgatctcttaaagcgggccttcgtgaggatgagtacaagccctgaggctttcctggcgctccgctcccacttcgccagctctcacgctctgatatgcatcagccactggatcctcgggattggagacagacatctgaacaactttatggtggccatggagactggcggcgtgatcgggatcgactttgggcatgcgtttggatccgctacacagtttctgccagtccctgagttgatgccttttcggctaactcgccagtttatcaatctgatgttaccaatgaaagaaacgggccttatgtacagcatcatggtacacgcactccgggccttccgctcagaccctggcctgctcaccaacaccatggatgtgtttgtcaaggagccctcctttgattggaaaaattttgaacagaaaatgctgaaaaaaggagggtcatggattcaagaaataaatgttgctgaaaaaaattggtacccccgacagaaaatatgttacgctaagagaaagttagcaggtgccaatccagcagtcattacttgtgatgagctactcctgggtcatgagaaggcccctgccttcagagactatgtggctgtggcacgaggaagcaaagatcacaacattcgtgcccaagaaccagagagtgggctttcagaagagactcaagtgaagtgcctgatggaccaggcaacagaccccaacatccttggcagaacctgggaaggatgggagccctggatgtgaggtctgtgggagtctgcagatagaaagcattacattgtttaaagaatctactatactttggttggcagcattccatgagctgattttcctgaaacactaaagagaaatgtcttttgtgctacagtttcgtagcatgagtttaaatcaagattatgatgagtaaatgtgtatgggtttgtgatcagctttcaaagcatttacaagtgctgcaagttagtgaaacagctgtctccgtaaatggaggaaatgtggggaagccttggaatgcccttctggttctggcacattggaaagcacactcagaaggcttcatcaccaagattttgggagagtaaagctaagtatagttgatgtaacattgtagaagcagcataggaacaataagaacaataggtaaagctataattatggcttatatttagaaatgactgcatttgatattttaggatatttttctaggttttttcctttcattttattctcttctagttttgacattttatgatagatttgctctctagaaggaaacgtctttatttaggagggcaaaaattttggtcatagcattcacttttgctattccaatctacaactggaagatacataaaagtgctttgcattgaatttgggataacttcaaaaatcccatggttgttgttagggatagtactaagcatttcagttccaggagaataaaagaaattcctatttgaaatgaattcctcatttggaggaaaaaaagcatgcattctagcacaacaagatgaaattatggaatacaaaagtggctccttcccatgtgcagtccctgtccccccccgccagtcctccacacccaaactgtttctgat

SEQ ID NO: 1278 - DNA, 13449 bp, Homo sapiens
atggcgggctccggagccggtgtgcgttgctccctgctgcggctgcaggagaccttgtccgctgcggaccgctgcggtgctgccctggccggtcatcaactgatccgcggcctggggcaggaatgcgtcctgagcagcagccccgcggtgctggcattacagacatctttagttttttccagagatttcggtttgcttgtatttgtccggaagtcactcaacagtattgaatttcgtgaatgtagagaagaaatcctaaagtttttatgtattttcttagaaaaaatgggccagaagatcgcaccttactctgttgaaattaagaacacttgtaccagtgtttatacaaaagatagagctgctaaatgtaaaattccagccctggaccttcttattaagttacttcagacttttagaagttctagactcatggatgaatttaaaattggagaattatttagtaaattctatggagaacttgcattgaaaaaaaaaataccagatacagttttagaaaaagtatatgagctcctaggattattgggtgaagttcatcctagtgagatgataaataatgcagaaaacctgttccgcgcttttctgggtgaacttaagacccagatgacatcagcagtaagagagcccaaactacctgttctggcaggatgtctgaaggggttgtcctcacttctgtgcaacttcactaagtccatggaagaagatccccagacttcaagggagatttttaattttgtactaaaggcaattcgtcctcagattgatctgaagagatatgctgtgccctcagctggcttgcgcctatttgccctgcatgcatctcagtttagcacctgccttctggacaactacgtgtctctatttgaagtcttgttaaagtggtgtgcccacacaaatgtagaattgaaaaaagctgcactttcagccctggaatcctttctgaaacaggtttctaatatggtggcgaaaaatgcagaaatgcataaaaataaactgcagtactttatggagcagttttatggaatcatcagaaatgtggattcgaacaacaaggagttatctattgctatccgtggatatggactttttgcaggaccgtgcaaggttataaacgcaaaagatgttgacttcatgtacgttgagctcattcagcgctgcaagcagatgttcctcacccagacagacactggtgacgaccgtgtttatcagatgccaagcttcctccagtctgttgcaagcgtcttgctgtaccttgacacagttcctgaggtgtatactccagttctggagcacctcgtggtgatgcagatagacagtttcccacagtacagtccaaaaatgcagctggtgtgttgcagagccatagtgaaggtgttcctagctttggcagcaaaagggccagttctcaggaattgcattagtactgtggtgcatcagggtttaatcagaatatgttctaaaccagtggtccttccaaagggccctgagtctgaatctgaagaccaccgtgcttcaggggaagtcagaactggcaaatggaaggtgcccacatacaaagactacgtggatctcttcagacatctcctgagctctgaccagatgatggattctattttagcagatgaagcatttttctctgtgaattcctccagtgaaagtctgaatcatttactttatgatgaatttgtaaaatccgttttgaagattgttgagaaattggatcttacacttgaaatacagactgttggggaacaagagaatggagatgaggcgcctggtgtttggatgatcccaacttcagatccagcggctaacttgcatccagctaaacctaaagatttttcggctttcattaacctggtggaattttgcagagagattctccctgagaaacaagcagaattttttgaaccatgggtgtactcattttcatatgaattaattttgcaatctacaaggttgcccctcatcagtggtttctacaaattgctttctattacagtaagaaatgccaagaaaataaaatatttcgagggagttagtccaaagagtctgaaacactctcctgaagacccagaaaagtattcttgctttgctttatttgtgaaatttggcaaagaggtggcagttaaaatgaagcagtacaaagatgaacttttggcctcttgtttgacctttcttctgtccttgccacacaacatcattgaactcgatgttagagcctacgttcctgcactgcagatggctttcaaactgggcctgagctatacccccttggcagaagtaggcctgaatgctctagaagaatggtcaatttatattgacagacatgtaatgcagccttattacaaagacattctcccctgcctggatggatacctgaagacttcagccttgtcagatgagaccaagaataactgggaagtgtcagctctttctcgggctgcccagaaaggatttaataaagtggtgttaaagcatctgaagaagacaaagaacctttcatcaaacgaagcaatatccttagaagaaataagaattagagtagtacaaatgcttggatctctaggaggacaaataaacaaaaatcttctgacagtcacgtcctcagatgagatgatgaagagctatgtggcctgggacagagagaagcggctgagctttgcagtgccctttagagagatgaaacctgtcattttcctggatgtgttcctgcctcgagtcacagaattagcgctcacagccagtgacagacaaactaaagttgcagcctgtgaacttttacatagcatggttatgtttatgttgggcaaagccacgcagatgccagaagggggacagggagccccacccatgtaccagctctataagcggacgtttcctgtgctgcttcgacttgcgtgtgatgttgatcaggtgacaaggcaactgtatgagccactagttatgcagctgattcactggttcactaacaacaagaaatttgaaagtcaggatactgttgccttactagaagctatattggatggaattgtggaccctgttgacagtactttaagagatttttgtggtcggtgtattcgagaattccttaaatggtccattaagcaaataacaccacagcagcaggagaagagtccagtaaacaccaaatcgcttttcaagcgactttatagccttgcgcttcaccccaatgctttcaagaggctgggagcatcacttgcctttaataatatctacagggaattcagggaagaagagtctctggtggaacagtttgtgtttgaagccttggtgatatacatggagagtctggccttagcacatgcagatgagaagtccttaggtacaattcaacagtgttgtgatgccattgatcacctatgccgcatcattgaaaagaagcatgtttctttaaataaagcaaagaaacgacgtttgccgcgaggatttccaccttccgcatcattgtgtttattggatctggtcaagtggcttttagctcattgtgggaggccccagacagaatgtcgacacaaatccattgaactcttttataaattcgttcctttattgccaggcaacagatcccctaatttgtggctgaaagatgttctcaaggaagaaggtgtctcttttctcatcaacacctttgaggggggtggctgtggccagccctcgggcatcctggcccagcccaccctcttgtaccttcgggggccattcagcctgcaggccacgctatgctggctggacctgctcctggccgcgttggagtgctacaacacgttcattggcgagagaactgtaggagcgctccaggtcctaggtactgaagcccagtcttcacttttgaaagcagtggctttcttcttagaaagcattgccatgcatgacattatagcagcagaaaagtgctttggcactggggcagcaggtaacagaacaagcccacaagagggagaaaggtacaactacagcaaatgcaccgttgtggtccggattatggagtttaccacgactctgctaaacacctccccggaaggatggaagctcctgaagaaggacttgtgtaatacacacctgatgagagtcctggtgcagacgctgtgtgagcccgcaagcataggtttcaacatcggagacgtccaggttatggctcatcttcctgatgtttgtgtgaatctgatgaaagctctaaagatgtccccatacaaagatatcctagagacccatctgagagagaaaataacagcacagagcattgaggagctttgtgccgtcaacttgtatggccctgacgcgcaagtggacaggagcaggctggctgctgttgtgtctgcctgtaaacagcttcacagagctgggcttctgcataatatattaccgtctcagtccacagatttgcatcattctgttggcacagaacttctttccctggtttataaaggcattgcccctggagatgagagacagtgtctgccttctctagacctcagttgtaagcagctggccagcggacttctggagttagcctttgcttttggaggactgtgtgagcgccttgtgagtcttctcctgaacccagcggtgctgtccacggcgtccttgggcagctcacagggcagcgtcatccacttctcccatggggagtatttctatagcttgttctcagaaacgatcaacacggaattattgaaaaatctggatcttgctgtattggagctcatgcagtcttcagtggataataccaaaatggtgagtgccgttttgaacggcatgttagaccagagcttcagggagcgagcaaaccagaaacaccaaggactgaaacttgcgactacaattctgcaacactggaagaagtgtgattcatggtgggccaaagattcccctctcgaaactaaaatggcagtgctggccttactggcaaaaattttacagattgattcatctgtatcttttaatacaagtcatggttcattccctgaagtctttacaacatatattagtctacttgctgacacaaagctggatctacatttaaagggccaagctgtcactcttcttccattcttcaccagcctcactggaggcagtctggaggaacttagacgtgttctggagcagctcatcgttgctcacttccccatgcagtccagggaatttcctccaggaactccgcggttcaataattatgtggactgcatgaaaaagtttctagatgcattggaattatctcaaagccctatgttgttggaattgatgacagaagttctttgtcgggaacagcagcatgtcatggaagaattatttcaatccagtttcaggaggattgccagaaggggttcatgtgtcacacaagtaggccttctggaaagcgtgtatgaaatgttcaggaaggatgacccccgcctaagtttcacacgccagtcctttgtggaccgctccctcctcactctgctgtggcactgtagcctggatgctttgagagaattcttcagcacaattgtggtggatgccattgatgtgttgaagtccaggtttacaaagctaaatgaatctacctttgatactcaaatcaccaagaagatgggctactataagattctagacgtgatgtattctcgccttcccaaagatgatgttcatgctaaggaatcaaaaattaatcaagttttccatggctcgtgtattacagaaggaaatgaacttacaaagacattgattaaattgtgctacgatgcatttacagagaacatggcaggagagaatcagctgctggagaggagaagactttaccattgtgcagcatacaactgcgccatatctgtcatctgctgtgtcttcaatgagttaaaattttaccaaggttttctgtttagtgaaaaaccagaaaagaacttgcttatttttgaaaatctgatcgacctgaagcgccgctataattttcctgtagaagttgaggttcctatggaaagaaagaaaaagtacattgaaattaggaaagaagccagagaagcagcaaatggggattcagatggtccttcctatatgtcttccctgtcatatttggcagacagtaccctgagtgaggaaatgagtcaatttgatttctcaaccggagttcagagctattcatacagctcccaagaccctagacctgccactggtcgttttcggagacgggagcagcgggaccccacggtgcatgatgatgtgctggagctggagatggacgagctcaatcggcatgagtgcatggcgcccctgacggccctggtcaagcacatgcacagaagcctgggcccgcctcaaggagaagaggattcagtgccaagagatcttccttcttggatgaaattcctccatggcaaactgggaaatccaatagtaccattaaatatccgtctcttcttagccaagcttgttattaatacagaagaggtctttcgcccttacgcgaagcactggcttagccccttgctgcagctggctgcttctgaaaacaatggaggagaaggaattcactacatggtggttgagatagtggccactattctttcatggacaggcttggccactccaacaggggtccctaaagatgaagtgttagcaaatcgattgcttaatttcctaatgaaacatgtctttcatccaaaaagagctgtgtttagacacaaccttgaaattataaagacccttgtcgagtgctggaaggattgtttatccatcccttataggttaatatttgaaaagttttccggtaaagatcctaattctaaagacaactcagtagggattcaattgctaggcatcgtgatggccaatgacctgcctccctatgacccacagtgtggcatccagagtagcgaatacttccaggctttggtgaataatatgtcctttgtaagatataaagaagtgtatgccgctgcagcagaagttctaggacttatacttcgatatgttatggagagaaaaaacatactggaggagtctctgtgtgaactggttgcgaaacaattgaagcaacatcagaatactatggaggacaagtttattgtgtgcttgaacaaagtgaccaagagcttccctcctcttgcagacaggttcatgaatgctgtgttctttctgctgccaaaatttcatggagtgttgaaaacactctgtctggaggtggtactttgtcgtgtggagggaatgacagagctgtacttccagttaaagagcaaggacttcgttcaagtcatgagacatagagatgatgaaagacaaaaagtatgtttggacataatttataagatgatgccaaagttaaaaccagtagaactccgagaacttctgaaccccgttgtggaattcgtttcccatccttctacaacatgtagggaacaaatgtataatattctcatgtggattcatgataattacagagatccagaaagtgagacagataatgactcccaggaaatatttaagttggcaaaagatgtgctgattcaaggattgatcgatgagaaccctggacttcaattaattattcgaaatttctggagccatgaaactaggttaccttcaaataccttggaccggttgctggcactaaattccttatattctcctaagatagaagtgcactttttaagtttagcaacaaattttctgctcgaaatgaccagcatgagcccagattatccaaaccccatgttcgagcatcctctgtcagaatgcgaatttcaggaatataccattgattctgattggcgtttccgaagtactgttctcactccgatgtttgtggagacccaggcctcccagggcactctccagacccgtacccaggaagggtccctctcagctcgctggccagtggcagggcagataagggccacccagcagcagcatgacttcacactgacacagactgcagatggaagaagctcatttgattggctgaccgggagcagcactgacccgctggtcgaccacaccagtccctcatctgactccttgctgtttgcccacaagaggagtgaaaggttacagagagcacccttgaagtcagtggggcctgattttgggaaaaaaaggctgggccttccaggggacgaggtggataacaaagtgaaaggtgcggccggccggacggacctactacgactgcgcagacggtttatgagggaccaggagaagctcagtttgatgtatgccagaaaaggcgttgctgagcaaaaacgagagaaggaaatcaagagtgagttaaaaatgaagcaggatgcccaggtcgttctgtacagaagctaccggcacggagaccttcctgacattcagatcaagcacagcagcctcatcaccccgttacaggccgtggcccagagggacccaataattgcaaaacagctctttagcagcttgttttctggaattttgaaagagatggataaatttaagacactgtctgaaaaaaacaacatcactcaaaagttgcttcaagacttcaatcgttttcttaataccaccttctctttctttccaccctttgtctcttgtattcaggacattagctgtcagcacgcagccctgctgagcctcgacccagcggctgttagcgctggttgcctggccagcctacagcagcccgtgggcatccgcctgctagaggaggctctgctccgcctgctgcctgctgagctgcctgccaagcgagtccgtgggaaggcccgcctccctcctgatgtcctcagatgggtggagcttgctaagctgtatagatcaattggagaatacgacgtcctccgtgggatttttaccagtgagataggaacaaagcaaatcactcagagtgcattattagcagaagccagaagtgattattctgaagctgctaagcagtatgatgaggctctcaataaacaagactgggtagatggtgagcccacagaagccgagaaggatttttgggaacttgcatcccttgactgttacaaccaccttgctgagtggaaatcacttgaatactgttctacagccagtatagacagtgagaaccccccagacctaaataaaatctggagtgaaccattttatcaggaaacatatctaccttacatgatccgcagcaagctgaagctgctgctccagggagaggctgaccagtccctgctgacatttattgacaaagctatgcacggggagctccagaaggcgattctagagcttcattacagtcaagagctgagtctgctttacctcctgcaagatgatgttgacagagccaaatattacattcaaaatggcattcagagttttatgcagaattattctagtattgatgtcctcttacaccaaagtagactcaccaaattgcagtctgtacaggctttaacagaaattcaggagttcatcagctttataagcaaacaaggcaatttatcatctcaagttccccttaagagacttctgaacacctggacaaacagatatccagatgctaaaatggacccaatgaacatctgggatgacatcatcacaaatcgatgtttctttctcagcaaaatagaggagaagcttacccctcttccagaagataatagtatgaatgtggatcaagatggagaccccagtgacaggatggaagtgcaagagcaggaagaagatatcagctccctgatcaggagttgcaagttttccatgaaaatgaagatgatagacagtgcccggaagcagaacaatttctcacttgctatgaaactactgaaggagctgcataaagagtcaaaaaccagagacgattggctggtgagctgggtgcagagctactgccgcctgagccactgccggagccggtcccagggctgctctgagcaggtgctcactgtgctgaaaacagtctctttgttggatgagaacaacgtgtcaagctacttaagcaaaaatattctggctttccgtgaccagaacattctcttgggtacaacttacaggatcatagcgaatgctctcagcagtgagccagcctgccttgctgaaatcgaggaggacaaggctagaagaatcttagagctttctggatccagttcagaggattcagagaaggtgatcgcgggtctgtaccagagagcattccagcacctctctgaggctgtgcaggcggctgaggaggaggcccagcctccctcctggagctgtgggcctgcagctggggtgattgatgcttacatgacgctggcagatttctgtgaccaacagctgcgcaaggaggaagagaatgcatcagttattgattctgcagaactgcaggcgtatccagcacttgtggtggagaaaatgttgaaagctttaaaattaaattccaatgaagccagattgaagtttcctagattacttcagattatagaacggtatccagaggagactttgagcctcatgacaaaagagatctcttccgttccctgctggcagttcatcagctggatcagccacatggtggccttactggacaaagaccaagccgttgctgttcagcactctgtggaagaaatcactgataactacccgcaggctattgtttatcccttcatcataagcagcgaaagctattccttcaaggatacttctactggtcataagaataaggagtttgtggcaaggattaaaagtaagttggatcaaggaggagtgattcaagattttattaatgccttagatcagctctctaatcctgaactgctctttaaggattggagcaatgatgtaagagctgaactagcaaaaacccctgtaaataaaaaaaacattgaaaaaatgtatgaaagaatgtatgcagccttgggtgacccaaaggctccaggcctgggggcctttagaaggaagtttattcagacttttggaaaagaatttgataaacattttgggaaaggaggttctaaactactgagaatgaagctcagtgacttcaacgacattaccaacatgctacttttaaaaatgaacaaagactcaaagccccctgggaatctgaaagaatgttcaccctggatgagcgacttcaaagtggagttcctgagaaatgagctggagattcccggtcagtatgacggtaggggaaagccattgccagagtaccacgtgcgaatcgccgggtttgatgagcgggtgacagtcatggcgtctctgcgaaggcccaagcgcatcatcatccgtggccatgacgagagggaacaccctttcctggtgaagggtggcgaggacctgcggcaggaccagcgcgtggagcagctcttccaggtcatgaatgggatcctggcccaagactccgcctgcagccagagggccctgcagctgaggacctatagcgttgtgcccatgacctccaggttaggattaattgagtggcttgaaaatactgttaccttgaaggaccttcttttgaacaccatgtcccaagaggagaaggcggcttacctgagtgatcccagggcaccgccgtgtgaatataaagattggctgacaaaaatgtcaggaaaacatgatgttggagcttacatgctaatgtataagggcgctaatcgtactgaaacagtcacgtcttttagaaaacgagaaagtaaagtgcctgctgatctcttaaagcgggccttcgtgaggatgagtacaagccctgaggctttcctggcgctccgctcccacttcgccagctctcacgctctgatatgcatcagccactggatcctcgggattggagacagacatctgaacaactttatggtggccatggagactggcggcgtgatcgggatcgactttgggcatgcgtttggatccgctacacagtttctgccagtccctgagttgatgccttttcggctaactcgccagtttatcaatctgatgttaccaatgaaagaaacgggccttatgtacagcatcatggtacacgcactccgggccttccgctcagaccctggcctgctcaccaacaccatggatgtgtttgtcaaggagccctcctttgattggaaaaattttgaacagaaaatgctgaaaaaaggagggtcatggattcaagaaataaatgttgctgaaaaaaattggtacccccgacagaaaatatgttacgctaagagaaagttagcaggtgccaatccagcagtcattacttgtgatgagctactcctgggtcatgagaaggcccctgccttcagagactatgtggctgtggcacgaggaagcaaagatcacaacattcgtgcccaagaaccagagagtgggctttcagaagagactcaagtgaagtgcctgatggaccaggcaacagaccccaacatccttggcagaacctgggaaggatgggagccctggatgtgaggtctgtgggagtctgcagatagaaagcattacattgtttaaagaatctactatactttggttggcagcattccatgagctgattttcctgaaacactaaagagaaatgtcttttgtgctacagtttcgtagcatgagtttaaatcaagattatgatgagtaaatgtgtatgggttaaatcaaagataaggttatagtaacatcaaagattaggtgaggtttatagaaagatagatatccaggcttaccaaagtattaagtcaagaatataatatgtgatcagctttcaaagcatttacaagtgctgcaagttagtgaaacagctgtctccgtaaatggaggaaatgtggggaagccttggaatgcccttctggttctggcacattggaaagcacactcagaaggcttcatcaccaagattttgggagagtaaagctaagtatagttgatgtaacattgtagaagcagcataggaacaataagaacaataggtaaagctataattatggcttatatttagaaatgactgcatttgatattttaggatatttttctaggttttttcctttcattttattctcttctagttttgacattttatgatagatttgctctctagaaggaaacgtctttatttaggagggcaaaaattttggtcatagcattcacttttgctattccaatctacaactggaagatacataaaagtgctttgcattgaatttgggataacttcaaaaatcccatggttgttgttagggatagtactaagcatttcagttccaggagaataaaagaaattcctatttgaaatgaattcctcatttggaggaaaaaaagcatgcattctagcacaacaagatgaaattatggaatacaaaagtggctccttcccatgtgcagtccctgtccccccccgccagtcctccacacccaaactgtttctgattggcttttagctttttgttgtttttttttttccttctaacacttgtatttggaggctcttctgtgattttgagaagtatactcttgagtgtttaataaagtttttttccaaaa

SEQ ID NO: 1279 - DNA, 13449 bp, Homo sapiens; identical to SEQ ID NO: 1278

SEQ ID NO: 1280 - DNA, 13449 bp, Homo sapiens; identical to SEQ ID NO: 1278

SEQ ID NO: 1281 - DNA, 13449 bp, Homo sapiens; identical to SEQ ID NO: 1278

SEQ ID NO: 1282 - DNA, 2317 bp, Homo sapiens
ctcccagggagggagggcggtcgccccgacgcgcaccgcgattcgccccaagggccctgcgcaggacgctgacgcgaagactcggaggcggaagaaaaaaggagctgtttctaggcttttctaggcgcccagccgagaaatgcttcggttacccacagtctttcgccagatgagaccggtgtccagggtactggctcctcatctcactcgggcttatgccaaagatgtaaaatttggtgcagatgcccgagccttaatgcttcaaggtgtagaccttttagccgatgctgtggccgttacaatggggccaaagggaagaacagtgattattgagcagagttggggaagtcccaaagtaacaaaagatggtgtgactgttgcaaagtcaattgacttaaaagataaatacaaaaacattggagctaaacttgttcaagatgttgccaataacacaaatgaagaagctggggatggcactaccactgctactgtactggcacgctctatagccaaggaaggcttcgagaagattagcaaaggtgctaatccagtggaaatcaggagaggtgtgatgttagctgttgatgctgtaattgctgaacttaaaaagcagtctaaacctgtgaccacccctgaagaaattgcacaggttgctacgatttctgcaaacggagacaaagaaattggcaatatcatctctgatgcaatgaaaaaagttggaagaaagggtgtcatcacagtaaaggatggaaaaacactgaatgatgaattagaaattattgaaggcatgaagtttgatcgaggctatatttctccatactttattaatacatcaaaaggtcagaaatgtgaattccaggatgcctatgttctgttgagtgaaaagaaaatttctagtatccagtccattgtacctgctcttgaaattgccaatgctcaccgtaagcctttggtcataatcgctgaagatgttgatggagaagctctaagtacactcgtcttgaataggctaaaggttggtcttcaggttgtggcagtcaaggctccagggtttggtgacaatagaaagaaccagcttaaagatatggctattgctactggtggtgcagtgtttggagaagagggattgaccctgaatcttgaagacgttcagcctcatgacttaggaaaagttggagaggtcattgtgaccaaagacgatgccatgctcttaaaaggaaaaggtgacaaggctcaaattgaaaaacgtattcaagaaatcattgagcagttagatgtcacaactagtgaatatgaaaaggaaaaactgaatgaacggcttgcaaaactttcagatggagtggctgtgctgaaggttggtgggacaagtgatgttgaagtgaatgaaaagaaagacagagttacagatgcccttaatgctacaagagctgctgttgaagaaggcattgttttgggagggggttgtgccctccttcgatgcattccagccttggactcattgactccagctaatgaagatcaaaaaattggtatagaaattattaaaagaacactcaaaattccagcaatgaccattgctaagaatgcaggtgttgaaggatctttgatagttgagaaaattatgcaaagttcctcagaagttggttatgatgctatggctggagattttgtgaatatggtggaaaaaggaatcattgacccaacaaaggttgtgagaactgctttattggatgctgctggtgtggcctctctgttaactacagcagaagttgtagtcacagaaattcctaaagaagagaaggaccctggaatgggtgcaatgggtggaatgggaggtggtatgggaggtggcatgttctaactcctagactagtgctttacctttattaatgaactgtgacaggaagcccaaggcagtgttcctcaccaataacttcagagaagtcagttggagaaaatgaagaaaaaggctggctgaaaatcactataaccatcagttactggtttcagttgacaaaatatataatggtttactgctgtcattgtccatgcctacagataatttattttgtatttttgaataaaaaacatttgtacattcctgatactgggtacaagagccatgtaccagtgtactgctttcaacttaaatcactgaggcatttttactactattctgttaaaatcaggattttagtgcttgccaccaccagatgagaagttaagcagcctttctgtggagagtgagaataattgtgtacaaagtagagaagtatccaattatgtgacaacctttgtgtaataaaaatttgtttaa

SEQ ID NO: 1283 - DNA, 2317 bp, Homo sapiens; identical to SEQ ID NO: 1282

SEQ ID NO: 1284 - DNA, 2227 bp, Homo sapiens
gacgacctgtctcgccgagcgcacgcttgccgccgccccgcagaaatgcttcggttacccacagtctttcgccagatgagaccggtgtccagggtactggctcctcatctcactcgggcttatgccaaagatgtaaaatttggtgcagatgcccgagccttaatgcttcaaggtgtagaccttttagccgatgctgtggccgttacaatggggccaaagggaagaacagtgattattgagcagagttggggaagtcccaaagtaacaaaagatggtgtgactgttgcaaagtcaattgacttaaaagataaatacaagaacattggagctaaacttgttcaagatgttgccaataacacaaatgaagaagctggggatggcactaccactgctactgtactggcacgctctatagccaaggaaggcttcgagaagattagcaaaggtgctaatccagtggaaatcaggagaggtgtgatgttagctgttgatgctgtaattgctgaacttaaaaagcagtctaaacctgtgaccacccctgaagaaattgcacaggttgctacgatttctgcaaacggagacaaagaaattggcaatatcatctctgatgcaatgaaaaaagttggaagaaagggtgtcatcacagtaaaggatggaaaaacactgaatgatgaattagaaattattgaaggcatgaagtttgatcgaggctatatttctccatactttattaatacatcaaaaggtcagaaatgtgaattccaggatgcctatgttctgttgagtgaaaagaaaatttctagtatccagtccattgtacctgctcttgaaattgccaatgctcaccgtaagcctttggtcataatcgctgaagatgttgatggagaagctctaagtacactcgtcttgaataggctaaaggttggtcttcaggttgtggcagtcaaggctccagggtttggtgacaatagaaagaaccagcttaaagatatggctattgctactggtggtgcagtgtttggagaagagggattgaccctgaatcttgaagacgttcagcctcatgacttaggaaaagttggagaggtcattgtgaccaaagacgatgccatgctcttaaaaggaaaaggtgacaaggctcaaattgaaaaacgtattcaagaaatcattgagcagttagatgtcacaactagtgaatatgaaaaggaaaaactgaatgaacggcttgcaaaactttcagatggagtggctgtgctgaaggttggtgggacaagtgatgttgaagtgaatgaaaagaaagacagagttacagatgcccttaatgctacaagagctgctgttgaagaaggcattgttttgggagggggttgtgccctccttcgatgcattccagccttggactcattgactccagctaatgaagatcaaaaaattggtatagaaattattaaaagaacactcaaaattccagcaatgaccattgctaagaatgcaggtgttgaaggatctttgatagttgagaaaattatgcaaagttcctcagaagttggttatgatgctatggctggagattttgtgaatatggtggaaaaaggaatcattgacccaacaaaggttgtgagaactgctttattggatgctgctggtgtggcctctctgttaactacagcagaagttgtagtcacagaaattcctaaagaagagaaggaccctggaatgggtgcaatgggtggaatgggaggtggtatgggaggtggcatgttctaactcctagactagtgctttacctttattaatgaactgtgacaggaagcccaaggcagtgttcctcaccaataacttcagagaagtcagttggagaaaatgaagaaaaaggctggctgaaaatcactataaccatcagttactggtttcagttgacaaaatatataatggtttactgctgtcattgtccatgcctacagataatttattttgtatttttgaataaaaaacatttgtacattcctgatactgggtacaagagccatgtaccagtgtactgctttcaacttaaatcactgaggcatttttactactattctgttaaaatcaggattttagtgcttgccaccaccagatgagaagttaagcagcctttctgtggagagtgagaataattgtgtacaaagtagagaagtatccaattatgtgacaacctttgtgtaataaaaatttgtttaaagtt

SEQ ID NO: 1285 - DNA, 2317 bp, Homo sapiens; identical to SEQ ID NO: 1282

SEQ ID NO: 1286 - DNA, 2317 bp, Homo sapiens; identical to SEQ ID NO: 1282

SEQ ID NO: 1287 - DNA, 2317 bp, Homo sapiens; identical to SEQ ID NO: 1282

SEQ ID NO: 1288 - DNA, 2317 bp, Homo sapiens; identical to SEQ ID NO: 1282

SEQ ID NO: 1289 - DNA, 4489 bp, Homo sapiens
cgcggcagcggtggccgaggcctcttggttctgcggcacgtgacggtcgggccgcctccgcctctctctttactgcggcgcggggcaagatcatggaagggaagtggttgctgtgtatgttactggtgcttggaactgctattgttgaggctcatgatggacatgatgatgatgtgattgatattgaggatgaccttgacgatgtcattgaagaggtagaagactcaaaaccagataccactgctcctccttcatctcccaaggttacttacaaagctccagttccaacaggggaagtatattttgctgattcttttgacagaggaactctgtcagggtggattttatccaaagccaagaaagacgataccgatgatgaaattgccaaatatgatggaaagtgggaggtagaggaaatgaaggagtcaaagcttccaggtgataaaggacttgtgttgatgtctcgggccaagcatcatgccatctctgctaaactgaacaagcccttcctgtttgacaccaagcctctcattgttcagtatgaggttaatttccaaaatggaatagaatgtggtggtgcctatgtgaaactgctttctaaaacaccagaactcaacctggatcagttccatgacaagaccccttatacgattatgtttggtccagataaatgtggagaggactataaactgcacttcatcttccgacacaaaaaccccaaaacgggtatctatgaagaaaaacatgctaagaggccagatgcagatctgaagacctattttactgataagaaaacacatctttacacactaatcttgaatccagataatagttttgaaatactggttgaccaatctgtggtgaatagtggaaatctgctcaatgacatgactcctcctgtaaatccttcacgtgaaattgaggacccagaagaccggaagcccgaggattgggatgaaagaccaaaaatcccagatccagaagctgtcaagccagatgactgggatgaagatgcccctgctaagattccagatgaagaggccacaaaacccgaaggctggttagatgatgagcctgagtacgtacctgatccagacgcagagaaacctgaggattgggatgaagacatggatggagaatgggaggctcctcagattgccaaccctagatgtgagtcagctcctggatgtggtgtctggcagcgacctgtgattgacaaccccaattataaaggcaaatggaagcctcctatgattgacaatcccagttaccagggaatctggaaacccaggaaaataccaaatccagatttctttgaagatctggaacctttcagaatgactccttttagtgctattggtttggagctgtggtccatgacctctgacattttttttgacaactttatcatttgtgctgatcgaagaatagttgatgattgggccaatgatggatggggcctgaagaaagctgctgatggggctgctgagccaggcgttgtggggcagatgatcgaggcagctgaagagcgcccgtggctgtgggtagtctatattctaactgtagcccttcctgtgttcctggttatcctcttctgctgttctggaaagaaacagaccagtggtatggagtataagaaaactgatgcacctcaaccggatgtgaaggaagaggaagaagagaaggaagaggaaaaggacaagggagatgaggaggaggaaggagaagagaaacttgaagagaaacagaaaagtgatgctgaagaagatggtggcactgtcagtcaagaggaggaagacagaaaacctaaagcagaggaggatgaaattttgaacagatcaccaagaaacagaaagccacgaagagagtgaaacaatcttaagagcttgatctgtgatttcttctccctcctcccctgcaagagtggtcctaggagaggacctggcacaccttaggttgacattcagaaaacttcaagacatcaccatcagcaggctccagttgaacactagtctgtgtaactttaaacatctagcagtaaatacttgcagttgtgatataaaggaccctgtttctgtagaaaagaaaacatttaacataatggttgtgaaatgtaacatgaagcaaactaacttttttttttttaacatctttgtttttaaaatagaatgatagaactttgccagtctttaagatcttggcttaatttaatgtattaatctgtttgtgcaaacataataccaccatttaaaaatgttagggagatgagttgcagtttttataatagattttttttaaagtttggtattgtaaaacattcacacctctgtccctcaaaattgataattacgtttaaagtgcagtcatttgtggttagaatcttgttttgtttgcttccattattgagttcctcctaaggaaattgaggagagggactgaatagaagcccaaattcatataaaagttgcgtttaagttgtattaaaaatagatatataagaaaaattcccagacagctttttaggtagtggaggaggtggcttcatgtggcacttgggcatttatattccacttgggagggtcaggctgtggccttctggagcaggtggcttgttaaggaatgctagcagggcatggcacgtgagctccggaatagatgtcttcatcacttcttccactgtgtgttgacactgttttccttacctatttcctcagatccccagctttctcctctgctatgcattttcttcacagtgcagcttgcagtccgttgctgaaaatgattataagccctgcataatgttaagctttattgtgattacgtgtatgtttcttctttcttttaagcagacccatacctttccagggtcaaagtacagaatagaatacattgatacaaagtacagaaaaatactttgatttttatccatttcttttactctgtgtaaagacttgagaagtctaattcacaggcaaaccaatacagaattgactgcagttgaacagactagaagtatttgtgggaggagtgacatgaagcatgagttatctgattttttttgtagctgctatatattttaagccttcatttgcaattcatgtaacagttgtgtcataaattacacaataaagcagtcctgttcaaatttttttttaacgtggcttgtagaatttttaaaaaagtgatcttaggtttgttttttcatgcgggatgcagatgggtgctatcagagcctctcccacaccactatagtgtaataatgttattattactctacactgaaacgtattcagagttagatattattttagcttcagttgttctttagaggctttcaaatgtaccgatgatactgtttcttgcactgaatatataaacactccacagtgtttatattgggaagatattgggaaggaaatatatttgtaaaagatgaaggctgtatctatttttttttctttttaaagtttgttcacttaaattcttttgaggatgggatgtatttttcttgctgttcagtgctttttccttttcatctgttgttctgtggtcacagtgaccttagctacatagcagactttcccaaatgtattgattacaaataaacagttgttacttagcaagacctgaaaaaatctgcctccttcaccctccgttgacagtatatgtcatgcctcactttcttctagctgagctttaaatcattagagcttaaattgtcagatcgttcattgcctttccagggttatttagtaaagtttgttgaaaacaaaaacgccttttcttggttcttttttcagttattttgaaggtccagcatcctgattaaatgtctgacacattaatgaatgaccagcagcagctttcagctcttaaaaagacacttatattttgattttacatgctggttacctgttccattgttgtcaaatgcccactctccatcagatgtgttcctccattttcttatccacaaagtactcctcacttttcaatttgtcatgttactaaatggtgttacattaaagccctgtgttaagtgtctgcttttgactgaatttcttcatagtaaccttcagtgtgtgtgtgtgactatgttcaattagtgggttgatcttcgtataattggccactatgtgagagttcactactaggcagaaactattatggacagtgaaataatgacttttatctcaccacgtgagtttgatgcagtcttttctgtctagcccttgcctcttcctgcccatgtgattgcggtgcagtagtttctgttgtataatagtgtggacagcagctcagaaaaggagggaatgctactgataatttgtagataatattctttaagacttaggggaaccattgaactttgaaatttttattagaaaattatttgttcagaatcagactccattattttacatatacttaaatactttaggggtatttttgaaagttagcccagttttttatgtgctattaaattttt

SEQ ID NO: 1290 - DNA, 4489 bp, Homo sapiens; identical to SEQ ID NO: 1289

SEQ ID NO: 1291 - DNA, 4953 bp, Homo sapiens
agggccgggcttcgtgcggtggggctcgctcgcgcggcagcggtggccgaggcctcttggttctgcggcacgtgacggtcgggccgcctccgcctctctctttactgcggcgcggggcaaggtgtgcgggcgggaaggggcacgggcacccccgcggtccccgggaggctagagatcatggaagggaagtggttgctgtgtatgttactggtgcttggaactgctattgttgaggctcatgatggacatgatgatgatgtgattgatattgaggatgaccttgacgatgtcattgaagaggtagaagactcaaaaccagataccactgctcctccttcatctcccaaggttacttacaaagctccagttccaacaggggaagtatattttgctgattcttttgacagaggaactctgtcagggtggattttatccaaagccaagaaagacgataccgatgatgaaattgccaaatatgatggaaagtgggaggtagaggaaatgaaggagtcaaagcttccaggtgataaaggacttgtgttgatgtctcgggccaagcatcatgccatctctgctaaactgaacaagcccttcctgtttgacaccaagcctctcattgttcagtatgaggttaatttccaaaatggaatagaatgtggtggtgcctatgtgaaactgctttctaaaacaccagaactcaacctggatcagttccatgacaagaccccttatacgattatgtttggtccagataaatgtggagaggactataaactgcacttcatcttccgacacaaaaaccccaaaacgggtatctatgaagaaaaacatgctaagaggccagatgcagatctgaagacctattttactgataagaaaacacatctttacacactaatcttgaatccagataatagttttgaaatactggttgaccaatctgtggtgaatagtggaaatctgctcaatgacatgactcctcctgtaaatccttcacgtgaaattgaggacccagaagaccggaagcccgaggattgggatgaaagaccaaaaatcccagatccagaagctgtcaagccagatgactgggatgaagatgcccctgctaagattccagatgaagaggccacaaaacccgaaggctggttagatgatgagcctgagtacgtacctgatccagacgcagagaaacctgaggattgggatgaagacatggatggagaatgggaggctcctcagattgccaaccctagatgtgagtcagctcctggatgtggtgtctggcagcgacctgtgattgacaaccccaattataaaggcaaatggaagcctcctatgattgacaatcccagttaccagggaatctggaaacccaggaaaataccaaatccagatttctttgaagatctggaacctttcagaatgactccttttagtgctattggtttggagctgtggtccatgacctctgacattttttttgacaactttatcatttgtgctgatcgaagaatagttgatgattgggccaatgatggatggggcctgaagaaagctgctgatggggctgctgagccaggcgttgtggggcagatgatcgaggcagctgaagagcgcccgtggctgtgggtagtctatattctaactgtagcccttcctgtgttcctggttatcctcttctgctgttctggaaagaaacagaccagtggtatggagtataagaaaactgatgcacctcaaccggatgtgaaggaagaggaagaagagaaggaagaggaaaaggacaagggagatgaggaggaggaaggagaagagaaacttgaagagaaacagaaaagtgatgctgaagaagatggtggcactgtcagtcaagaggaggaagacagaaaacctaaagcagaggaggatgaaattttgaacagatcaccaagaaacagaaagccacgaagagagtgaaacaatcttaagagcttgatctgtgatttcttctccctcctcccctgcaagagtggtcctaggagaggacctggcacaccttaggttgacattcagaaaacttcaagacatcaccatcagcaggctccagttgaacactagtctgtgtaactttaaacatctagcagtaaatacttgcagttgtgatataaaggaccctgtttctgtagaaaagaaaacatttaacataatggttgtgaaatgtaacatgaagcaaactaacttttttttttttaacatctttgtttttaaaatagaatgatagaactttgccagtctttaagatcttggcttaatttaatgtattaatctgtttgtgcaaacataataccaccatttaaaaatgttagggagatgagttgcagtttttataatagattttttttaaagtttggtattgtaaaacattcacacctctgtccctcaaaattgataattacgtttaaagtgcagtcatttgtggttagaatcttgttttgtttgcttccattattgagttcctcctaaggaaattgaggagagggactgaatagaagcccaaattcatataaaagttgcgtttaagttgtattaaaaatagatatataagaaaaaattctttcacttgatgtttgttagaccagaaagtgtgtgtgttctgtagctcagttcccagacagctttttaggtagtggaggaggtggcttcatgtggcacttgggcatttatattccacttgggagggtcaggctgtggccttctggagcaggtggcttgttaaggaatgctagcagggcatggcacgtgagctccggaatagatgtcttcatcacttcttccactgtgtgttgacactgttttccttacctatttcctcagatccccagctttctcctctgctatgcattttcttcacagtgcagcttgcagtccgttgctgaaaatgattataagccctgcataatgttaagctttattgtgattacgtgtatgtttcttctttcttttaagcagacccatacctttccagggtcaaagtacagaatagaatacattgatacaaagtacagaaaaatactttgatttttatccatttcttttactctgtgtaaagacttgagaagtctaattcacaggcaaaccaatacagaattgactgcagttgaacagactagaagtatttgtgggaggagtgacatgaagcatgagttatctgattttttttgtagctgctatatattttaagccttcatttgcaattcatgtaacagttgtgtcataaattacacaataaagcagtcctgttcaaatttttttttaacgtggcttgtagaatttttaaaaaagtgatcttaggtttgttttttcatgcgggatgcagatgggtgctatcagagcctctcccacaccactatagtgtaataatgttattattactctacactgaaacgtattcagagttagatattattttagcttcagttgttctttagaggctttcaaatgtaccgatgatactgtttcttgcactgaatatataaacactccacagtgtttatattgggaagatattgggaaggaaatatatttgtaaaagatgaaggctgtatctatttttttttctttttaaagtttgttcacttaaattcttttgaggatgggatgtatttttcttgctgttcagtgctttttccttttcatctgttgttctgtggtcacagtgaccttagctacatagcagactttcccaaatgtattgattacaaataaacagttgttacttagcaagacctgaaaatatgtctgcaggtttctccttgaagcaaatgtgtgggatcattgcatttccagaaatctgcctccttcaccctccgttgacagtatatgtcatgcctcactttcttctagctgagctttaaatcattagagcttaaattgtcagatcgttcattgcctttccagggttatttagtaaagtttgttgaaaacaaaaacgccttttcttggttcttttttcagttattttgaaggtccagcatcctgattaaatgtctgacacattaatgaatgaccagcagcagctttcagctcttaaaaagacacttatattttgattttacatgctggttacctgttccattgttgtcaaatgcccactctccatcagatgtgttcctccattttcttatccacaaagtactcctcacttttcaatttgtcatgttactaaatggtgttacattaaagccctgtgttaagtgtctgcttttgactgaatttcttcatagtaaccttcagtgtgtgtgtgtgactatgttcaattagtgggttgatcttcgtataattggccactatgtgagagttcactactaggcagaaactattatggacagtgaaataatgacttttatctcaccacgtgagtttgatgcagtcttttctgtctagcccttgcctcttcctgcccatgtgattgcggtgcagtagtttctgttgtataatagtgtggacagcagctcagaaaaggagggaatgctactgataatttgtagataatattctttaagacttaggggaaccattgaactttgaaatttttattagaaaattatttgttcagaatcagactccattattttacatatacttaaatactttaggggtatttttgaaagttagcccagttttttatgtgctattaaatttttagattacatactaaagaaaagtatgtacacagaatgtagtgctcctagttactattttttctattaagaaatagtttagttctggtgtaaaatttgtttgaatgctaaaaaaaaaaaagcaggactgcattatggcacttttgccttggtggcccactttctccatttaaaacattaggatttgtatttttctgctgcgtttgtatgaagacatatttgattgttgttttctcttgattttaaaataaaacctcatgagccctagtaaaaa

SEQ ID NO: 1292 - DNA, 4489 bp, Homo sapiens; identical to SEQ ID NO: 1289

SEQ ID NO: 1293 - DNA, 1512 bp, Homo sapiens
cagcacagagagtggaaaacagcagaggtgacagagcagccgtgctcgaagcgttcctggagcccaagctctcctccacaggtgaagacagggccagcaggagacaccatggggcacctctcagccccacttcacagagtgcgtgtaccctggcaggggcttctgctcacagcctcacttctaaccttctggaacccgcccaccactgcccagctcactactgaatccatgccattcaatgttgcagaggggaaggaggttcttctccttgtccacaatctgccccagcaactttttggctacagctggtacaaaggggaaagagtggatggcaaccgtcaaattgtaggatatgcaataggaactcaacaagctaccccagggcccgcaaacagcggtcgagagacaatataccccaatgcatccctgctgatccagaacgtcacccagaatgacacaggattctacaccctacaagtcataaagtcagatcttgtgaatgaagaagcaactggacagttccatgtatacccggagctgcccaagccctccatctccagcaacaactccaaccctgtggaggacaaggatgctgtggccttcacctgtgaacctgagactcaggacacaacctacctgtggtggataaacaatcagagcctcccggtcagtcccaggctgcagctgtccaatggcaacaggaccctcactctactcagtgtcacaaggaatgacacaggaccctatgagtgtgaaatacagaacccagtgagtgcgaaccgcagtgacccagtcaccttgaatgtcacctatggcccggacacccccaccatttccccttcagacacctattaccgtccaggggcaaacctcagcctctcctgctatgcagcctctaacccacctgcacagtactcctggcttatcaatggaacattccagcaaagcacacaagagctctttatccctaacatcactgtgaataatagtggatcctatacctgccacgccaataactcagtcactggctgcaacaggaccacagtcaagacgatcatagtcactgagctaagtccagtagtagcaaagccccaaatcaaagccagcaagaccacagtcacaggagataaggactctgtgaacctgacctgctccacaaatgacactggaatctccatccgttggttcttcaaaaaccagagtctcccgtcctcggagaggatgaagctgtcccagggcaacaccaccctcagcataaaccctgtcaagagggaggatgctgggacgtattggtgtgaggtcttcaacccaatcagtaagaaccaaagcgaccccatcatgctgaacgtaaactataatgctctaccacaagaaaatggcctctcacctggggccattgctggcattgtgattggagtagtggccctggttgctctgatagcagtagccctggcatgttttctgcatttcgggaagaccggcaggaccactccaatgacccacctaacaagg

SEQ ID NO: 1294 - DNA, 3080 bp, Homo sapiens
gggggcggggccttgccgctgcggaggccggagacgcggcggcgctggacgcggaggcgctgggcgcacggcgcggagccggccggagctcgaggccggcggcggcgggagagcgacccgggcggcctcgtagcggggccccggatccccgagtggcggccggagcctcgaaaagagattctcagcgctgattttgagatgatgggcttgggaaacgggcgtcgcagcatgaagtcgccgcccctcgtgctggccgccctggtggcctgcatcatcgtcttgggcttcaactactggattgcgagctcccggagcgtggacctccagacacggatcatggagctggaaggcagggtccgcagggcggctgcagagagaggcgccgtggagctgaagaagaacgagttccagggagagctggagaagcagcgggagcagcttgacaaaatccagtccagccacaacttccagctggagagcgtcaacaagctgtaccaggacgaaaaggcggttttggtgaataacatcaccacaggtgagaggctcatccgagtgctgcaagaccagttaaagaccctgcagaggaattacggcaggctgcagcaggatgtcctccagtttcagaagaaccagaccaacctggagaggaagttctcctacgacctgagccagtgcatcaatcagatgaaggaggtgaaggaacagtgtgaggagcgaatagaagaggtcaccaaaaaggggaatgaagctgtagcttccagagacctgagtgaaaacaacgaccagagacagcagctccaagccctcagtgagcctcagcccaggctgcaggcagcaggcctgccacacacagaggtgccacaagggaagggaaacgtgcttggtaacagcaagtcccagacaccagcccccagttccgaagtggttttggattcaaagagacaagttgagaaagaggaaaccaatgagatccaggtggtgaatgaggagcctcagagggacaggctgccgcaggagccaggccgggagcaggtggtggaagacagacctgtaggtggaagaggcttcgggggagccggagaactgggccagaccccacaggtgcaggctgccctgtcagtgagccaggaaaatccagagatggagggccctgagcgagaccagcttgtcatccccgacggacaggaggaggagcaggaagctgccggggaagggagaaaccagcagaaactgagaggagaagatgactacaacatggatgaaaatgaagcagaatctgagacagacaagcaagcagccctggcagggaatgacagaaacatagatgtttttaatgttgaagatcagaaaagagacaccataaatttacttgatcagcgtgaaaagcggaatcatacactctgaattgaactggaatcacatatttcacaacagggccgaagagatgactataaaatgttcatgagggactgaatactgaaaactgtgaaatgtactaaataaaatgtacatctgaagatgattattgtgaaattttagtatgcactttgtgtaggaaaaaatggaatggtcttttaaacagcttttggggggtactttggaagtgtctaataaggtgtcacaatttttggtagtaggtatttcgtgagaagttcaacaccaaaactggaacatagttctccttcaagtgttggcgacagcggggcttcctgattctggaatataactttgtgtaaattaacagccacctatagaagagtccatctgctgtgaaggagagacagagaactctgggttccgtcgtcctgtccacgtgctgtaccaagtgctggtgccagcctgttacctgttctcactgaaaagtctggctaatgctcttgtgtagtcacttctgattctgacaatcaatcaatcaatggcctagagcactgactgttaacacaaacgtcactagcaaagtagcaacagctttaagtctaaatacaaagctgttctgtgtgagaattttttaaaaggctacttgtataataacccttgtcatttttaatgtacaaaacgctattaagtggcttagaatttgaacatttgtggtctttatttactttgcttcgtgtgtgggcaaagcaacatcttccctaaatatatattaccaagaaaagcaagaagcagattaggtttttgacaaaacaaacaggccaaaagggggctgacctggagcagagcatggtgagaggcaaggcatgagagggcaagtttgttgtggacagatctgtgcctactttattactggagtaaaagaaaacaaagttcattgatgtcgaaggatatatacagtgttagaaattaggactgtttagaaaaacaggaatacaatggttgtttttatcatagtgtacacatttagcttgtggtaaatgactcacaaaactgattttaaaatcaagttaatgtgaattttgaaaattactacttaatcctaattcacaataacaatggcattaaggtttgacttgagttggttcttagtattatttatggtaaataggctcttaccacttgcaaataactggccacatcattaatgactgacttcccagtaaggctctctaaggggtaagtaggaggatccacaggatttgagatgctaaggccccagagatcgtttgatccaaccctcttattttcagaggggaaaatggggcctagaagttacagagcatctagctggtgcgctggcacccctggcctcacacagactcccgagtagctgggactacaggcacacagtcactgaagcaggccctgtttgcaattcacgttgccacctccaacttaaacattcttcatatgtgatgtccttagtcactaaggttaaactttcccacccagaaaaggcaacttagataaaatcttagagtactttcatactcttctaagtcctcttccagcctcactttgagtcctccttggggttgataggaattttctcttgctttctcaataaagtctctattcatctcatgtttaatttgtacgcatagaattgctgagaaataaaatgttctgttcaacttataaaa

SEQ ID NO: 1295 - DNA, 3154 bp, Homo sapiens
gtccgggaatcttcactttttccgttgctagcagtggaagggtcacagaccaaacactaaggcctgagcggtgacaaccgaggcgagatgatggtcaacagggaatgcctcgtgggagaaaaaagacaattttattctcagcgctgattttgagatgatgggcttgggaaacgggcgtcgcagcatgaagtcgccgcccctcgtgctggccgccctggtggcctgcatcatcgtcttgggcttcaactactggattgcgagctcccggagcgtggacctccagacacggatcatggagctggaaggcagggtccgcagggcggctgcagagagaggcgccgtggagctgaagaagaacgagttccagggagagctggagaagcagcgggagcagcttgacaaaatccagtccagccacaacttccagctggagagcgtcaacaagctgtaccaggacgaaaaggcggttttggtgaataacatcaccacaggtgagaggctcatccgagtgctgcaagaccagttaaagaccctgcagaggaattacggcaggctgcagcaggatgtcctccagtttcagaagaaccagaccaacctggagaggaagttctcctacgacctgagccagtgcatcaatcagatgaaggaggtgaaggaacagtgtgaggagcgaatagaagaggtcaccaaaaaggggaatgaagctgtagcttccagagacctgagtgaaaacaacgaccagagacagcagctccaagccctcagtgagcctcagcccaggctgcaggcagcaggcctgccacacacagaggtgccacaagggaagggaaacgtgcttggtaacagcaagtcccagacaccagcccccagttccgaagtggttttggattcaaagagacaagttgagaaagaggaaaccaatgagatccaggtggtgaatgaggagcctcagagggacaggctgccgcaggagccaggccgggagcaggtggtggaagacagacctgtaggtggaagaggcttcgggggagccggagaactgggccagaccccacaggtgcaggctgccctgtcagtgagccaggaaaatccagagatggagggccctgagcgagaccagcttgtcatccccgacggacaggaggaggagcaggaagctgccggggaagggagaaaccagcagaaactgagaggagaagatgactacaacatggatgaaaatgaagcagaatctgagacagacaagcaagcagccctggcagggaatgacagaaacatagatgtttttaatgttgaagatcagaaaagagacaccataaatttacttgatcagcgtgaaaagcggaatcatacactctgaattgaactggaatcacatatttcacaacagggccgaagagatgactataaaatgttcatgagggactgaatactgaaaactgtgaaatgtactaaataaaatgtacatctgaagatgattattgtgaaattttagtatgcactttgtgtaggaaaaaatggaatggtcttttaaacagcttttggggggtactttggaagtgtctaataaggtgtcacaatttttggtagtaggtatttcgtgagaagttcaacaccaaaactggaacatagttctccttcaagtgttggcgacagcggggcttcctgattctggaatataactttgtgtaaattaacagccacctatagaagagtccatctgctgtgaaggagagacagagaactctgggttccgtcgtcctgtccacgtgctgtaccaagtgctggtgccagcctgttacctgttctcactgaaaagtctggctaatgctcttgtgtagtcacttctgattctgacaatcaatcaatcaatggcctagagcactgactgttaacacaaacgtcactagcaaagtagcaacagctttaagtctaaatacaaagctgttctgtgtgagaattttttaaaaggctacttgtataataacccttgtcatttttaatgtacaaaacgctattaagtggcttagaatttgaacatttgtggtctttatttactttgcttcgtgtgtgggcaaagcaacatcttccctaaatatatattaccaagaaaagcaagaagcagattaggtttttgacaaaacaaacaggccaaaagggggctgacctggagcagagcatggtgagaggcaaggcatgagagggcaagtttgttgtggacagatctgtgcctactttattactggagtaaaagaaaacaaagttcattgatgtcgaaggatatatacagtgttagaaattaggactgtttagaaaaacaggaatacaatggttgtttttatcatagtgtacacatttagcttgtggtaaatgactcacaaaactgattttaaaatcaagttaatgtgaattttgaaaattactacttaatcctaattcacaataacaatggcattaaggtttgacttgagttggttcttagtattatttatggtaaataggctcttaccacttgcaaataactggccacatcattaatgactgacttcccagtaaggctctctaaggggtaagtaggaggatccacaggatttgagatgctaaggccccagagatcgtttgatccaaccctcttattttcagaggggaaaatggggcctagaagttacagagcatctagctggtgcgctggcacccctggcctcacacagactcccgagtagctgggactacaggcacacagtcactgaagcaggccctgtttgcaattcacgttgccacctccaacttaaacattcttcatatgtgatgtccttagtcactaaggttaaactttcccacccagaaaaggcaacttagataaaatcttagagtactttcatactcttctaagtcctcttccagcctcactttgagtcctccttggggttgataggaattttctcttgctttctcaataaagtctctattcatctcatgtttaatttgtacgcatagaattgctgagaaataaaatgttctgttcaacttataaaacttgtcacagctctgtttttttgcttttccccttcatcctctattagatccttaaagaatccaccctcaaactgtggactaaggatggcagtttgccttaaaccttctgtggaatgag

SEQ ID NO: 1296 - DNA, 3154 bp, Homo sapiens; identical to SEQ ID NO: 1295

SEQ ID NO: 1297 - DNA, 3163 bp, Homo sapiens
gggaggctggggatggcgcgtggcccctttaagacgcaccggggcgggcccgggcggcgcgcggcccctttaaggcttggcctacgtggcagccgctggagccgcagccgacgcggagcgaggccggccgccgggcacttcctgtggaggccgcagcgggtgcgggcgccgacgggcgagagccagcgagcgagcgagcgagccgagccgagcctcccgccgtcgccatgggccagaacgacctgatgggcacggccgaggacttcgccgaccagcgtctgttcctcacacaccccgcccaaggacgtgcctggcagcggcctggtgctccccgccgcagccacctcacccttgggtttctgtggccctgcagttcctccgtgtcacaaagcagtacctgccccacgtggcgcgcctctgtctgatcagcaccttcctggaggacggcatccgtatgtggttccagtggagcgagcagcgcgactacatcgacaccacctggaactgcggctacctgctggcctcgtccttcgtcttcctcaacttgctgggacagctgactggctgcgtcctggtgttgagcaggaacttcgtgcagtacgcctgcttcgggctctttggaatcatagctctgcagacgattgcctacagcattttatgggacttgaagtttttgatgaggaacctggccctgggaggaggcctgttgctgctcctagcagaatcccgttctgaagggaagagcatgtttgcgggcgtccccaccatgcgtgagagctcccccaaacagtacatgcagctcggaggcagggtcttgctggttctgatgttcatgaccctccttcactttgacgccagcttcttttctattgtccagaacatcgtgggcacagctctgatgattttagtggccattggttttaaaaccaagctggctgctttgactcttgttgtgtggctctttgccatcaacgtatatttcaacgccttctggaccattccagtctacaagcccatgcatgacttcctgaaatacgacttcttccagaccatgtcggtgattgggggcttgctcctggtggtggccctgggccctgggggtgtctccatggatgagaagaagaaggagtggtaacagtcacagatccctacctgcctggctaagacccgtggccgtcaaggactggttcggggtggattcaacaaaactgccagcttttatgtatcctcttcccttcccctcccttggtaaaggcacagatgttttgagaactttatttgcagagacacctgagaatcgatggctcagtctgctctggagccacagtctggcgtctgacccttcagtgcaggccagcctggcagctggaagcctcccccacgccgaggctttggagtgaacagcccgcttggctgtggcatctcagtcctatttttgagtttttttgtgggggtacaggagggggccttcaagctgtactgtgagcagacgcattggtattatcattcaaagcagtctccctcttatttgtaagtttacatttttagcggaaactactaaattattttgggtggttcagccaaacctcaaaacagttaatctccctggtttaaaatcacaccagtggctttgatgttgtttctgccccgcattgtattttataggaatagtgaaaacatttagggacacccaaagaatgatgcagtattaaaggggtggtagaagctgctgtttatgataaaagtcatcggtcagaaaatcagcttggattggtgccaagtgttttattgggtaacaccctgggagttttagtagcttgaggcaaggtggaggggcaagaagtccttggggaagctgctggtctgggtgctgctggcctccaagctggcagtgggaagggctagtgagaccacacaggggtagccccagcagcagcaccctgcaagccagcctggccagctgctcagaccagcttgcagagccgcagccgctgtgggcagggggtgtggcaggagctcccagcactggagacccacggactcaacccagttacctcacatggggccttttctgagcaaggtctcgaaagcgcaggccgccctggctgagcagcaccgccctttcccagctgcactcgccctgtggacagccccgacacaccactttcctgaggctgtcgctcactcagattgtccgtttgctatgccgaatgcagccaaaattcctttttacaatttgtgatgccttaccgatttgatcttaatcctgtatttaaagttttctaacactgccttatactgtgtttctctttttgggggagcttaactgcttgttgctccctgtcgtctgcaccatagtaaatgccacaagggtagtcgaacacctctctggcccctagacctatctggggacaggctggctcagcctgtctccagggctgctgcggcccagccccgagcctgcctccctcttggcctctcatccattggctctgcagggcaggggtgaggcaggtttctgctcataagtgcttttggaagtcacctacctttttaacacagccgaactagtcccaacgcgtttgcaaatattcccctggtagcctacttccttacccccgaatattggtaagatcgagcaatggcttcaggacatgggttctcttctcctgtgatcattcaagtgctcactgcatgaagactggcttgtctcagtgtttcaacctcaccagggctgtctcttggtccacacctcgctccctgttagtgccgtatgacagcccccatcaaatgaccttggccaagtcacggtttctctgtggtcaaggttggttggctgattggtggaaagtagggtggaccaaaggaggccacgtgagcagtcagcaccagttctgcaccagcagcgcctccgtcctagtgggtgttcctgtttctcctggccctgggtgggctagggcctgattcgggaagatgcctttgcagggaggggaggataagtgggatctaccaattgattctggcaaaacaatttctaagatttttttgctttatgtgggaaacagatctaaatctcattttatgctgtattttatatcttagttgtgtttgaaaacgttttgatttttggaaacacatcaaaataaataatggcgtttgttgt

SEQ ID NO: 1298 - DNA, 3065 bp, Homo sapiens
gggaggctggggatggcgcgtggcccctttaagacgcaccggggcgggcccgggcggcgcgcggcccctttaaggcttggcctacgtggcagccgctggagccgcagccgacgcggagcgaggccggccgccgggcacttcctgtggaggccgcagcgggtgcgggcgccgacgggcgagagccagcgagcgagcgagcgagccgagccgagcctcccgccgtcgccatgggccagaacgacctgatgggcacggccgaggacttcgccgaccagttcctccgtgtcacaaagcagtacctgccccacgtggcgcgcctctgtctgatcagcaccttcctggaggacggcatccgtatgtggttccagtggagcgagcagcgcgactacatcgacaccacctggaactgcggctacctgctggcctcgtccttcgtcttcctcaacttgctgggacagctgactggctgcgtcctggtgttgagcaggaacttcgtgcagtacgcctgcttcgggctctttggaatcatagctctgcagacgattgcctacagcattttatgggacttgaagtttttgatgaggaacctggccctgggaggaggcctgttgctgctcctagcagaatcccgttctgaagggaagagcatgtttgcgggcgtccccaccatgcgtgagagctcccccaaacagtacatgcagctcggaggcagggtcttgctggttctgatgttcatgaccctccttcactttgacgccagcttcttttctattgtccagaacatcgtgggcacagctctgatgattttagtggccattggttttaaaaccaagctggctgctttgactcttgttgtgtggctctttgccatcaacgtatatttcaacgccttctggaccattccagtctacaagcccatgcatgacttcctgaaatacgacttcttccagaccatgtcggtgattgggggcttgctcctggtggtggccctgggccctgggggtgtctccatggatgagaagaagaaggagtggtaacagtcacagatccctacctgcctggctaagacccgtggccgtcaaggactggttcggggtggattcaacaaaactgccagcttttatgtatcctcttcccttcccctcccttggtaaaggcacagatgttttgagaactttatttgcagagacacctgagaatcgatggctcagtctgctctggagccacagtctggcgtctgacccttcagtgcaggccagcctggcagctggaagcctcccccacgccgaggctttggagtgaacagcccgcttggctgtggcatctcagtcctatttttgagtttttttgtgggggtacaggagggggccttcaagctgtactgtgagcagacgcattggtattatcattcaaagcagtctccctcttatttgtaagtttacatttttagcggaaactactaaattattttgggtggttcagccaaacctcaaaacagttaatctccctggtttaaaatcacaccagtggctttgatgttgtttctgccccgcattgtattttataggaatagtgaaaacatttagggacacccaaagaatgatgcagtattaaaggggtggtagaagctgctgtttatgataaaagtcatcggtcagaaaatcagcttggattggtgccaagtgttttattgggtaacaccctgggagttttagtagcttgaggcaaggtggaggggcaagaagtccttggggaagctgctggtctgggtgctgctggcctccaagctggcagtgggaagggctagtgagaccacacaggggtagccccagcagcagcaccctgcaagccagcctggccagctgctcagaccagcttgcagagccgcagccgctgtgggcagggggtgtggcaggagctcccagcactggagacccacggactcaacccagttacctcacatggggccttttctgagcaaggtctcgaaagcgcaggccgccctggctgagcagcaccgccctttcccagctgcactcgccctgtggacagccccgacacaccactttcctgaggctgtcgctcactcagattgtccgtttgctatgccgaatgcagccaaaattcctttttacaatttgtgatgccttaccgatttgatcttaatcctgtatttaaagttttctaacactgccttatactgtgtttctctttttgggggagcttaactgcttgttgctccctgtcgtctgcaccatagtaaatgccacaagggtagtcgaacacctctctggcccctagacctatctggggacaggctggctcagcctgtctccagggctgctgcggcccagccccgagcctgcctccctcttggcctctcatccattggctctgcagggcaggggtgaggcaggtttctgctcataagtgcttttggaagtcacctacctttttaacacagccgaactagtcccaacgcgtttgcaaatattcccctggtagcctacttccttacccccgaatattggtaagatcgagcaatggcttcaggacatgggttctcttctcctgtgatcattcaagtgctcactgcatgaagactggcttgtctcagtgtttcaacctcaccagggctgtctcttggtccacacctcgctccctgttagtgccgtatgacagcccccatcaaatgaccttggccaagtcacggtttctctgtggtcaaggttggttggctgattggtggaaagtagggtggaccaaaggaggccacgtgagcagtcagcaccagttctgcaccagcagcgcctccgtcctagtgggtgttcctgtttctcctggccctgggtgggctagggcctgattcgggaagatgcctttgcagggaggggaggataagtgggatctaccaattgattctggcaaaacaatttctaagatttttttgctttatgtgggaaacagatctaaatctcattttatgctgtattttatatcttagttgtgtttgaaaacgttttgatttttggaaacacatcaaaataaataatggcgtttgttgt

SEQ ID NO: 1299 - DNA, 2965 bp, Homo sapiens
ggggcacttcctgtggaggccgcagcgggcgcgggtgccgacgggcgagggccagcgagcgagcgagccgagccgagcctcccgccgtcgccatgggccagaacgacctgatgggcacggccgaggacttcgccgaccagttcctccgtgtcacaaagcagtacctgccccacgtggcgcgcctctgtctgatcagcaccttcctggaggacggcattcgtatgtggttccagtggagtgagcagcgcgactacatcgacaccacctggaactgcggctacctgctggcctcgtccttcgtcttcctcaacttgctgggacagctgactggctgcgtcctggtgttgagcaggaacttcgtgcagtatgcctgcttcgggctctttggaatcatagctctgcagacgattgcctacagcattttatgggacttgaagtttttgatgaggaacctggccctgggaggaggcctgttgctgctcctagcagaatcccgttctgaagggaagagcatgtttgcgggcgtccccaccatgcgtgagagctcccccaaacagtacatgcagctcggaggcagggtcttgctggttctgatgttcatgaccctccttcactttgacgccagcttcttttctattgtccagaacatcgtgggcacagctctgatgattttagtggccattggttttaaaaccaagctggctgctttgactcttgttgtctggctctttgccatcaacgtatatttcaacgccttctggaccattccagtctacaagcccatgcatgacttcctgaaatacgacttcttccagaccatgtcggtgatcgggggcttgctcctggtggtggccctgggccctgggggtgtctccatggatgagaagaagaaggagtggtaacagtcacagatccctacagtcacagatccctacctgcctggctaagacccgtggccgtcaaggactggttcggggtggattcaacaaaactgccagcttttatgtatcctcttcccttcccctcccttggtaaaggcacagatgttttgagaactttatttgcagacacacctgagaattgatggctcagtctgctctggagccacagtctggcgtctgacccttcagtgcaggccagcctggcagttggaagcctcccccatgccgaggctttggagtgaacagcccgcttggctgtggcatctcagtcctatttttttttgtgggggtacaggagggggccttcaagctgtactgtgagcagatgcattggtattattattcaaagcagtctccctcttatttttaagtttacatttttagcggaaactactaaattattttgggtggttcagccaaacctcaaaacagttaatctccctggtttaaaatcacaccagtggcttcgatgttgtttctgcccctgcattgtattttataggaatagtgaaaacatttagggacacccaaagaatgatgcagtattaaaggggtggtggaagctgctgtttatgataaaagtcatcggtcagaaaatcagcttggattggtgcccaagtgttttattgggtaacaccctgggagttttagtagcttgaggcaaggcggaggggcaagaagtccttggggaagctgctggtctgggcgctgctggcctcagagctggcagtggggagggctagtgagaccgcacaggggtggccctagctgcagcaccccgcaagccagcctggccacctgctcctcagaccagcttggggagccgcagctgctgtggccaggggctgtggcgggagctcccagcactggagacccatagactcaacccagttacctcacatggggccttttctgagcaaggtctcgaaagcgcaggccaccctggctgagcagcaccgccctttcccagctgcgctcgccctgtggacagccccgacacaccactttcccgaggctgtcgctcactcagattgtccgtttgctatgccgaatgcagccaaaattcctttttacaatttgtgatgccttaccgatttgatcttaatcctgtatttaaagttttctaacactgccttatactgtgtttctctttttgggggggcttaactgcttgttgctgcctgtcgtctgcaccacagtaaatgccacaagggtggtcgaacacctctctagcccctagacctatctggggacaggctggctcagcctgtctccagggctgctttggcccagccccgagcctgcctccctcttggcctcttgtccgttggctctgcagggcaggggtgaggcaagtttctgctcataagtgcttttggaagtcatctaccctgaggagggggcacctttttaacatagccaagctagtcccaacgtgtttgcaaatctttccctggtggcctacttccttaccccctaatactggtaagatcgagcagtggcttcaggacatgggttctcttctgtgattgatcaagtgctcactgcatgaagactggcttgtcagtgtttcatcctcaccagggctgtctcttggtccacacctcattccctgttagtgccatatgacagcccccatcaaatgacctttgccaagtcacggtttctctgtggtcaaggttggttggctgattggtggaaagtagggtggaccaaaggaggccacgtgagcagtcagcaccagttctgcaccagcagcacctccgtcctagtgggtgttcctgtttctcctggccctgggtgggctagggcctgattgaggaagatgcctttgcagggaggagaggataagtgggatctaccaattgattttggcaaaacaatttctaagatttttttgctttatgtgggaaacaaatctaaatctcattttatgctgtattttatatcttagttgtgtttgaaaacgttttgatttttggaaacacatcaaaataaataatggcatttgttgtaaaaaaaaa

SEQ ID NO: 1300 - DNA, 3065 bp, Homo sapiens; identical to SEQ ID NO: 1298

SEQ ID NO: 1301 - DNA, 2867 bp, Homo sapiens
gttttcttctttgagaaactatcccagatatcatcatagagtcttctgctcttcctcaactaccaaagcagaaaaacatcagcgaagcagcaggccatgcaccccccaaaaactccatctggggctcttcatagaaaaaggaaaatggcagcctggcccttctccaggctgtggaaagtctctgatccaattctcttccaaatgaccttgatcgctgctctgttgcctgctgttcttggcaattgtggtcctccacccactttatcatttgctgccccgatggatattacgttgactgagacacgcttcaaaactggaactactctgaaatacacctgcctccctggctacgtcagatcccattcaactcagacgcttacctgtaattctgatggcgaatgggtgtataacaccttctgtatctacaaacgatgcagacacccaggagagttacgtaatgggcaagtagagattaagacagatttatcttttggatcacaaatagaattcagctgttcagaaggatttttcttaattggctcaaccactagtcgttgtgaagtccaagatagaggagttggctggagtcatcctctcccacaatgtgaaattgtcaagtgtaagcctcctccagacatcaggaatggaaggcacagcggtgaagaaaatttctacgcatacggcttttctgtcacctacagctgtgacccccgcttctcactcttgggccatgcctccatttcttgcactgtggagaatgaaacaataggcgtttggagaccaagccctcctacctgtgaaaaaatcacctgtcgcaagccagatgtttcacatggggaaatggtctctggatttggacccatctataattacaaagacactattgtgtttaagtgccaaaaaggttttgttctcagaggcagcagtgtaattcattgtgatgctgatagcaaatggaatccttctcctcctgcttgtgagcccatttgcaattttcctcctaaaattgcccatgggcattataaacaatctagttcatacagctttttcaaagaagagattatatatgaatgtgataaaggctacattctggtcggacaggcgaaactctcctgcagttattcacactggtcagctccagcccctcaatgtaaagagaaacgatgcagaaatccagaattaatcaatgggatagtggaagttaaaaaagatcttctccttggttcaaccatataattcagctgctcagagggatttttcttaattggctcaaccaccagtcattgtcagatccaaggtaaaggagttgattggagtgatcctctcccagaacgtgtaattgccaagtgcgagccccctccagacatcaggaatgggaagcacagcggtggagatcaagaattctacacatatgcctcctctgtcacctacagctgcaacccctacttctcactcataggcaacgtctccatctcctgcaccgtggagaatgaaacaataggtgtctggagcccaaaccctcctatctgtgaaaaaattgtctgtcgtcgaccacagattccaaaggcaatctttgtttctggatttggacccctctatacttacaaagactctattatggttaactgtgaggaaggttatatcctcagaggcagcagtttaatctattgtgaaacgaataatgagtggtatccttctgttccctcttgcatatccatgaatggttgcactgtcctaccggacatttcctatgcttcctgggagagaaatgactacaacctaagtgatcacgaaatatttgaaattggaactgagttgaaatatctatgcaaacctggctatagacctgttttagatgagcctctgactgtgacttgtcaggaaaatttgacatggacatcttccaatgagtgtgagagggtatgttgcccaacaccagatctggagaatatcagaatcataaatgaaaggaggtatttcactggtagatgtgtctatgcctatggagactatatttcatatatgtgtgatgaaggctattaccctatttctgttgacggggagagttcctgccacacagatggcacatggaagcctaaaatgccagcatgtgagccagtttgcagttaccctcccagtattgcccatggacactacaaggaagttattttaataactccttatcctgaggctacatatgaatgtgatgaaggatatgttttggctggatttgctacaatctactgcaagtcttttcactggcaacttgcacctcctcaatgtaaagctctgtgtctgaaaccagaaatagtgaatggaaggctgtctgtggataaggatcagtatgttgagtctgaaaatgttaccattgaatgtgattctggctatggtgtggttggtctcaaaagtatcacttgctcagagaagagaacctggtacccagaagtgcccaggtgtgagtgggaggcacctgaaggttgtgagcaagtgctcacaggcagaaaactcatgcagtgtctcccaagcccagaggatgtgaaagtggccctggaggtgtataagctgtctctggagataaaacaacttgaaaaagagagagacaaattgatgaacacccatcagaaattttctgaaaaagaggaaatgaaggacttatttttcccttcaaatcaacatacagaatcttcactcatccaccctactcttccttgagcaccatcactctcataagggtctgggctaggagaactttcttattactgccagagaaaaatgtgtaattattggtaatctagccttttgtagctcaaatgtccagtttcctggacttgaagtgctggttaattaaataattatttaccaaatat

SEQ ID NO: 1302 - DNA, 2136 bp, Homo sapiens
gttttcttctttgagaaactatcccagatatcatcatagagtcttctgctcttcctcaactaccaaagcagaaaaacatcagcgaagcagcaggccatgcaccccccaaaaactccatctggggctcttcatagaaaaaggaaaatggcagcctggcccttctccaggctgtggaaagtctctgatccaattctcttccaaatgaccttgatcgctgctctgttgcctgctgttcttggcaattgtggtcctccacccactttatcatttgctgccccgatggatattacgttgactgagacacgcttcaaaactggaactactctgaaatacacctgcctccctggctacgtcagatcccattcaactcagacgcttacctgtaattctgatggcgaatgggtgtataacaccttctgtatctacaaacgatgcagacacccaggagagttacgtaatgggcaagtagagattaagacagatttatcttttggatcacaaatagaattcagctgttcagaaggatttttcttaattggctcaaccactagtcgttgtgaagtccaagatagaggagttggctggagtcatcctctcccacaatgtgaaattgtcaagtgtaagcctcctccagacatcaggaatggaaggcacagcggtgaagaaaatttctacgcatacggcttttctgtcacctacagctgtgacccccgcttctcactcttgggccatgcctccatttcttgcactgtggagaatgaaacaataggcgtttggagaccaagccctcctacctgtgaaaaaatcacctgtcgcaagccagatgtttcacatggggaaatggtctctggatttggacccatctataattacaaagacactattgtgtttaagtgccaaaaaggttttgttctcagaggcagcagtgtaattcattgtgatgctgatagcaaatggaatccttctcctcctgcttgtgagcccaatagttgtattaatttaccagacattccacatgcttcctgggaaacatatcctaggccgacaaaagaggatgtgtatgttgttgggactgtgttaaggtaccgctgtcatcctggctacaaacccactacagatgagcctacgactgtgatttgtcagaaaaatttgagatggaccccataccaaggatgtgaggcgttatgttgccctgaaccaaagctaaataatggtgaaatcactcaacacaggaaaagtcgtcctgccaatcactgtgtttatttctatggagatgagatttcattttcatgtcatgagaccagtaggttttcagctatatgccaaggagatggcacgtggagtccccgaacaccatcatgtggagacatttgcaattttcctcctaaaattgcccatgggcattataaacaatctagttcatacagctttttcaaagaagagattatatatgaatgtgataaaggctacattctggtcggacaggcgaaactctcctgcagttattcacactggtcagctccagcccctcaatgtaaagctctgtgtcggaaaccagaattagtgaatggaaggttgtctgtggataaggatcagtatgttgagcctgaaaatgtcaccatccaatgtgattctggctatggtgtggttggtccccaaagtatcacttgctctgggaacagaacctggtacccagaggtgcccaagtgtgagtgggagacccccgaaggctgtgaacaagtgctcacaggcaaaagactcatgcagtgtctcccaaacccagaggatgtgaaaatggccctggaggtatataagctgtctctggaaattgaacaactggaactacagagagacagcgcaagacaatccactttggataaagaactataatttttctcaaaagaaggaggaaaaggtgtcttgctggcttgcctcttgcaattcaatacagatcagtttagcaaatctactgtcaatttggcagtgatattcatcataataaatatctagaaatgataatttgctaaagtttagtgctttgagattgtgaaattattaatcatcctctgtgtggctcatgtttttgcttttcaacacacaaagcacaaattttttttcgattaaaaatgtatgtat

SEQ ID NO: 1303 - DNA, 2136 bp, Homo sapiens; identical to SEQ ID NO: 1302

SEQ ID NO: 1304 - DNA, 2968 bp, Homo sapiens
cgccccccctccttcataaagtcctggcctcgggacagcctgcacagctgcctagcctgtggagacgggacagccctgtcccactcactctttcccctgccgctcctgccggcagctccaaccatgggaggccgcgtctttctcgcattctgtgtctggctgactctgccgggagctgaaacccaggactccaggggctgtgcccggtggtgccctcagaactcctcgtgtgtcaatgccaccgcctgtcgctgcaatccagggttcagctctttttctgagatcatcaccaccccgacggagacttgtgacgacatcaacgagtgtgcaacaccgtcgaaagtgtcatgcggaaaattctcggactgctggaacacagaggggagctacgactgcgtgtgcagcccgggatatgagcctgtttctggggcaaaaacattcaagaatgagagcgagaacacctgtcaagatgtggacgagtgcagctccgggcagcatcagtgtgacagctccaccgtctgcttcaacaccgtgggttcatacagctgccgctgccgcccaggctggaagcccagacacggaatcccgaataaccaaaaggacactgtctgtgaagatatgactttctccacctggaccccgccccctggagtccacagccagacgctttcccgattcttcgacaaagtccaggacctgggcagagactccaagacaagctcagccgaggtcaccatccagaatgtcatcaaattggtggatgaactgatggaagctcctggagacgtagaggccctggcgccacctgtccggcacctcatagccacccagctgctctcaaaccttgaagatatcatgaggatcctggccaagagcctgcctaaaggccccttcacctacatttccccttcgaacacagagctgaccctgatgatccaggagcggggggacaagaacgtcactatgggtcagagcagcgcacgcatgaagctgaattgggctgtggcagctggagccgaggatccaggccccgccgtggcgggcatcctctccatccagaacatgacgacattgctggccaatgcctccttgaacctgcattccaagaagcaagccgaactggaggagatatatgaaagcagcatccgtggtgtccaactcagacgcctctctgccgtcaactccatctttctgagccacaacaacaccaaggaactcaactcccccatccttttcgccttctcccaccttgagtcctccgatggggaggcgggaagagaccctcctgccaaggacgtgatgcctgggccacggcaggagctgctctgtgccttctggaagagtgacagcgacaggggagggcactgggccaccgagggctgccaggtgctgggcagcaagaacggcagcaccacctgccaatgcagccacctgagcagctttgcgatccttatggctcattatgacgtggaggactggaagctgaccctgatcaccagggtgggactggcgctgtcactcttctgcctgctgctgtgcatcctcactttcctgctggtgcggcccatccagggctcgcgcaccaccatacacctgcacctctgcatctgcctcttcgtgggctccaccatcttcctggccggcatcgagaacgaaggcggccaggtggggctgcgctgccgcctggtggccgggctgctgcactactgtttcctggccgccttctgctggatgagcctcgaaggcctggagctctactttcttgtggtgcgcgtgttccaaggccagggcctgagtacgcgctggctctgcctgatcggctatggcgtgcccctgctcatcgtgggcgtctcggctgccatctacagcaagggctacggccgccccagatactgctggttggactttgagcagggcttcctctggagcttcttgggacctgtgaccttcatcattttgtgcaatgctgtcattttcgtgactaccgtctggaagctcactcagaagttttctgaaatcaatccagacatgaagaaattaaagaaggcgagggcgctgaccatcacggccatcgcgcagctcttcctgttgggctgcacctgggtctttggcctgttcatcttcgacgatcggagcttggtgctgacctatgtgtttaccatcctcaactgcctgcagggcgccttcctctacctgctgcactgcctgctcaacaagaaggttcgggaagaataccggaagtgggcctgcctagttgctggggggagcaagtactcagaattcacctccaccacgtctggcactggccacaatcagacccgggccctcagggcatcagagtccggcatatgaaggcgcatggttctggacggcccagcagctcctgtggccacagcagctttgtacacgaagaccatccatcctcccttcgtccaccactctactccctccaccctccctccctgatcccgtgtgccaccaggagggagtggcagctatagtctggcaccaaagtccaggacacccagtggggtggagtcggagccactggtcctgctgctggctgcctctctgctccaccttgtgacccagggtggggacaggggctggcccagggctgcaatgcagcatgttgccctggcacctgtggccagtactcgggacagactaagggcgcttgtcccatcctggacttttcctctcatgtctttgctgcagaactgaagagactaggcgctggggctcagcttccctcttaagctaagactgatgtcagaggccccatggcgaggccccttggggccactgcctgaggctcacggtacagaggcctgccctgcctggccgggcaggaggttctcactgttgtgaaggttgtagacgttgtgtaatgtgtttttatctgttaaaatttttcagtgttgacacttaaaattaaacacatgcatacagaaaaaaaaaaaaaaaa

SEQ ID NO: 1305 - DNA, 5947 bp, Homo sapiens
caaaggaggctctggcgggcgacggaaggaaccctaaggactctgcaatatgaataattccctagagaacaccatctcctttgaagagtacatccgagtaaaggcacggtctgtcccgcaacacaggatgaaggaatttctggactcactggcctctaaggggccagaagcccttcaggagttccagcagacagccaccactaccatggtgtaccaacagggtgggaactgcatatacacagacagcactgaagtggctgggtctttgcttgaacttgcctgtccagtcaccaccagtgttcagccacaaacccagcaagaacagcagatccaggttcagcagccgcagcaggttcaggtccaggtgcaggtacagcagtctccgcaacaggtctcggctcagctctccccacaactcaccgttcaccagcctactgagcaacccatccaggtccaggtgcagatccaaggccaggcaccacagtcagcagccccctccattcagaccccgtctctgcagagtcccagtccctcgcagctgcaagcagctcagatccaggtgcagcacgtgcaagcagcccagcagatccaggctgcagaaatcccggaggagcacatcccacatcagcaaatccaggctcagctggtggctggccagtctcttgctggtggtcagcagatccaaatccagaccgtgggtgccctttccccaccaccatcccagcagggctcaccccgggaaggggagcggcgggttggcacggccagtgtcctccaaccagtgaagaagcgcaaagtggacatgcccatcactgtgtcctacgccatctcagggcagccggtggccaccgtgctggccattccacagggccagcagcagagttatgtgtctttgaggccagacttactgacagtagacagtgcccacctgtacagtgccactgggaccattactagccctacaggagaaacctggaccatccctgtttattctgcccagccccggggggaccctcagcagcagagcattacccacattgccattccccaggaagcctacaacgcagttcacgtcagtggctcacccacagccctggcagctgttaagctggaggatgacaaggagaagatggtgggcaccacatctgtagtgaaaaactcccatgaagaggtagtgcagacccttgcaaactctctctttccagcacagttcatgaatggcaacatccacattccagtggctgtgcaggctgtggcaggcacgtaccagaatacggctcaaactgtccatatatgggacccccaacagcagccgcagcagcaaactccccaggaacagacaccaccaccacagcagcagcagcagcaactccaagttacttgttcagctcaaactgtccaggttgctgaagttgaaccacagtcacagccacagccttccccagaacttctgcttccaaattctttgaagccagaagaagggcttgaagtatggaaaaactgggcccagaccaagaatgctgaactagagaaggatgctcagaacagattggcacccattgggaggcgccaactgctgcgattccaggaagatctcatctcctctgctgtggcagagttgaattatgggctctgtctaatgacacgggaagctcgaaatggagaaggtgaaccctatgacccagatgtgctctactatattttcctgtgtattcaaaagtatctttttgaaaatggaagggtagatgacattttctccgatctttattatgttcggttcacggagtggctacatgaagttctgaaggatgttcagccccgggtcactccacttggctatgtcttgcccagccacgtgactgaggagatgctatgggagtgcaagcagcttggggctcactccccctccaccttgctgaccaccctcatgttctttaataccaagtaagtgttctagaggctccactgctggcatctgtccagtgaagagtgtggaaactatccaagaggccttctgaattcctctgacatatatttgagaaactgggctactgaaagccctaaccccacttggctgcattttatttggtaaccagtgaggcaaacacccttgccagacccctaccatccatcttgatgtggttcctgcactggacactgcttgggtacttcctattgaagacagtggaccagcacatgaagctggccttctccaaggtcttgcgacagacaaagaagaacccctctaatcccaaggataaaagcacgagtatccggtacttgaaggcccttggaatacaccagactggccagaaagttacagatgacatgtatgcagaacagacggaaaatccagagaatccattgagatgtcccatcaagctctatgatttctacctcttcaaatgcccccagagtgtgaaaggccggaatgacaccttttacctgacacctgagccagtggtggcccccaacagcccaatctggtactcagtccagcctatcagcagagagcagatgggacaaatgctgacgcggatcctggtgataagagaaattcaggaggccatcgcagtggccaatgcaagcactatgcactgagatgccttggccatggcacaagagaaaccagccaggaaaaaccagacagactttcacactaaagaagaggcctccatttttttttttcttttttttattggtgtagttacgaagcctttcaggctgcttctgtttaaaatataaaagaaaactttgccccctttgcatcttcataaacctgctgcggcagactcctcagccgatggtggctctgggtttccttgagtgtcatatgtcctagaaagttgctggctgactcttttttgtctggggcctggggaaagggcttggactgtgaaaagaaatgtggcccctttccatcttcaagagagatggaattaatgatggatggaccctggagggaatctccccagccgacttccactgggctgacagactttgctgaccacaggggaacgatgttcttttctttcttcatgatcagacataaacttagcatcttaatggaagaaaaatgaggggaacttcaattatgatttattaaagacaatttctattacaccctcctttatgacaagtgacattttagatgtaaaagtaaaaactttaccatgccttttttttttttgttggcctaacattgaggccttaaaacctgaggctcctgtgcctgatggaattcttgtaacatacacttgtgtatcatataaagataccactctgtttctcttatgtattcttactctagttgtttattaagaatgacaagcacgtcttttcaacatgttagtgaacaacgtctctttattttggggaggagcccggcgggacagtagaagtaaacccttgcctgttaattgaactggccgaggtcctgcggggagtgtggggtgggacgtgaagtggcagctcctcagtgacaaggccactatgtgctatacgcatgcgctgtttcttcagcgccagctccgcccccgccgcagcgaggcgggtaggttccgcccgcgcgcactacgccctgacgtcagcgtcgcgcgcagcgcagtgacgaaatcggctggtttatattggcgcggcccagacggcagaggtctctgcggcgcggtcctcggagacacgcggcggtgtcctgtgttggccatggccgactacctgattagtgggggcacgtcctacgtgccagacgacggactcacagcacagcagctcttcaactgcggagacggcctcacctacaatgactttctcattctccctgggtacatcgacttcactgcagaccaggtggacctgacttctgctctgaccaagaaaatcactcttaagaccccactggtttcctctcccatggacacagtcacagaggctgggatggccatagcaatggcgcttacaggcggtattggcttcatccaccacaactgtacacctgaattccaggccaatgaagttcggaaagtgaagaaatatgaacagggattcatcacagaccctgtggtcctcagccccaaggatcgcgtgcgggatgtttttgaggccaaggcccggcatggtttctgcggtatcccaatcacagacacaggccggatggggagccgcttggtgggcatcatctcctccagggacattgattttctcaaagaggaggaacatgactgtttcttggaagagataatgacaaagagggaagacttggtggtagcccctgcaggcatcacactgaaggaggcaaatgaaattctgcagcgcagcaagaagggaaagttgcccattgtaaatgaagatgatgagcttgtggccatcattgcccggacagacctgaagaagaatcgggactacccactagcctccaaagatgccaagaaacagctgctgtgtggggcagccattggcactcatgaggatgacaagtataggctggacttgctcgcccaggctggtgtggatgtagtggttttggactcttcccagggaaattccatcttccagatcaatatgatcaagtacatcaaagacaaataccctaatctccaagtcattggaggcaatgtggtcactgctgcccaggccaagaacctcattgatgcaggtgtggatgccctgcgggtgggcatgggaagtggctccatctgcattacgcaggaagtgctggcctgtgggcggccccaagcaacagcagtgtacaaggtgtcagagtatgcacggcgctttggtgttccggtcattgctgatggaggaatccaaaatgtgggtcatattgcgaaagccttggcccttggggcctccacagtcatgatgggctctctcctggctgccaccactgaggcccctggtgaatacttcttttccgatgggatccggctaaagaaatatcgcggtatgggttctctcgatgccatggacaagcacctcagcagccagaacagatatttcagtgaagctgacaaaatcaaagtggcccagggagtgtctggtgctgtgcaggacaaagggtcaatccacaaatttgtcccttacctgattgctggcatccaacactcatgccaggacattggtgccaagagcttgacccaagtccgagccatgatgtactctggggagcttaagtttgagaagagaacgtcctcagcccaggtggaaggtggcgtccatagcctccattcgtatgagaagcggcttttctgaaaagggatccagcacacctcctcggtttttttttcaataaaagtttagaaagaaaaaagtgatgcctgatctttcaacagacaggtggggctctgtagctgccactaccacagatgcacacaaaaacagcaccctcatttccagggggagcctcaggccccgagataaatgtgctccatggacctggaagcgggtagttccaggtccaaaaagttcctcctgaggctgctcacaaaacagctgactatagctatagctatggctcttggggtttcagtctcacactgagcatctgactctggctcccaaggggtcaaagaacaagccctgggactggcatacacagggcatcctgctagcccatagcttggccatataggaccaggtcaacacacatatatattccctaacttgaatctctctcggccaggcacattggctcacgtctgtaatcccagcactttgggaggcaggtggatcacttgaggtcaggagttcgagaccatcctggccaacatggtgaaccctttctctactaaaaatacaaaaattagctgggcgtggtgatgcatacctctagtcccagctactcaggaggctgaggcaggagaatcactgaaacccaggaggcggaggttgcagtgagctgagactgcgccactgcactccaccctggcgaaagagcaagactcatctccag

SEQ ID NO: 1306 - DNA, 5727 bp, Homo sapiens
caaaggaggctctggcgggcgacggaaggaaccctaaggactctgcaatatgaataattccctagagaacaccatctcctttgaagagtacatccgagtaaaggcacggtctgtcccgcaacacaggatgaaggaatttctggactcactggcctctaaggggccagaagcccttcaggagttccagcagacagccaccactaccatggtgtaccaacagggtgggaactgcatatacacagacagcactgaagtggctgggtctttgcttgaacttgcctgtccagtcaccaccagtgttcagccacaaacccagcaagaacagcagatccaggttcagcagccgcagcaggttcaggtccaggtgcaggtacagcagtctccgcaacaggtctcggctcagctctccccacaactcaccgttcaccagcctactgagcaacccatccaggtccaggtgcagatccaaggccaggcaccacagtcagcagccccctccattcagaccccgtctctgcagagtcccagtccctcgcagctgcaagcagctcagatccaggtgcagcacgtgcaagcagcccagcagatccaggctgcagaaatcccggaggagcacatcccacatcagcaaatccaggctcagctggtggctggccagtctcttgctggtggtcagcagatccaaatccagaccgtgggtgccctttccccaccaccatcccagcagggctcaccccgggaaggggagcggcgggttggcacggccagtgtcctccaaccagtgaagaagcgcaaagtggacatgcccatcactgtgtcctacgccatctcagggcagccggtggccaccgtgctggccattccacagggccagcagcagagttatgtgtctttgaggccagacttactgacagtagacagtgcccacctgtacagtgccactgggaccattactagccctacaggagaaacctggaccatccctgtttattctgcccagccccggggggaccctcagcagcagagcattacccacattgccattccccaggaagcctacaacgcagttcacgtcagtggctcacccacagccctggcagctgttaagctggaggatgacaaggagaagatggtgggcaccacatctgtagtgaaaaactcccatgaagaggtagtgcagacccttgcaaactctctctttccagcacagttcatgaatggcaacatccacattccagtggctgtgcaggctgtggcaggcacgtaccagaatacggctcaaactgtccatatatgggacccccaacagcagccgcagcagcaaactccccaggaacagacaccaccaccacagcagcagcagcagcaactccaagttacttgttcagctcaaactgtccaggttgctgaagttgaaccacagtcacagccacagccttccccagaacttctgcttccaaattctttgaagccagaagaagggcttgaagtatggaaaaactgggcccagaccaagaatgctgaactagagaaggatgctcagaacagattggcacccattgggaggcgccaactgctgcgattccaggaagatctcatctcctctgctgtggcagagttgaattatgggctctgtctaatgacacgggaagctcgaaatggagaaggtgaaccctatgacccagatgtgctctactatattttcctgtgtattcaaaagtatctttttgaaaatggaagggtagatgacattttctccgatctttattatgttcggttcacggagtggctacatgaagttctgaaggatgttcagccccgggtcactccacttggctatgtcttgcccagccacgtgactgaggagatgctatgggagtgcaagcagcttggggctcactccccctccaccttgctgaccaccctcatgttctttaataccaagtacttcctattgaagacagtggaccagcacatgaagctggccttctccaaggtcttgcgacagacaaagaagaacccctctaatcccaaggataaaagcacgagtatccggtacttgaaggcccttggaatacaccagactggccagaaagttacagatgacatgtatgcagaacagacggaaaatccagagaatccattgagatgtcccatcaagctctatgatttctacctcttcaaatgcccccagagtgtgaaaggccggaatgacaccttttacctgacacctgagccagtggtggcccccaacagcccaatctggtactcagtccagcctatcagcagagagcagatgggacaaatgctgacgcggatcctggtgataagagaaattcaggaggccatcgcagtggccaatgcaagcactatgcactgagatgccttggccatggcacaagagaaaccagccaggaaaaaccagacagactttcacactaaagaagaggcctccatttttttttttcttttttttattggtgtagttacgaagcctttcaggctgcttctgtttaaaatataaaagaaaactttgccccctttgcatcttcataaacctgctgcggcagactcctcagccgatggtggctctgggtttccttgagtgtcatatgtcctagaaagttgctggctgactcttttttgtctggggcctggggaaagggcttggactgtgaaaagaaatgtggcccctttccatcttcaagagagatggaattaatgatggatggaccctggagggaatctccccagccgacttccactgggctgacagactttgctgaccacaggggaacgatgttcttttctttcttcatgatcagacataaacttagcatcttaatggaagaaaaatgaggggaacttcaattatgatttattaaagacaatttctattacaccctcctttatgacaagtgacattttagatgtaaaagtaaaaactttaccatgccttttttttttttgttggcctaacattgaggccttaaaacctgaggctcctgtgcctgatggaattcttgtaacatacacttgtgtatcatataaagataccactctgtttctcttatgtattcttactctagttgtttattaagaatgacaagcacgtcttttcaacatgttagtgaacaacgtctctttattttggggaggagcccggcgggacagtagaagtaaacccttgcctgttaattgaactggccgaggtcctgcggggagtgtggggtgggacgtgaagtggcagctcctcagtgacaaggccactatgtgctatacgcatgcgctgtttcttcagcgccagctccgcccccgccgcagcgaggcgggtaggttccgcccgcgcgcactacgccctgacgtcagcgtcgcgcgcagcgcagtgacgaaatcggctggtttatattggcgcggcccagacggcagaggtctctgcggcgcggtcctcggagacacgcggcggtgtcctgtgttggccatggccgactacctgattagtgggggcacgtcctacgtgccagacgacggactcacagcacagcagctcttcaactgcggagacggcctcacctacaatgactttctcattctccctgggtacatcgacttcactgcagaccaggtggacctgacttctgctctgaccaagaaaatcactcttaagaccccactggtttcctctcccatggacacagtcacagaggctgggatggccatagcaatggcgcttacaggcggtattggcttcatccaccacaactgtacacctgaattccaggccaatgaagttcggaaagtgaagaaatatgaacagggattcatcacagaccctgtggtcctcagccccaaggatcgcgtgcgggatgtttttgaggccaaggcccggcatggtttctgcggtatcccaatcacagacacaggccggatggggagccgcttggtgggcatcatctcctccagggacattgattttctcaaagaggaggaacatgactgtttcttggaagagataatgacaaagagggaagacttggtggtagcccctgcaggcatcacactgaaggaggcaaatgaaattctgcagcgcagcaagaagggaaagttgcccattgtaaatgaagatgatgagcttgtggccatcattgcccggacagacctgaagaagaatcgggactacccactagcctccaaagatgccaagaaacagctgctgtgtggggcagccattggcactcatgaggatgacaagtataggctggacttgctcgcccaggctggtgtggatgtagtggttttggactcttcccagggaaattccatcttccagatcaatatgatcaagtacatcaaagacaaataccctaatctccaagtcattggaggcaatgtggtcactgctgcccaggccaagaacctcattgatgcaggtgtggatgccctgcgggtgggcatgggaagtggctccatctgcattacgcaggaagtgctggcctgtgggcggccccaagcaacagcagtgtacaaggtgtcagagtatgcacggcgctttggtgttccggtcattgctgatggaggaatccaaaatgtgggtcatattgcgaaagccttggcccttggggctgtccgcagtcatgatgggctctctcctggctgccaccactgaggcccctggtgaatacttcttttccgatgggatccggctaaagaaatatcgcggtatgggttctctcgatgccatggacaagcacctcagcagccagaacagatatttcagtgaagctgacaaaatcaaagtggcccagggagtgtctggtgctgtgcaggacaaagggtcaatccacaaatttgtcccttacctgattgctggcatccaacactcatgccaggacattggtgccaagagcttgacccaagtccgagccatgatgtactctggggagcttaagtttgagaagagaacgtcctcagcccaggtggaaggtggcgtccatagcctccattcgtatgagaagcggcttttctgaaaagggatccagcacacctcctcggtttttttttcaataaaagtttagaaagaaaaaagtgatgcctgatctttcaacagacaggtggggctctgtagctgccactaccacagatgcacacaaaaacagcaccctcatttccagggggagcctcaggccccgagataaatgtgctccatggacctggaagcgggtagttccaggtccaaaaagttcctcctgaggctgctcacaaaacagctgactatagctatagctatggctcttggggtttcagtctcacactgagcatctgactctggctcccaaggggtcaaagaacaagccctgggactggcatacacagggcatcctgctagcccatagcttggccatataggaccaggtcaacacacatatatattccctaacttgaatctctctcggccaggcacattggctcacgtctgtaatcccagcactttgggaggcaggtggatcacttgaggtcaggagttcgagaccatcctggccaacatggtgaaccctttctctactaaaaatacaaaaattagctgggcgtggtgatgcatacctctagtcccagctactcaggaggctgaggcaggagaatcactgaaacccaggaggcggaggttgcagtgagctgagactgcgccactgcactccaccctggcgaaagagcaagactcatctccag

SEQ ID NO: 1307 - DNA, 1795 bp, Homo sapiens
cggcgtccgtccgtactgcagagccgctgccggagggtcgttttaaagggcccgcgcgttgccgccccctcggcccgccatgctgctatccgtgccgctgctgctcggcctcctcggcctggccgtcgccgagcctgccgtctacttcaaggagcagtttctggacggagacgggtggacttcccgctggatcgaatccaaacacaagtcagattttggcaaattcgttctcagttccggcaagttctacggtgacgaggagaaagataaaggtttgcagacaagccaggatgcacgcttttatgctctgtcggccagtttcgagcctttcagcaacaaaggccagacgctggtggtgcagttcacggtgaaacatgagcagaacatcgactgtgggggcggctatgtgaagctgtttcctaatagtttggaccagacagacatgcacggagactcagaatacaacatcatgtttggtcccgacatctgtggccctggcaccaagaaggttcatgtcatcttcaactacaagggcaagaacgtgctgatcaacaaggacatccgttgcaaggatgatgagtttacacacctgtacacactgattgtgcggccagacaacacctatgaggtgaagattgacaacagccaggtggagtccggctccttggaagacgattgggacttcctgccacccaagaagataaaggatcctgatgcttcaaaaccggaagactgggatgagcgggccaagatcgatgatcccacagactccaagcctgaggactgggacaagcccgagcatatccctgaccctgatgctaagaagcccgaggactgggatgaagagatggacggagagtgggaacccccagtgattcagaaccctgagtacaagggtgagtggaagccccggcagatcgacaacccagattacaagggcacttggatccacccagaaattgacaaccccgagtattctcccgatcccagtatctatgcctatgataactttggcgtgctgggcctggacctctggcaggtcaagtctggcaccatctttgacaacttcctcatcaccaacgatgaggcatacgctgaggagtttggcaacgagacgtggggcgtaacaaaggcagcagagaaacaaatgaaggacaaacaggacgaggagcagaggcttaaggaggaggaagaagacaagaaacgcaaagaggaggaggaggcagaggacaaggaggatgatgaggacaaagatgaggatgaggaggatgaggaggacaaggaggaagatgaggaggaagatgtccccggccaggccaaggacgagctgtagagaggcctgcctccagggctggactgaggcctgagcgctcctgccgcagagcttgccgcgccaaataatgtctctgtgagactcgagaactttcatttttttccaggctggttcggatttggggtggattttggttttgttcccctcctccactctcccccaccccctccccgcccttttttttttttttttttaaactggtattttatctttgattctccttcagccctcacccctggttctcatctttcttgatcaacatcttttcttgcctctgtccccttctctcatctcttagctcccctccaacctggggggcagtggtgtggagaagccacaggcctgagatttcatctgctctccttcctggagcccagaggagggcagcacatttcacccctccctttctcccctgcccccaggactgggccacttctgggtggggcagtgggtcccagattg

SEQ ID NO: 1308 - DNA, 13711 bp, Homo sapiens
cgtttgcttacaggtgacccatgggctgagggcatacgatggcttgtctctgcctgaggacatagagaccgtcacagcaagccaaatgcgctggacacattcgtacctttctgatgatgaggacatgctggctgacagcatctcaggagacgacctgggcagtggggacctgggcagcggggacttccagatggtttatttccgagccctggtgaatttcactcgctccatcgagtacagccctcagctggaggatgcaggctccagagagtttcgagaggtgtccgaggctgtggtagacacgctggagtcggagtacttgaaaattcccggagaccaggttgtcagtgtggtgttcatcaaggagctggatggctgggtttttgtggagctggatgtgggctcggaagggaatgcggatggggctcagattcaggagatgctgctcagggtcatctccagcggctctgtggcctcctacgtcacctctccccagggattccagttccgacgcctgggcacagtgccccagttcccaagagcctgcacggaggccgagtttgcctgccacagctacaatgagtgtgtggccctggagtatcgctgtgaccggcggcccgactgcagggacatgtctgatgagctcaattgtgaggagccagtcctgggtatcagccccacattctctctcctcgtggagacgacatctttaccgccccggccagagacaaccatcatgcgacagccaccagtcacccacgctcctcagcccctgcttcccggttccgtcaggcccctgccctgtgggccccaggaggccgcatgccgcaatgggcactgcatccccagagactacctctgcgacggacaggaggactgcgaggacggcagcgatgagctagactgtggccccccgccaccctgtgagcccaacgagttcccctgcgggaatggacattgtgccctcaagctgtggcgctgcgatggtgactttgactgtgaggaccgaactgatgaagccaactgccccaccaagcgtcctgaggaagtgtgcgggcccacacagttccgatgcgtctctaccaacatgtgcatcccagccagcttccactgtgacgaggagagcgactgtcctgaccggagcgacgagtttggctgcatgcccccccaggtggtgacacctccccgggagtccatccaggcttcccggggccagacagtgaccttcacctgcgtggccattggcgtccccacccccatcatcaattggaggctcaactggggccacatcccctctcatcccagggtgacagtgaccagcgagggtggccgtggcacactgatcatccgtgatgtgaaggagtcagaccagggtgcctacacctgtgaggccatgaacgcccggggcatggtgtttggcattcctgacggtgtccttgagctcgtcccacaacgaggcccctgccctgacggccacttctacctggagcacagcgccgcctgcctgccctgcttctgctttggcatcaccagcgtgtgccagagcacccgccgcttccgggaccagatcaggctgcgctttgaccaacccgatgacttcaagggtgtgaatgtgacaatgcctgcgcagcccggcacgccacccctctcctccacgcagctgcagatcgacccatccctgcacgagttccagctagtcgacctgtcccgccgcttcctcgtccacgactccttctgggctctgcctgaacagttcctgggcaacaaggtggactcctatggcggctccctgcgttacaacgtgcgctacgagttggcccgtggcatgctggagccagtgcagcggccggacgtggtcctcgtgggtgccgggtaccgcctcctctcccgaggccacacacccacccaacctggtgctctgaaccagcgccaggtccagttctctgaggagcactgggtccatgagtctggccggccggtgcagcgcgcggagctgctgcaggtgctgcagagcctggaggccgtgctcatccagaccgtgtacaacaccaagatggctagcgtgggacttagcgacatcgccatggataccaccgtcacccatgccaccagccatggccgtgcccacagtgtggaggagtgcagatgccccattggctattctggcttgtcctgcgagagctgtgatgcccacttcactcgggtgcctggtgggccctacctgggcacctgctctggttgcagttgcaatggccatgccagctcctgtgaccctgtgtatggccactgcctgaattgccagcacaacacggaggggccacagtgcaacaagtgcaaggctggcttctttggggacgccatgaaggccacggccacttcctgccggccctgcccttgcccatacatcgatgcctcccgcagattctcagacacttgcttcctggacacggatggccaagccacatgtgacgcctgtgccccaggctacactggccgccgctgtgagagctgtgcccccggatacgagggcaaccccatccagcccggcgggaagtgcaggcccgtcaaccaggagattgtgcgctgtgacgagcgtggcagcatggggacctccggggaggcctgccgctgtaagaacaatgtggtggggcgcttgtgcaatgaatgtgctgacggctctttccacctgagtacccgaaaccccgatggctgcctcaagtgcttctgcatgggtgtcagtcgccactgcaccagctcttcatggagccgtgcccagttgcatggggcctctgaggagcctggtcacttcagcctgaccaacgccgcaagcacccacaccaccaacgagggcatcttctcccccacgcccggggaactgggattctcctccttccacagactcttatctggaccctacttctggagcctcccttcacgcttcctgggggacaaggtgacctcctatggaggagagctgcgcttcacagtgacccagaggtcccagccgggctccacacccctgcacgggcagccgttggtggtgctgcaaggtaacaacatcatcctagagcaccatgtggcccaggagcccagccccggccagcccagcaccttcattgtgcctttccgggagcaagcatggcagcggcccgatgggcagccagccacacgggagcacctgctgatggcactggcaggcatcgacaccctcctgatccgagcatcctacgcccagcagcccgctgagagcagggtctctggcatcagcatggacgtggctgtgcccgaggaaaccggccaggaccccgcgctggaagtggaacagtgctcctgcccacccgggtaccgtgggccgtcctgccaggactgtgacacaggctacacacgcacgcccagtggcctctacctgggtacctgtgaacgctgcagctgccatggccactcagaggcctgcgagccagaaacaggtgcctgccagggctgccagcatcacacggagggccctcggtgtgagcagtgccagccaggatactacggggacgcccagcgggggacaccacaggactgccagctgtgcccctgctacggagaccctgctgccggccaggctgcccacacttgttttctggacacagacggccaccccacctgtgatgcgtgctccccaggccacagtgggcgtcactgtgagaggtgcgcccctggctactatggcaaccccagccagggccagccatgccagagagacagccaggtgccagggcccataggctgcaactgtgacccccaaggcagcgtcagcagccagtgtgatgctgctggtcagtgccagtgcaaggcccaggtggaaggcctcacttgcagccactgccggccccaccacttccacctgagtgccagcaacccagacggctgcctgccctgcttctgtatgggcatcacccagcagtgcgccagctctgcctacacacgccacctgatctccacccactttgcccctggggacttccaaggctttgccctggtgaacccacagcgaaacagccgcctgacaggagaattcactgtggaacccgtgcccgagggtgcccagctctcttttggcaactttgcccaactcggccatgagtccttctactggcagctgccggagacataccagggagacaaggtggcggcctacggtgggaagttgcgatacaccctctcctacacagcaggcccacagggcagcccactctctgaccccgatgtgcagatcacgggcaacaacatcatgctagtggcctcccagccagcgctgcagggccctgagaggaggagctacgagatcatgttccgagaggaattctggcgccggcccgatgggcagccggccacacgcgagcacctcctgatggcactggccgacctggatgagctcctgatccgggccacgttctcctccgtgccgctggcggccagcatcagcgcagtcagcctggaggtcgcccagccggggccctcaaacagaccccgcgccctcgaggtggaggagtgccgctgcccgccaggctacatcggtctgtcctgccaggactgtgcccccggctacacgcgcaccgggagtgggctctacctcggccactgcgagctatgtgaatgcaatggccactcagacctgtgccacccagagactggggcctgctcgcaatgccagcacaacgccgcaggggagttctgcgagctttgtgcccctggctactacggagatgccacagccgggacgcctgaggactgccagccctgtgcctgcccactgaccaacccagagaacatgttttcccgcacctgtgagagcctgggagccggcgggtaccgctgcacggcctgcgaacccggctacactggccagtactgtgagcagtgtggcccaggttacgtgggtaaccccagtgtgcaagggggccagtgcctgccagagacaaaccaagccccactggtggtcgaggtccatcctgctcgaagcatagtgccccaaggtggctcccactccctgcggtgtcaggtcagtgggagcccaccccactacttctattggtcccgtgaggatgggcggcctgtgcccagcggcacccagcagcgacatcaaggctccgagctccacttccccagcgtccagccctcggatgctggggtctacatttgcacctgccgtaatctccaccaatccaataccagccgggcagagctgctggtcactgaggctccaagcaagcccatcacagtgactgtggaggagcagcggagccagagcgtgcgccccggagctgacgtcaccttcatctgcacagccaaaagcaagtccccagcctataccctggtgtggacccgcctgcacaacgggaaactgcccacccgagccatggatttcaatggcatcctgaccattcgcaacgtccagctgagtgatgcaggcacctacgtgtgcaccggctccaacatgtttgccatggaccagggcacagccactctacatgtgcaggcctcgggcaccttgtccgcccccgtggtctccatccatccgccacagctcacagtgcagcccgggcaactggcggagttccgctgcagcgccacagggagccccacgcccaccctcgagtggacagggggccccggcggccagctccctgcgaaggcacaaatccacggcggcatcctgcgcctgccagctgtcgagcccacggatcaggcccagtacttgtgccgagcccacagcagcgctgggcagcaggtggccagggctgtgctccacgtgcatgggggcggtgggcccagagtccaagtgagcccagagaggacccaggtccacgcaggccgcaccgtcaggctgtactgcagggctgcaggcgtgcctagcgccaccatcacctggaggaaggaagggggcagcctcccaccacaggcccggtcagagcgcacagacatcgcgacactgctcatcccagccatcacgactgctgacgccggcttctacctctgcgtggccaccagccctgcaggcactgcccaggcccggatccaagtggttgtcctttcagcctcagatgccagcccaccgccggtcaagattgagtcctcatcgccttctgtgacagaagggcaaacactcgacctcaactgtgtggtggcagggtcagcccatgcccaggtcacctggtacaggcgagggggtagcctgcctccccacacccaggtgcacggctcccgtctgcggctcccccaggtctcaccagctgattctggagaatatgtgtgccgtgtggagaatggatcgggccccaaggaggcctccattactgtgtctgtgctccacggcacccattctggccccagctacaccccagtgcccggcagcacccggcccatccgcatcgagccctcctcctcacacgtggcggaagggcagaccctggatctgaactgcgtggtgcccgggcaggcccacgcccaggtcacgtggcacaagcgtgggggcagcctccctgcccggcaccagacccacggctcgctgctgcggctgcaccaggtgaccccggccgactcaggcgagtatgtgtgccatgtggtgggcacctccggccccctagaggcctcagtcctggtcaccatcgaagcctctgtcatccctggacccatcccacctgtcaggatcgagtcttcatcctccacagtggccgagggccagaccctggatctgagctgcgtggtggcagggcaggcccacgcccaggtcacatggtacaagcgtgggggcagcctccctgcccggcaccaggttcgtggctcccgcctgtacatcttccaggcctcacctgccgatgcgggacagtacgtctgccgggccagcaacggcatggaggcctccatcacggtcacagtaactgggacccagggggccaacttagcctaccctgccggcagcacccagcccatccgcatcgagccctcctcctcgcaagtggcggaagggcagaccctggatctgaactgcgtggtgcccgggcagtcccatgcccaggtcacgtggcacaagcgtgggggcagcctccctgtccggcaccagacccacggctccctgctgagactctaccaagcgtcccccgccgactcgggcgagtacgtgtgccgagtgttgggcagctccgtgcctctagaggcctctgtcctggtcaccattgagcctgcgggctcagtgcctgcacttggggtcacccccacggtccggatcgagtcatcgtcttcgcaagtggccgaggggcagaccctggacctgaactgcctcgttgctggtcaggcccatgcccaggtcacgtggcacaagcgcgggggcagcctcccggcccggcaccaggtgcatggctcgaggctacgcctgctccaggtgaccccagctgattcaggggagtacgtgtgccgtgtggtcggcagctcaggtacccaggaagcctcagtccttgtcaccatccagcagcgccttagtggctcccactcccagggtgtggcgtaccccgtccgcatcgagtcctcctcagcctccctggccaatggacacaccctggacctcaactgcctggttgccagccaggctccccacaccatcacctggtataagcgtggaggcagcttacccagccggcaccagatcgtgggctcccggctgcggatccctcaggtgactccggcagactcgggcgagtacgtgtgtcacgtcagtaacggtgcaggctcccgggagacctcgctcatcgtcaccatccagggcagcggttcctcccacgtgcccagcgtctccccaccgatcaggatcgagtcgtcttcccccacggtggtggaagggcagaccttggatctgaactgcgtggtcgccaggcagccccaggctatcatcacatggtacaagcgtgggggcagccttccctcccgacaccagacccatggctcccacctgcggttgcaccaaatgtctgtggctgactcgggcgagtatgtgtgccgggccaacaacaacatcgatgccctggaggcctccatcgtcatctccgtctcccctagcgccggcagcccctccgcccctggcagctccatgcccatcagaattgagtcatcctcctcacacgtggccgaaggggagaccctggatctgaactgcgtggtccccgggcaggcccatgcccaggtcacttggcacaagcgtgggggcagcctccccagtcaccatcagacccgcggctcacggctgcggctgcaccatgtgtccccggccgactcgggtgaatacgtgtgccgggtgatgggcagctctggccccctggaggcctcagtcctggtcaccatcgaagcctctggctcaagtgctgtccacgtccccgccccaggtggagccccacccatccgcatcgagccctcctcctcccgagtggcagaagggcagaccctggatctgaagtgcgtggtgcccgggcaggcccacgcccaggtcacgtggcacaagcgtggaggaaacctccctgcccggcaccaggtccacggcccactgctgaggctgaaccaggtgtccccggctgactctggcgagtactcgtgccaagtgaccggaagctcaggcaccctggaggcatctgtcctggtcacaattgagccctccagcccaggacccattcctgctccaggactggcccagcccatctacatcgaggcctcctcttcacacgtgactgaagggcagactctggatctgaactgtgtggtgcccgggcaggcccatgcccaggtcacgtggtacaagcgcgggggcagcctccccgcccggcaccagacccatggctcccagctgcggctccacctcgtctcccctgccgactcaggcgagtatgtgtgtcgtgcagccagcggcccaggccctgagcaagaagcctccttcacagtcaccgtcccgcccagtgaggggtcttcctaccgccttaggagcccggtcatctccatcgacccgcccagcagcaccgtgcagcagggccaggatgccagcttcaagtgcctcatccatgacggggcagcccccatcagcctcgagtggaagacccggaaccaggagctggaggacaacgtccacatcagtcccaatggctccatcatcaccatcgtgggcacccggcccagcaaccacggtacctaccgctgcgtggcctccaatgcctacggtgtggcccagagtgtggtgaacctcagtgtgcacgggccccctacagtgtccgtgctccccgagggccccgtgtgggtgaaagtgggaaaggctgtcaccctggagtgtgtcagtgccggggagccccgctcctctgctcgttggacccggatcagcagcacccctgccaagttggagcagcggacatatgggctcatggacagccacgcggtgctgcagatttcatcagctaaaccatcagatgcgggcacttatgtgtgccttgctcagaatgcactaggcacagcacagaagcaggtggaggtgatcgtggacacgggcgccatggccccaggggcccctcaggtccaagctgaagaagctgagctgactgtggaggctggacacacggccaccttgcgctgctcagccacaggcagccccgcgcccaccatccactggtccaagctgcgttccccactgccctggcagcaccggctggaaggtgacacactcatcataccccgggtagcccagcaggactcgggccagtacatctgcaatgccactagccctgctgggcacgctgaggccaccatcatcctgcacgtggagagcccaccatatgccaccacggtcccagagcacgcttcggtgcaggcaggggagacggtgcagctccagtgcctggctcacgggacacccccactcaccttccagtggagccgcgtgggcagcagccttcctgggagggcgaccgccaggaacgagctgctgcactttgagcgtgcagcccctgaggactcaggccgctaccgctgccgggtcaccaacaaggtgggctcagccgaggcctttgcccagctgctcgtccaaggccctcccggctctctccctgccacctccatcccagcagggtccacgcccaccgtgcaggtcacgcctcagctagagaccaagagcattggggccagcgttgagttccactgtgctgtgcccagcgaccggggtacccagctccgttggttcaaggaagggggtcagctgcctccgggtcacagcgtgcaggatggggtgctccgaatccagaacttggaccagagctgccaagggacgtatatatgccaggcccatggaccttgggggaaggcccaggccagtgcccagctggttatccaagccctgccctcggtgctcatcaacatccggacctctgtgcagaccgtggtggttggccacgccgtggagttcgaatgcctggcactgggtgaccccaagcctcaggtgacatggagcaaagttggagggcacctgcggccaggcattgtgcagagcggaggtgtcgtcaggatcgcccacgtagagctggctgatgcgggacagtatcgctgcactgccaccaacgcagctggcaccacacaatcccacgtcctgctgcttgtgcaagccttgccccagatctcaatgccccaagaagtccgtgtgcctgctggttctgcagctgtcttcccctgcatagcctcaggctaccccactcctgacatcagctggagcaagctggatggcagcctgccacctgacagccgcctggagaacaacatgctgatgctgccctcagtccgaccccaggacgcaggtacctacgtctgcaccgccactaaccgccagggcaaggtcaaagcctttgcccacctgcaggtgccagagcgggtggtgccctacttcacgcagaccccctactccttcctaccgctgcccaccatcaaggatgcctacaggaagttcgagatcaagatcaccttccggcccgactcagccgatgggatgctgctgtacaatgggcagaagcgagtcccagggagccccaccaacctggccaaccggcagcccgacttcatctccttcggcctcgtggggggaaggcccgagttccggttcgatgcaggctcaggcatggccaccatccgccatcccacaccactggccctgggccatttccacaccgtgaccctgctgcgcagcctcacccagggctccctgattgtgggtgacctggccccggtcaatgggacctcccagggcaagttccagggcctggatctgaacgaggaactctacctgggtggctatcctgactatggtgccatccccaaggcggggctgagcagcggcttcataggctgtgtccgggagctgcgcatccagggcgaggagatcgtcttccatgacctcaacctcacggcgcacggcatctcccactgccccacctgtcgggaccggccctgccagaatggcggtcagtgccatgactctgagagcagcagctacgtgtgcgtctgcccagctggcttcaccgggagccgctgtgagcactcgcaggccctgcactgccatccagaggcctgtgggcccgacgccacctgtgtgaaccggcctgacggtcgaggctacacctgccgctgccacctgggccgctcggggttgcggtgtgaggaaggtgtgacagtgaccaccccctcgctgtcgggtgctggctcctacctggcactgcccgccctcaccaacacacaccacgagctacgcctggacgtggagttcaagccactcgcccctgacggggtcctgctgttcagcggggggaagagcgggcctgtggaggacttcgtgtccctggcgatggtgggcggccacctggagttccgctatgagttggggtcagggctggccgttctgcggagcgccgagccgctggccctgggccgctggcaccgtgtgtctgcagagcgtctcaacaaggacggcagcctgcgggtgaatggtggacgccctgtgctgcgctcctcgcccggcaagagccagggcctcaacctgcacaccctgctctacctggggggtgtggagccttccgtgccactgtccccggccaccaacatgagcgctcacttccgcggctgtgtgggcgaggtgtcagtgaatggcaaacggctggacctcacctacagtttcctaggcagccagggcatcgggcaatgctatgatagctccccatgtgagcgccagccttgccaacatggtgccacgtgcatgcccgctggcgagtatgagttccagtgcctgtgtcgagatggattcaaaggagacctgtgtgagcacgaggagaacccctgccagctccgtgaaccctgtctgcatgggggcacctgccagggcacccgctgcctctgcctccctggcttctctggcccacgctgccaacaaggctctggacatggcatagcagagtccgactggcatcttgaaggcagcgggggcaatgatgcccctgggcagtacggagcctatttccacgatgatggcttcctcgccttccctggccatgtcttctccaggagcctgcccgaggtgcccgagaccatcgagctggaggttcggaccagcacagccagtggcctcctgctctggcagggtgtggaggtgggagaggccggccaaggcaaggacttcatcagcctcgggcttcaagacgggcaccttgtcttcaggtaccagctgggtagtggggaggcccgcctggtctctgaggaccccatcaatgacggcgagtggcaccgggtgacagcactgcgggagggccgcagaggttccatccaagtcgacggtgaggagctggtcagcggccggtccccaggtcccaacgtggcagtcaacgccaagggcagcgtctacatcggcggagcccctgacgtggccacgctgaccgggggcagattctcctcaggcatcacaggctgtgtcaagaacctggtgctgcactcggcccgacccggcgccccgcccccacagcccctggacctgcagcaccgcgcccaggccggggccaacacacgcccctgcccctcgtaggcacctgcctgccccacacggactcccgggccacgccccagcccgacaatgtcgagtatattattattaatattattatgaatttttgtaagaaaccgaggcgatgccacgctttgctgctaccgccctgggctggactggaggtgggcatgccaccctcacacacacagctgggcaaagccacaaggctggccagcaaggcaggttggatgggagtgggcacctcagaaagtcaccaggacttggggtcaggaacagtggctgggtgggcccagaactgcccccactgtccccctacccaccgatggagcccccagatagagctgggtggcctgtttctgcagcccttgggcagttctcactcctaggagagccaacctcggcttgtgggctggtgccccacagctacctgagacgggcatcgcaggagtctctgccacccactcaggattgggaattgtctttagtgccggctgtggagcaaaaggcagctcacccctgggacgcctggcctctgtgtcctagaagggaccctcctgtggtctttgtcttgatttttcttaataaacggtgctatccccgcca

SEQ ID NO: 1309 - DNA, 14194 bp, Homo sapiens
cgtttgcttacaggtgacccatgggctgagggcatacgatggcttgtctctgcctgaggacatagagaccgtcacagcaagccaaatgcgctggacacattcgtacctttctgatgatgaggacatgctggctgacagcatctcaggagacgacctgggcagtggggacctgggcagcggggacttccagatggtttatttccgagccctggtgaatttcactcgctccatcgagtacagccctcagctggaggatgcaggctccagagagtttcgagaggtgtccgaggctgtggtagacacgctggagtcggagtacttgaaaattcccggagaccaggttgtcagtgtggtgttcatcaaggagctggatggctgggtttttgtggagctggatgtgggctcggaagggaatgcggatggggctcagattcaggagatgctgctcagggtcatctccagcggctctgtggcctcctacgtcacctctccccagggattccagttccgacgcctgggcacagtgccccagttcccaagagcctgcacggaggccgagtttgcctgccacagctacaatgagtgtgtggccctggagtatcgctgtgaccggcggcccgactgcagggacatgtctgatgagctcaattgtgaggagccagtcctgggtatcagccccacattctctctcctcgtggagacgacatctttaccgccccggccagagacaaccatcatgcgacagccaccagtcacccacgctcctcagcccctgcttcccggttccgtcaggcccctgccctgtgggccccaggaggccgcatgccgcaatgggcactgcatccccagagactacctctgcgacggacaggaggactgcgaggacggcagcgatgagctagactgtggccccccgccaccctgtgagcccaacgagttcccctgcgggaatggacattgtgccctcaagctgtggcgctgcgatggtgactttgactgtgaggaccgaactgatgaagccaactgccccaccaagcgtcctgaggaagtgtgcgggcccacacagttccgatgcgtctctaccaacatgtgcatcccagccagcttccactgtgacgaggagagcgactgtcctgaccggagcgacgagtttggctgcatgcccccccaggtggtgacacctccccgggagtccatccaggcttcccggggccagacagtgaccttcacctgcgtggccattggcgtccccacccccatcatcaattggaggctcaactggggccacatcccctctcatcccagggtgacagtgaccagcgagggtggccgtggcacactgatcatccgtgatgtgaaggagtcagaccagggtgcctacacctgtgaggccatgaacgcccggggcatggtgtttggcattcctgacggtgtccttgagctcgtcccacaacgagcaggcccctgccctgacggccacttctacctggagcacagcgccgcctgcctgccctgcttctgctttggcatcaccagcgtgtgccagagcacccgccgcttccgggaccagatcaggctgcgctttgaccaacccgatgacttcaagggtgtgaatgtgacaatgcctgcgcagcccggcacgccacccctctcctccacgcagctgcagatcgacccatccctgcacgagttccagctagtcgacctgtcccgccgcttcctcgtccacgactccttctgggctctgcctgaacagttcctgggcaacaaggtggactcctatggcggctccctgcgttacaacgtgcgctacgagttggcccgtggcatgctggagccagtgcagcggccggacgtggtcctcgtgggtgccgggtaccgcctcctctcccgaggccacacacccacccaacctggtgctctgaaccagcgccaggtccagttctctgaggagcactgggtccatgagtctggccggccggtgcagcgcgcggagctgctgcaggtgctgcagagcctggaggccgtgctcatccagaccgtgtacaacaccaagatggctagcgtgggacttagcgacatcgccatggataccaccgtcacccatgccaccagccatggccgtgcccacagtgtggaggagtgcagatgccccattggctattctggcttgtcctgcgagagctgtgatgcccacttcactcgggtgcctggtgggccctacctgggcacctgctctggttgcagttgcaatggccatgccagctcctgtgaccctgtgtatggccactgcctgaattgccagcacaacacggaggggccacagtgcaacaagtgcaaggctggcttctttggggacgccatgaaggccacggccacttcctgccggccctgcccttgcccatacatcgatgcctcccgcagattctcagacacttgcttcctggacacggatggccaagccacatgtgacgcctgtgccccaggctacactggccgccgctgtgagagctgtgcccccggatacgagggcaaccccatccagcccggcgggaagtgcaggcccgtcaaccaggagattgtgcgctgtgacgagcgtggcagcatggggacctccggggaggcctgccgctgtaagaacaatgtggtggggcgcttgtgcaatgaatgtgctgacggctctttccacctgagtacccgaaaccccgatggctgcctcaagtgcttctgcatgggtgtcagtcgccactgcaccagctcttcatggagccgtgcccagttgcatggggcctctgaggagcctggtcacttcagcctgaccaacgccgcaagcacccacaccaccaacgagggcatcttctcccccacgcccggggaactgggattctcctccttccacagactcttatctggaccctacttctggagcctcccttcacgcttcctgggggacaaggtgacctcctatggaggagagctgcgcttcacagtgacccagaggtcccagccgggctccacacccctgcacgggcagccgttggtggtgctgcaaggtaacaacatcatcctagagcaccatgtggcccaggagcccagccccggccagcccagcaccttcattgtgcctttccgggagcaagcatggcagcggcccgatgggcagccagccacacgggagcacctgctgatggcactggcaggcatcgacaccctcctgatccgagcatcctacgcccagcagcccgctgagagcagggtctctggcatcagcatggacgtggctgtgcccgaggaaaccggccaggaccccgcgctggaagtggaacagtgctcctgcccacccgggtaccgtgggccgtcctgccaggactgtgacacaggctacacacgcacgcccagtggcctctacctgggtacctgtgaacgctgcagctgccatggccactcagaggcctgcgagccagaaacaggtgcctgccagggctgccagcatcacacggagggccctcggtgtgagcagtgccagccaggatactacggggacgcccagcgggggacaccacaggactgccagctgtgcccctgctacggagaccctgctgccggccaggctgcccacacttgttttctggacacagacggccaccccacctgtgatgcgtgctccccaggccacagtgggcgtcactgtgagaggtgcgcccctggctactatggcaaccccagccagggccagccatgccagagagacagccaggtgccagggcccataggctgcaactgtgacccccaaggcagcgtcagcagccagtgtgatgctgctggtcagtgccagtgcaaggcccaggtggaaggcctcacttgcagccactgccggccccaccacttccacctgagtgccagcaacccagacggctgcctgccctgcttctgtatgggcatcacccagcagtgcgccagctctgcctacacacgccacctgatctccacccactttgcccctggggacttccaaggctttgccctggtgaacccacagcgaaacagccgcctgacaggagaattcactgtggaacccgtgcccgagggtgcccagctctcttttggcaactttgcccaactcggccatgagtccttctactggcagctgccggagacataccagggagacaaggtggcggcctacggtgggaagttgcgatacaccctctcctacacagcaggcccacagggcagcccactctctgaccccgatgtgcagatcacgggcaacaacatcatgctagtggcctcccagccagcgctgcagggccctgagaggaggagctacgagatcatgttccgagaggaattctggcgccggcccgatgggcagccggccacacgcgagcacctcctgatggcactggccgacctggatgagctcctgatccgggccacgttctcctccgtgccgctggcggccagcatcagcgcagtcagcctggaggtcgcccagccggggccctcaaacagaccccgcgccctcgaggtggaggagtgccgctgcccgccaggctacatcggtctgtcctgccaggactgtgcccccggctacacgcgcaccgggagtgggctctacctcggccactgcgagctatgtgaatgcaatggccactcagacctgtgccacccagagactggggcctgctcgcaatgccagcacaacgccgcaggggagttctgcgagctttgtgcccctggctactacggagatgccacagccgggacgcctgaggactgccagccctgtgcctgcccactgaccaacccagagaacatgttttcccgcacctgtgagagcctgggagccggcgggtaccgctgcacggcctgcgaacccggctacactggccagtactgtgagcagtgtggcccaggttacgtgggtaaccccagtgtgcaagggggccagtgcctgccagagacaaaccaagccccactggtggtcgaggtccatcctgctcgaagcatagtgccccaaggtggctcccactccctgcggtgtcaggtcagtgggagcccaccccactacttctattggtcccgtgaggatgggcggcctgtgcccagcggcacccagcagcgacatcaaggctccgagctccacttccccagcgtccagccctcggatgctggggtctacatttgcacctgccgtaatctccaccaatccaataccagccgggcagagctgctggtcactgaggctccaagcaagcccatcacagtgactgtggaggagcagcggagccagagcgtgcgccccggagctgacgtcaccttcatctgcacagccaaaagcaagtccccagcctataccctggtgtggacccgcctgcacaacgggaaactgcccacccgagccatggatttcaatggcatcctgaccattcgcaacgtccagctgagtgatgcaggcacctacgtgtgcaccggctccaacatgtttgccatggaccagggcacagccactctacatgtgcaggcctcgggcaccttgtccgcccccgtggtctccatccatccgccacagctcacagtgcagcccgggcaactggcggagttccgctgcagcgccacagggagccccacgcccaccctcgagtggacagggggccccggcggccagctccctgcgaaggcacaaatccacggcggcatcctgcgcctgccagctgtcgagcccacggatcaggcccagtacttgtgccgagcccacagcagcgctgggcagcaggtggccagggctgtgctccacgtgcatgggggcggtgggcccagagtccaagtgagcccagagaggacccaggtccacgcaggccgcaccgtcaggctgtactgcagggctgcaggcgtgcctagcgccaccatcacctggaggaaggaagggggcagcctcccaccacaggcccggtcagagcgcacagacatcgcgacactgctcatcccagccatcacgactgctgacgccggcttctacctctgcgtggccaccagccctgcaggcactgcccaggcccggatccaagtggttgtcctttcagcctcagatgccagcccaccgccggtcaagattgagtcctcatcgccttctgtgacagaagggcaaacactcgacctcaactgtgtggtggcagggtcagcccatgcccaggtcacctggtacaggcgagggggtagcctgcctccccacacccaggtgcacggctcccgtctgcggctcccccaggtctcaccagctgattctggagaatatgtgtgccgtgtggagaatggatcgggccccaaggaggcctccattactgtgtctgtgctccacggcacccattctggccccagctacaccccagtgcccggcagcacccggcccatccgcatcgagccctcctcctcacacgtggcggaagggcagaccctggatctgaactgcgtggtgcccgggcaggcccacgcccaggtcacgtggcacaagcgtgggggcagcctccctgcccggcaccagacccacggctcgctgctgcggctgcaccaggtgaccccggccgactcaggcgagtatgtgtgccatgtggtgggcacctccggccccctagaggcctcagtcctggtcaccatcgaagcctctgtcatccctggacccatcccacctgtcaggatcgagtcttcatcctccacagtggccgagggccagaccctggatctgagctgcgtggtggcagggcaggcccacgcccaggtcacatggtacaagcgtgggggcagcctccctgcccggcaccaggttcgtggctcccgcctgtacatcttccaggcctcacctgccgatgcgggacagtacgtctgccgggccagcaacggcatggaggcctccatcacggtcacagtaactgggacccagggggccaacttagcctaccctgccggcagcacccagcccatccgcatcgagccctcctcctcgcaagtggcggaagggcagaccctggatctgaactgcgtggtgcccgggcagtcccatgcccaggtcacgtggcacaagcgtgggggcagcctccctgtccggcaccagacccacggctccctgctgagactctaccaagcgtcccccgccgactcgggcgagtacgtgtgccgagtgttgggcagctccgtgcctctagaggcctctgtcctggtcaccattgagcctgcgggctcagtgcctgcacttggggtcacccccacggtccggatcgagtcatcgtcttcgcaagtggccgaggggcagaccctggacctgaactgcctcgttgctggtcaggcccatgcccaggtcacgtggcacaagcgcgggggcagcctcccggcccggcaccaggtgcatggctcgaggctacgcctgctccaggtgaccccagctgattcaggggagtacgtgtgccgtgtggtcggcagctcaggtacccaggaagcctcagtccttgtcaccatccagcagcgccttagtggctcccactcccagggtgtggcgtaccccgtccgcatcgagtcctcctcagcctccctggccaatggacacaccctggacctcaactgcctggttgccagccaggctccccacaccatcacctggtataagcgtggaggcagcttacccagccggcaccagatcgtgggctcccggctgcggatccctcaggtgactccggcagactcgggcgagtacgtgtgtcacgtcagtaacggtgcaggctcccgggagacctcgctcatcgtcaccatccagggcagcggttcctcccacgtgcccagcgtctccccaccgatcaggatcgagtcgtcttcccccacggtggtggaagggcagaccttggatctgaactgcgtggtcgccaggcagccccaggctatcatcacatggtacaagcgtgggggcagccttccctcccgacaccagacccatggctcccacctgcggttgcaccaaatgtctgtggctgactcgggcgagtatgtgtgccgggccaacaacaacatcgatgccctggaggcctccatcgtcatctccgtctcccctagcgccggcagcccctccgcccctggcagctccatgcccatcagaattgagtcatcctcctcacacgtggccgaaggggagaccctggatctgaactgcgtggtccccgggcaggcccatgcccaggtcacttggcacaagcgtgggggcagcctccccagtcaccatcagacccgcggctcacggctgcggctgcaccatgtgtccccggccgactcgggtgaatacgtgtgccgggtgatgggcagctctggccccctggaggcctcagtcctggtcaccatcgaagcctctggctcaagtgctgtccacgtccccgccccaggtggagccccacccatccgcatcgagccctcctcctcccgagtggcagaagggcagaccctggatctgaagtgcgtggtgcccgggcaggcccacgcccaggtcacgtggcacaagcgtggaggaaacctccctgcccggcaccaggtccacggcccactgctgaggctgaaccaggtgtccccggctgactctggcgagtactcgtgccaagtgaccggaagctcaggcaccctggaggcatctgtcctggtcacaattgagccctccagcccaggacccattcctgctccaggactggcccagcccatctacatcgaggcctcctcttcacacgtgactgaagggcagactctggatctgaactgtgtggtgcccgggcaggcccatgcccaggtcacgtggtacaagcgcgggggcagcctccccgcccggcaccagacccatggctcccagctgcggctccacctcgtctcccctgccgactcaggcgagtatgtgtgtcgtgcagccagcggcccaggccctgagcaagaagcctccttcacagtcaccgtcccgcccagtgaggggtcttcctaccgccttaggagcccggtcatctccatcgacccgcccagcagcaccgtgcagcagggccaggatgccagcttcaagtgcctcatccatgacggggcagcccccatcagcctcgagtggaagacccggaaccaggagctggaggacaacgtccacatcagtcccaatggctccatcatcaccatcgtgggcacccggcccagcaaccacggtacctaccgctgcgtggcctccaatgcctacggtgtggcccagagtgtggtgaacctcagtgtgcacgggccccctacagtgtccgtgctccccgagggccccgtgtgggtgaaagtgggaaaggctgtcaccctggagtgtgtcagtgccggggagccccgctcctctgctcgttggacccggatcagcagcacccctgccaagttggagcagcggacatatgggctcatggacagccacgcggtgctgcagatttcatcagctaaaccatcagatgcgggcacttatgtgtgccttgctcagaatgcactaggcacagcacagaagcaggtggaggtgatcgtggacacgggcgccatggccccaggggcccctcaggtccaagctgaagaagctgagctgactgtggaggctggacacacggccaccttgcgctgctcagccacaggcagccccgcgcccaccatccactggtccaagctgcgttccccactgccctggcagcaccggctggaaggtgacacactcatcataccccgggtagcccagcaggactcgggccagtacatctgcaatgccactagccctgctgggcacgctgaggccaccatcatcctgcacgtggagagcccaccatatgccaccacggtcccagagcacgcttcggtgcaggcaggggagacggtgcagctccagtgcctggctcacgggacacccccactcaccttccagtggagccgcgtgggcagcagccttcctgggagggcgaccgccaggaacgagctgctgcactttgagcgtgcagcccctgaggactcaggccgctaccgctgccgggtcaccaacaaggtgggctcagccgaggcctttgcccagctgctcgtccaaggccctcccggctctctccctgccacctccatcccagcagggtccacgcccaccgtgcaggtcacgcctcagctagagaccaagagcattggggccagcgttgagttccactgtgctgtgcccagcgaccggggtacccagctccgttggttcaaggaagggggtcagctgcctccgggtcacagcgtgcaggatggggtgctccgaatccagaacttggaccagagctgccaagggacgtatatatgccaggcccatggaccttgggggaaggcccaggccagtgcccagctggttatccaagccctgccctcggtgctcatcaacatccggacctctgtgcagaccgtggtggttggccacgccgtggagttcgaatgcctggcactgggtgaccccaagcctcaggtgacatggagcaaagttggagggcacctgcggccaggcattgtgcagagcggaggtgtcgtcaggatcgcccacgtagagctggctgatgcgggacagtatcgctgcactgccaccaacgcagctggcaccacacaatcccacgtcctgctgcttgtgcaagccttgccccagatctcaatgccccaagaagtccgtgtgcctgctggttctgcagctgtcttcccctgcatagcctcaggctaccccactcctgacatcagctggagcaagctggatggcagcctgccacctgacagccgcctggagaacaacatgctgatgctgccctcagtccgaccccaggacgcaggtacctacgtctgcaccgccactaaccgccagggcaaggtcaaagcctttgcccacctgcaggtgccagagcgggtggtgccctacttcacgcagaccccctactccttcctaccgctgcccaccatcaaggatgcctacaggaagttcgagatcaagatcaccttccggcccgactcagccgatgggatgctgctgtacaatgggcagaagcgagtcccagggagccccaccaacctggccaaccggcagcccgacttcatctccttcggcctcgtggggggaaggcccgagttccggttcgatgcaggctcaggcatggccaccatccgccatcccacaccactggccctgggccatttccacaccgtgaccctgctgcgcagcctcacccagggctccctgattgtgggtgacctggccccggtcaatgggacctcccagggcaagttccagggcctggatctgaacgaggaactctacctgggtggctatcctgactatggtgccatccccaaggcggggctgagcagcggcttcataggctgtgtccgggagctgcgcatccagggcgaggagatcgtcttccatgacctcaacctcacggcgcacggcatctcccactgccccacctgtcgggaccggccctgccagaatggcggtcagtgccatgactctgagagcagcagctacgtgtgcgtctgcccagctggcttcaccgggagccgctgtgagcactcgcaggccctgcactgccatccagaggcctgtgggcccgacgccacctgtgtgaaccggcctgacggtcgaggctacacctgccgctgccacctgggccgctcggggttgcggtgtgaggaaggtgtgacagtgaccaccccctcgctgtcgggtgctggctcctacctggcactgcccgccctcaccaacacacaccacgagctacgcctggacgtggagttcaagccactcgcccctgacggggtcctgctgttcagcggggggaagagcgggcctgtggaggacttcgtgtccctggcgatggtgggcggccacctggagttccgctatgagttggggtcagggctggccgttctgcggagcgccgagccgctggccctgggccgctggcaccgtgtgtctgcagagcgtctcaacaaggacggcagcctgcgggtgaatggtggacgccctgtgctgcgctcctcgcccggcaagagccagggcctcaacctgcacaccctgctctacctggggggtgtggagccttccgtgccactgtccccggccaccaacatgagcgctcacttccgcggctgtgtgggcgaggtgtcagtgaatggcaaacggctggacctcacctacagtttcctaggcagccagggcatcgggcaatgctatgatagctccccatgtgagcgccagccttgccaacatggtgccacgtgcatgcccgctggcgagtatgagttccagtgcctgtgtcgagatggattcaaaggagacctgtgtgagcacgaggagaacccctgccagctccgtgaaccctgtctgcatgggggcacctgccagggcacccgctgcctctgcctccctggcttctctggcccacgctgccaacaaggctctggacatggcatagcagagtccgactggcatcttgaaggcagcgggggcaatgatgcccctgggcagtacggagcctatttccacgatgatggcttcctcgccttccctggccatgtcttctccaggagcctgcccgaggtgcccgagaccatcgagctggaggttcggaccagcacagccagtggcctcctgctctggcagggtgtggaggtgggagaggccggccaaggcaaggacttcatcagcctcgggcttcaagacgggcaccttgtcttcaggtaccagctgggtagtggggaggcccgcctggtctctgaggaccccatcaatgacggcgagtggcaccgggtgacagcactgcgggagggccgcagaggttccatccaagtcgacggtgaggagctggtcagcggccggtccccaggtcccaacgtggcagtcaacgccaagggcagcgtctacatcggcggagcccctgacgtggccacgctgaccgggggcagattctcctcaggcatcacaggctgtgtcaagaacctggtgctgcactcggcccgacccggcgccccgcccccacagcccctggacctgcagcaccgcgcccaggccggggccaacacacgcccctgcccctcgtaggcacctgcctgccccacacggactcccgggccacgccccagcccgacaatgtcgagtatattattattaatattattatgaatttttgtaagaaaccgaggcgatgccacgctttgctgctaccgccctgggctggactggaggtgggcatgccaccctcacacacacagctgggcaaagccacaaggctggccagcaaggcaggttggatgggagtgggcacctcagaaagtcaccaggacttggggtcaggaacagtggctgggtgggcccagaactgcccccactgtccccctacccaccgatggagcccccagatagagctgggtggcctgtttctgcagcccttgggcagttctcactcctaggagagccaacctcggcttgtgggctggtgccccacagctacctgagacgggcatcgcaggagtctctgccacccactcaggattgggaattgtctttagtgccggctgtggagcaaaaggcagctcacccctgggcaggcggtccccatccccaccagctcgtttttcagcacccccacccacctccacccagcccctggcacctcctctggcagactccccctcctaccacgtcctcctggcctgcattcccaccccctcctgccagcacacagcctggggtccctccctcaggggctgtaagggaaggcccaccccaactcttaccaggagctgctacaggcagagcccagcactgatagggccccgcccaccgggccccgcccaccccaggccacatccccacccatctggaagtgaaggcccagggactcctccaacagacaacggacggacggatgccgctggtgctcaggaagagctagtgccttaggtgggggaaggcaggactcacgactgagagagagaggagggggatatgaccaccctgccccatctgcaggagcctgaagatccagctcaagtgccatcctgccagtggcccccagactgtggggttgggacgcctggcctctgtgtcctagaagggaccctcctgtggtctttgtcttgatttttcttaataaacggtgctatc

SEQ ID NO: 1310 - DNA, 13711 bp, Homo sapiens; identical to SEQ ID NO: 1308

SEQ ID NO: 1311 - DNA, 13711 bp, Homo sapiens; identical to SEQ ID NO: 1308

SEQ ID NO: 1312 - DNA, 1369 bp, Homo sapiens
ggaggtgtgaggatccgaacccaggggtggggggtggaggcggctcctgcgatcgaaggggacttgagactcaccggccgcacgccatgagggccctgtgggtgctgggcctctgctgcgtcctgctgaccttcgggtcggtcagagctgacgatgaagttgatgtggatggtacagtagaagaggatctgggtaaaagtagagaaggatcaaggacggatgatgaagtagtacagagagaggaagaagctattcagttggatggattaaatgcatcacaaataagagaacttagagagaagtcggaaaagtttgccttccaagccgaagttaacagaatgatgaaacttatcatcaattcattgtataaaaataaagagattttcctgagagaactgatttcaaatgcttctgatgctttagataagataaggctaatatcactgactgatgaaaatgctctttctggaaatgaggaactaacagtcaaaattaagtgtgataaggagaagaacctgctgcatgtcacagacaccggtgtaggaatgaccagagaagagttggttaaaaaccttggtaccatagccaaatctgggacaagcgagtttttaaacaaaatgactgaagcacaggaagatggccagtcaacttctgaattgattggccagtttggtgtcggtttctattccgccttccttgtagcagataaggttattgtcacttcaaaacacaacaacgatacccagcacatctgggagtctgactccaatgaattttctgtaattgctgacccaagaggaaacactctaggacggggaacgacaattacccttgtcttaaaagaagaagcatctgattaccttgaattggatacaattaaaaatctcgtcaaaaaatattcacagttcataaactttcctatttatgtatggagcagcaagactgaaactgttgaggagcccatggaggaagaagaagcagccaaagaagagaaagaagaatctgatgatgaagctgcacaagacgaagatgaagaaatggatgtgggaacagatgaagaagaagaaacagcaaaggaatctacagctgaaaaagatgaattgtaaattatactctcaccatttggatcctgtgtggagagggaatgtgaaatttacatcatttctttttgggagagacttgttttggatgccccctaatccccttctcccctgcactgtaaaatgtgggattatgggtcacaggaaaaagtgggttttttagttgaattttttttaacattcctcatgaatgtaaatttgtactatttaactgactattcttgatgtaaaatcttgtcatgtgtataaaaataaaaaagatcccaaat

SEQ ID NO: 1313 - DNA, 2632 bp, Homo sapiens
acaaacaatgcttgttccctgtcctctggccctttgcaaataaatgccttaccagacctgccctgccaccccactcgcagccacccagcaagagcagcatgtcagcctgctggagctttgcagttgcaatctgcattttagaaataagcatcctcacagcacagtacacgaccagttatgacccagagctaacagaaagcagtggctctgcatcacacatagactgcagaatgagcccctggagtgaatggtcacaatgcgatccttgtctcagacaaatgtttcgttcaagaagcattgaggtctttggacaatttaatgggaaaagatgcaccgacgctgtgggagacagacgacagtgtgtgcccacagagccctgtgaggatgctgaggatgactgcggaaatgactttcaatgcagtacaggcagatgcataaagatgcgacttcggtgtaatggtgacaatgactgcggagacttttcagatgaggatgattgtgaaagtgagccccgtcccccctgcagagacagagtggtagaagagtctgagctggcacgaacagcaggctatgggatcaacattttagggatggatcccctaagcacaccttttgacaatgagttctacaatggactctgtaaccgggatcgggatggaaacactctgacatactaccgaagaccttggaacgtggcttctttgatctatgaaaccaaaggcgagaaaaatttcagaaccgaacattacgaagaacaaattgaagcatttaaaagtatcatccaagagaagacatcaaattttaatgcagctatatctctaaaatttacacccactgaaacaaataaagctgaacaatgttgtgaggaaacagcctcctcaatttctttacatggcaagggtagttttcggttttcatattccaaaaatgaaacttaccaactatttttgtcatattcttcaaagaaggaaaaaatgtttctgcatgtgaaaggagaaattcatctgggaagatttgtaatgagaaatcgcgatgttgtgctcacaacaacttttgtggatgatataaaagctttgccaactacctatgaaaagggagaatattttgcctttttggaaacctatggaactcactacagtagctctgggtctctaggaggactctatgaactaatatatgttttggataaagcttccatgaagcggaaaggtgttgaactaaaagacataaagagatgccttgggtatcatctggatgtatctctggctttctctgaaatctctgttggagctgaatttaataaagatgattgtgtaaagaggggagagggtagagctgtaaacatcaccagtgaaaacctcatagatgatgttgtttcactcataagaggtggaaccagaaaatatgcatttgaactgaaagaaaagcttctccgaggaaccgtgattgatgtgactgactttgtcaactgggcctcttccataaatgatgctcctgttctcattagtcaaaaactgtctcctatatataatctggttccagtgaaaatgaaaaatgcacacctaaagaaacaaaacttggaaagagccattgaagactatatcaatgaatttagtgtaagaaaatgccacacatgccaaaatggaggtacagtgattctaatggatggaaagtgtttgtgtgcctgcccattcaaatttgagggaattgcctgtgaaatcagtaaacaaaaaatttctgaaggattgccagccctagagttccccaatgaaaaatagagctgttggcttctctgagctccagtggaagaagaaaacactagtaccttcagatcctacccctgaagataatcttagctgccaagtaaatagcaacatgcttcatgaaaatcctaccaacctctgaagtctcttctctcttaggtctataattttttttttaatttttcttccttaaactcctgtgatgtttccattttttgttccctaatgagaagtcaacagtgaaatacgccagaactgctttatcccacggaaaatgccaatctcttctaaaaaaaaacaaaattaaattaaaaacagaatgttggtccatgaccacacgtctgtaccatgcaatttaactcttatttacattgttatgtttagtttggttatttgcttaggtgtgcatacattcattcagcaaatgctgagcaccagccacgtgcacagcagttgcttttactagtcttagctctacgatttaaatccatgtgtccaagggggaaaacatattatatttgtaaccaaaaactactagtttaccagaggactgaagggagataaagaggagttggttaatgggtacaaaaatccagttagatgaaaggaataatatagatagtgttcagtagcagaatagaatgaacataaactattagtttaaattatgtgaaattccttctatttgatcatattttacaagaaaaaacatcaattttatatagtccaacttaatacctagccttatgagttgtataaggtaaggttacctacctgagaagctgattaacattggttgtacaatcttattcattagagaacatggtgcttagggtctgagaccttttgaaaggtctgagaactcttta

SEQ ID NO: 1314 - DNA, 2119 bp, Homo sapiens
acaaacaatgcttgttccctgtcctctggccctttgcaaataaatgccttaccagacctgccctgccaccccactcgcagccacccagcaagagcagcatgtcagcctgctggagctttgcagttgcaatctgcattttagaaataagcatcctcacagcacagtacacgaccagttatgacccagagctaacagaaagcagtggctctgcatcacacatagactgcagaatgagcccctggagtgaatggtcacaatgcgatccttgtctcagacaaatgtttcgttcaagaagcattgaggtctttggacaatttaatgggaaaagatgcaccgacgctgtgggagacagacgacagtgtgtgcccacagagccctgtgaggatgctgaggatgactgcggaaatgactttcaatgcagtacaggcagatgcataaagatgcgacttcggtgtaatggtgacaatgactgcggagacttttcagatgaggatgattgtgaaagtgagccccgtcccccctgcagagacagagtggtagaagagtctgagctggcacgaacagcaggctatgggatcaacattttagggatggatcccctaagcacaccttttgacaatgagttctacaatggactctgtaaccgggatcgggatggaaacactctgacatactaccgaagaccttggaacgtggcttctttgatctatgaaaccaaaggcgagaaaaatttcagaaccgaacattacgaagaacaaattgaagcatttaaaagtatcatccaagagaagacatcaaattttaatgcagctatatctctaaaatttacacccactgaaacaaataaagctgaacaatgttgtgaggaaacagcctcctcaatttctttacatggcaagggtagttttcggttttcatattccaaaaatgaaacttaccaactatttttgtcatattcttcaaagaaggaaaaaatgtttctgcatgtgaaaggagaaattcatctgggaagatttgtaatgagaaatcgcgatgttgtgctcacaacaacttttgtggatgatataaaagctttgccaactacctatgaaaagggagaatattttgcctttttggaaacctatggaactcactacagtagctctgggtctctaggaggactctatgaactaatatatgttttggataaagcttccatgaagcggaaaggtgttgaactaaaagacataaagagatgccttgggtatcatctggatgtatctctggctttctctgaaatctctgttggagctgaatttaataaagatgattgtgtaaagaggggagagggtagagctgtaaacatcaccagtgaaaacctcatagatgatgttgtttcactcataagaggtggaaccagaaaatatgcatttgaactgaaagaaaagcttctccgaggaaccgtgattgatgtgactgactttgtcaactgggcctcttccataaatgatgctcctgttctcattagtcaaaaactgtctcctatatataatctggttccagtgaaaatgaaaaatgcacacctaaagaaacaaaacttggaaagagccattgaagactatatcaatgaatttagtgtaagaaaatgccacacatgccaaaatggaggtacagtgattctaatggatggaaagtgtttgtgtgcctgcccattcaaatttgagggaattgcctgtgaaatcagtaaacaaaaaatttctgaaggtgaggacaatttatttgatgtgattaaagacaaaaatatgcactttggggttatctaatttgaaaactagctcttgaattaatttgtactaaatctctagattatttatataaacagaagataaagattgagtgaatagtgaaaatgggtaaatcagcctttatgtgtcattctgacatattctacttgtatatattaagatagaattataaataaataaattataattattgtattactctttataaaaatattcttatagaaggtttacagaaatacaacaaacatcaggtattcactatatagaattgatgaatgttaatacatatatatcatatacactttgcatatatatgtgtttatgtgtatagacgt

SEQ ID NO: 1315 - DNA, 2632 bp, Homo sapiens; identical to SEQ ID NO: 1313

SEQ ID NO: 1316 - DNA, 2585 bp, Homo sapiens
acagaaggaggaaggacagcagggccaacagtcacagcagccctgaccagagcattcctggagctcaagctcctctacaaagaggtggacagagaagacagcagagaccatgggacccccctcagcccctccctgcagattgcatgtcccctggaaggaggtcctgctcacagcctcacttctaaccttctggaacccacccaccactgccaagctcactattgaatccacgccattcaatgtcgcagaggggaaggaggttcttctactcgcccacaacctgccccagaatcgtattggttacagctggtacaaaggcgaaagagtggatggcaacagtctaattgtaggatatgtaataggaactcaacaagctaccccagggcccgcatacagtggtcgagagacaatataccccaatgcatccctgctgatccagaacgtcacccagaatgacacaggattctataccctacaagtcataaagtcagatcttgtgaatgaagaagcaaccggacagttccatgtatacccggagctgcccaagccctccatctccagcaacaactccaaccccgtggaggacaaggatgctgtggccttcacctgtgaacctgaggttcagaacacaacctacctgtggtgggtaaatggtcagagcctcccggtcagtcccaggctgcagctgtccaatggcaacatgaccctcactctactcagcgtcaaaaggaacgatgcaggatcctatgaatgtgaaatacagaacccagcgagtgccaaccgcagtgacccagtcaccctgaatgtcctctatggcccagatggccccaccatttccccctcaaaggccaattaccgtccaggggaaaatctgaacctctcctgccacgcagcctctaacccacctgcacagtactcttggtttatcaatgggacgttccagcaatccacacaagagctctttatccccaacatcactgtgaataatagcggatcctatatgtgccaagcccataactcagccactggcctcaataggaccacagtcacgatgatcacagtctctggaagtgctcctgtcctctcagctgtggccaccgtcggcatcacgattggagtgctggccagggtggctctgatatagcagccctggtgtattttcgatatttcaggaagactggcagattggaccagaccctgaattcttctagctcctccaatcccattttatcccatggaaccactaaaaacaaggtctgctctgctcctgaagccctatatgctggagatggacaactcaatgaaaatttaaagggaaaaccctcaggcctgaggtgtgtgccactcagagacttcacctaactagagacaggcaaactgcaaaccatggtgagaaattgacgacttcacactatggacagcttttcccaagatgtcaaaacaagactcctcatcatgataaggctcttacccccttttaatttgtccttgcttatgcctgcctctttcgcttggcaggatgatgctgtcattagtatttcacaagaagtagcttcagagggtaacttaacagagtatcagatctatcttgtcaatcccaacgttttacataaaataagagatcctttagtgcacccagtgactgacattagcagcatctttaacacagccgtgtgttcaaatgtacagtggtccttttcagagttggacttctagactcacctgttctcactccctgttttaattcaacccagccatgcaatgccaaataatagaattgctccctaccagctgaacagggaggagtctgtgcagtttctgacacttgttgttgaacatggctaaatacaatgggtatcgctgagactaagttgtagaaattaacaaatgtgctgcttggttaaaatggctacactcatctgactcattctttattctattttagttggtttgtatcttgcctaaggtgcgtagtccaactcttggtattaccctcctaatagtcatactagtagtcatactccctggtgtagtgtattctctaaaagctttaaatgtctgcatgcagccagccatcaaatagtgaatggtctctctttggctggaattacaaaactcagagaaatgtgtcatcaggagaacatcataacccatgaaggataaaagccccaaatggtggtaactgataatagcactaatgctttaagatttggtcacactctcacctaggtgagcgcattgagccagtggtgctaaatgctacatactccaactgaaatgttaaggaagaagatagatccaattaaaaaaaattaaaaccaatttaaaaaaaaaaagaacacaggagattccagtctacttgagttagcataatacagaagtcccctctactttaacttttacaaaaaagtaacctgaactaatctgatgttaaccaatgtatttatttctgtggttctgtttccttgttccaatttgacaaaacccactgttcttgtattgtattgcccagggggagctatcactgtacttgtagagtggtgctgctttaattcataaatcacaaataaaagccaattagctct

SEQ ID NO: 1317 - DNA, 2533 bp, Homo sapiens
ggagctcaagctcctctacaaagaggtggacagagaagacagcagagaccatgggacccccctcagcccctccctgcagattgcatgtcccctggaaggaggtcctgctcacagcctcacttctaaccttctggaacccacccaccactgccaagctcactattgaatccacgccattcaatgtcgcagaggggaaggaggttcttctactcgcccacaacctgccccagaatcgtattggttacagctggtacaaaggcgaaagagtggatggcaacagtctaattgtaggatatgtaataggaactcaacaagctaccccagggcccgcatacagtggtcgagagacaatataccccaatgcatccctgctgatccagaacgtcacccagaatgacacaggattctataccctacaagtcataaagtcagatcttgtgaatgaagaagcaaccggacagttccatgtatacccggagctgcccaagccctccatctccagcaacaactccaaccccgtggaggacaaggatgctgtggccttcacctgtgaacctgaggttcagaacacaacctacctgtggtgggtaaatggtcagagcctcccggtcagtcccaggctgcagctgtccaatggcaacatgaccctcactctactcagcgtcaaaaggaacgatgcaggatcctatgaatgtgaaatacagaacccagcgagtgccaaccgcagtgacccagtcaccctgaatgtcctctatggcccagatgtccccaccatttccccctcaaaggccaattaccgtccaggggaaaatctgaacctctcctgccacgcagcctctaacccacctgcacagtactcttggtttatcaatgggacgttccagcaatccacacaagagctctttatccccaacatcactgtgaataatagcggatcctatatgtgccaagcccataactcagccactggcctcaataggaccacagtcacgatgatcacagtctctggaagtgctcctgtcctctcagctgtggccaccgtcggcatcacgattggagtgctggccagggtggctctgatatagcagccctggtgtattttcgatatttcaggaagactggcagattggaccagaccctgaattcttctagctcctccaatcccattttatcccatggaaccactaaaaacaaggtctgctctgctcctgaagccctatatgctggagatggacaactcaatgaaaatttaaagggaaaaccctcaggcctgaggtgtgtgccactcagagacttcacctaactagagacagtcaaactgcaaaccatggtgagaaattgacgacttcacactatggacagcttttcccaagatgtcaaaacaagactcctcatcatgataaggctcttacccccttttaatttgtccttgcttatgcctgcctctttcgcttggcaggatgatgctgtcattagtatttcacaagaagtagcttcagagggtaacttaacagagtgtcagatctatcttgtcaatcccaacgttttacataaaataagagatcctttagtgcacccagtgactgacattagcagcatctttaacacagccgtgtgttcaaatgtacagtggtccttttcagagttggacttctagactcacctgttctcactccctgttttaattcaacccagccatgcaatgccaaataatagaattgctccctaccagctgaacagggaggagtctgtgcagtttctgacacttgttgttgaacatggctaaatacaatgggtatcgctgagactaagttgtagaaattaacaaatgtgctgcttggttaaaatggctacactcatctgactcattctttattctattttagttggtttgtatcttgcctaaggtgcgtagtccaactcttggtattaccctcctaatagtcatactagtagtcatactccctggtgtagtgtattctctaaaagctttaaatgtctgcatgcagccagccatcaaatagtgaatggtctctctttggctggaattacaaaactcagagaaatgtgtcatcaggagaacatcataacccatgaaggataaaagccccaaatggtggtaactgataatagcactaatgctttaagatttggtcacactctcacctaggtgagcgcattgagccagtggtgctaaatgctacatactccaactgaaatgttaaggaagaagatagatccaattaaaaaaaattaaaaccaatttaaaaaaaaaaaagaacacaggagattccagtctacttgagttagcataatacagaagtcccctctactttaacttttacaaaaaagtaacctgaactaatctgatgttaaccaatgtatttatttctgtggttctgtttccttgttccaatttgacaaaacccactgttcttgtattgtattgcccagggggagctatcactgtacttgtagagtggtgctgctttaattcataaatcacaaataaaagccaattagctctataact

SEQ ID NO: 1318 - DNA, 213 bp, Homo sapiens
ttccagccttccttcctgggcatggagtcctgtggcatccacgaaactaccttcaactccatcatgaagtgtgacgtggacatccgcaaagacctgtacgccaacacagtgctgtctggcggcaccaccatgtaccctggcattgccgacaggatgcagaaggagatcactgccctggcacccagcacaatgaagatcaagatcattgctcct

SEQ ID NO: 1319 - DNA, 5238 bp, Homo sapiens
tttgagtgaacaaataatcttttatttcaaaaatctttaaaaatccttagggcccacttcccagtcccgctaatacctttctccagtcgggtttcttcctttcccgggaggaaagtttccactctcagttcccccaggataacgcccttccggtggcgcgccagaaaccgcgccgacccctcccagccagcagcccgccccctttcccagtgctctaacgacatacggacccccagctgcgggcaaggccaagaccccaccccaactcacggttacccaaagtgggggtggagctcccagctctcagccccgcccattgaacgcaatcccagccggtaagagagaggaagtgccgtagtccccacccactttcatctccttccctttctgttggcccggctggtcgcctatcttctcgatcctgtagccgattggctctctccctcccgcgccagtccctgccctcccctggggagggtgagtcacgccaaactgggcggagagtccgctggcctcactcctagctcatctgggcggcggcggcaagtggggacagggcgggtggcgcatcaccggcgcggaggcaggaggagcagtctcattgttccgggagccgtcaccacagtaggtccctcggctcagtcggcccagcccctctcagtcctccccaacccccacaaccgcccgcggctctgagacgcggccccggcggcggcggcagcagctgcagcatcatctccaccctccagccatggaagacctggaccagtctcctctggtctcgtcctcggacagcccaccccggccgcagcccgcgttcaagtaccagttcgtgagggagcccgaggacgaggaggaagaagaggaggaggaagaggaggacgaggacgaagacctggaggagctggaggtgctggagaggaagcccgccgccgggctgtccgcggccccagtgcccaccgcccctgccgccggcgcgcccctgatggacttcggaaatgacttcgtgccgccggcgccccggggacccctgccggccgctccccccgtcgccccggagcggcagccgtcttgggacccgagcccggtgtcgtcgaccgtgcccgcgccatccccgctgtctgctgccgcagtctcgccctccaagctccctgaggacgacgagcctccggcccggcctccccctcctcccccggccagcgtgagcccccaggcagagcccgtgtggaccccgccagccccggctcccgccgcgcccccctccaccccggccgcgcccaagcgcaggggctcctcgggctcagtggaaaatatggacttgaaggagcagccaggtaacactatttcggctggtcaagaggatttcccatctgtcctgcttgaaactgctgcttctcttccttctctgtctcctctctcagccgcttctttcaaagaacatgaataccttggtaatttgtcaacagtattacccactgaaggaacacttcaagaaaatgtcagtgaagcttctaaagaggtctcagagaaggcaaaaactctactcatagatagagatttaacagagttttcagaattagaatactcagaaatgggatcatcgttcagtgtctctccaaaagcagaatctgccgtaatagtagcaaatcctagggaagaaataatcgtgaaaaataaagatgaagaagagaagttagttagtaataacatccttcataatcaacaagagttacctacagctcttactaaattggttaaagaggatgaagttgtgtcttcagaaaaagcaaaagacagttttaatgaaaagagagttgcagtggaagctcctatgagggaggaatatgcagacttcaaaccatttgagcgagtatgggaagtgaaagatagtaaggaagatagtgatatgttggctgctggaggtaaaatcgagagcaacttggaaagtaaagtggataaaaaatgttttgcagatagccttgagcaaactaatcacgaaaaagatagtgagagtagtaatgatgatacttctttccccagtacgccagaaggtataaaggatcgttcaggagcatatatcacatgtgctccctttaacccagcagcaactgagagcattgcaacaaacatttttcctttgttaggagatcctacttcagaaaataagaccgatgaaaaaaaaatagaagaaaagaaggcccaaatagtaacagagaagaatactagcaccaaaacatcaaacccttttcttgtagcagcacaggattctgagacagattatgtcacaacagataatttaacaaaggtgactgaggaagtcgtggcaaacatgcctgaaggcctgactccagatttagtacaggaagcatgtgaaagtgaattgaatgaagttactggtacaaagattgcttatgaaacaaaaatggacttggttcaaacatcagaagttatgcaagagtcactctatcctgcagcacagctttgcccatcatttgaagagtcagaagctactccttcaccagttttgcctgacattgttatggaagcaccattgaattctgcagttcctagtgctggtgcttccgtgatacagcccagctcatcaccattagaagcttcttcagttaattatgaaagcataaaacatgagcctgaaaaccccccaccatatgaagaggccatgagtgtatcactaaaaaaagtatcaggaataaaggaagaaattaaagagcctgaaaatattaatgcagctcttcaagaaacagaagctccttatatatctattgcatgtgatttaattaaagaaacaaagctttctgctgaaccagctccggatttctctgattattcagaaatggcaaaagttgaacagccagtgcctgatcattctgagctagttgaagattcctcacctgattctgaaccagttgacttatttagtgatgattcaatacctgacgttccacaaaaacaagatgaaactgtgatgcttgtgaaagaaagtctcactgagacttcatttgagtcaatgatagaatatgaaaataaggaaaaactcagtgctttgccacctgagggaggaaagccatatttggaatcttttaagctcagtttagataacacaaaagataccctgttacctgatgaagtttcaacattgagcaaaaaggagaaaattcctttgcagatggaggagctcagtactgcagtttattcaaatgatgacttatttatttctaaggaagcacagataagagaaactgaaacgttttcagattcatctccaattgaaattatagatgagttccctacattgatcagttctaaaactgattcattttctaaattagccagggaatatactgacctagaagtatcccacaaaagtgaaattgctaatgccccggatggagctgggtcattgccttgcacagaattgccccatgacctttctttgaagaacatacaacccaaagttgaagagaaaatcagtttctcagatgacttttctaaaaatgggtctgctacatcaaaggtgctcttattgcctccagatgtttctgctttggccactcaagcagagatagagagcatagttaaacccaaagttcttgtgaaagaagctgagaaaaaacttccttccgatacagaaaaagaggacagatcaccatctgctatattttcagcagagctgagtaaaacttcagttgttgacctcctgtactggagagacattaagaagactggagtggtgtttggtgccagcctattcctgctgctttcattgacagtattcagcattgtgagcgtaacagcctacattgccttggccctgctctctgtgaccatcagctttaggatatacaagggtgtgatccaagctatccagaaatcagatgaaggccacccattcagggcatatctggaatctgaagttgctatatctgaggagttggttcagaagtacagtaattctgctcttggtcatgtgaactgcacgataaaggaactcaggcgcctcttcttagttgatgatttagttgattctctgaagtttgcagtgttgatgtgggtatttacctatgttggtgccttgtttaatggtctgacactactgattttggctctcatttcactcttcagtgttcctgttatttatgaacggcatcaggcacagatagatcattatctaggacttgcaaataagaatgttaaagatgctatggctaaaatccaagcaaaaatccctggattgaagcgcaaagctgaatgaaaacgcccaaaataattagtaggagttcatctttaaaggggatattcatttgattatacgggggagggtcagggaagaacgaaccttgacgttgcagtgcagtttcacagatcgttgttagatctttatttttagccatgcactgttgtgaggaaaaattacctgtcttgactgccatgtgttcatcatcttaagtattgtaagctgctatgtatggatttaaaccgtaatcatatctttttcctatctgaggcactggtggaataaaaaacctgtatattttactttgttgcagatagtcttgccgcatcttggcaagttgcagagatggtggagctagaaaaaaaaaaaaaaaagcccttttcagtttgtgcactgtgtatggtccgtgtagattgatgcagattttctgaaatgaaatgtttgtttagacgagatcataccggtaaagcaggaatgacaaagcttgcttttctggtatgttctaggtgtattgtgacttttactgttatattaattgccaatataagtaaatatagattatatatgtatagtgtttcacaaagcttagacctttaccttccagccaccccacagtgcttgatatttcagagtcagtcattggttatacatgtgtagttccaaagcacataagctagaagaagaaatatttctaggagcactaccatctgttttcaacatgaaatgccacacacatagaactccaacaacatcaatttcattgcacagactgactgtagttaattttgtcacagaatctatggactgaatctaatgcttccaaaaatgttgtttgtttgcaaatatcaaacattgttatgcaagaaattattaattacaaaatgaagatttataccattgtggtttaagctgtactgaactaaatctgtggaatgcattgtgaactgtaaaagcaaagtatcaataaagcttatagacttaaa

SEQ ID NO: 1320 - DNA, 5238 bp, Homo sapiens; identical to SEQ ID NO: 1319

SEQ ID NO: 1321 - DNA, 5238 bp, Homo sapiens; identical to SEQ ID NO: 1319

SEQ ID NO: 1322 - DNA, 5238 bp, Homo sapiens; identical to SEQ ID NO: 1319

SEQ ID NO: 1323 - DNA, 5238 bp, Homo sapiens; identical to SEQ ID NO: 1319

SEQ ID NO: 1324 - DNA, 5238 bp, Homo sapiens; identical to SEQ ID NO: 1319

SEQ ID NO: 1325 - DNA, 5238 bp, Homo sapiens; identical to SEQ ID NO: 1319

SEQ ID NO: 1326 - DNA, 5238 bp, Homo sapiens; identical to SEQ ID NO: 1319

SEQ ID NO: 1327 - DNA, 2786 bp, Homo sapiens
tttgagtgaacaaataatcttttatttcaaaaatctttaaaaatccttagggcccacttcccagtcccgctaatacctttctccagtcgggtttcttcctttcccgggaggaaagtttccactctcagttcccccaggataacgcccttccggtggcgcgccagaaaccgcgccgacccctcccagccagcagcccgccccctttcccagtgctctaacgacatacggacccccagctgcgggcaaggccaagaccccaccccaactcacggttacccaaagtgggggtggagctcccagctctcagccccgcccattgaacgcaatcccagccggtaagagagaggaagtgccgtagtccccacccactttcatctccttccctttctgttggcccggctggtcgcctatcttctcgatcctgtagccgattggctctctccctcccgcgccagtccctgccctcccctggggagggtgagtcacgccaaactgggcggagagtccgctggcctcactcctagctcatctgggcggcggcggcaagtggggacagggcgggtggcgcatcaccggcgcggaggcaggaggagcagtctcattgttccgggagccgtcaccacagtaggtccctcggctcagtcggcccagcccctctcagtcctccccaacccccacaaccgcccgcggctctgagacgcggccccggcggcggcggcagcagctgcagcatcatctccaccctccagccatggaagacctggaccagtctcctctggtctcgtcctcggacagcccaccccggccgcagcccgcgttcaagtaccagttcgtgagggagcccgaggacgaggaggaagaagaggaggaggaagaggaggacgaggacgaagacctggaggagctggaggtgctggagaggaagcccgccgccgggctgtccgcggccccagtgcccaccgcccctgccgccggcgcgcccctgatggacttcggaaatgacttcgtgccgccggcgccccggggacccctgccggccgctccccccgtcgccccggagcggcagccgtcttgggacccgagcccggtgtcgtcgaccgtgcccgcgccatccccgctgtctgctgccgcagtctcgccctccaagctccctgaggacgacgagcctccggcccggcctccccctcctcccccggccagcgtgagcccccaggcagagcccgtgtggaccccgccagccccggctcccgccgcgcccccctccaccccggccgcgcccaagcgcaggggctcctcgggctcagtggatgagaccctttttgctcttcctgctgcatctgagcctgtgatacgctcctctgcaggcaaatttctttttcaatttttagttgttgacctcctgtactggagagacattaagaagactggagtggtgtttggtgccagcctattcctgctgctttcattgacagtattcagcattgtgagcgtaacagcctacattgccttggccctgctctctgtgaccatcagctttaggatatacaagggtgtgatccaagctatccagaaatcagatgaaggccacccattcagggcatatctggaatctgaagttgctatatctgaggagttggttcagaagtacagtaattctgctcttggtcatgtgaactgcacgataaaggaactcaggcgcctcttcttagttgatgatttagttgattctctgaagtttgcagtgttgatgtgggtatttacctatgttggtgccttgtttaatggtctgacactactgattttggctctcatttcactcttcagtgttcctgttatttatgaacggcatcaggcacagatagatcattatctaggacttgcaaataagaatgttaaagatgctatggctaaaatccaagcaaaaatccctggattgaagcgcaaagctgaatgaaaacgcccaaaataattagtaggagttcatctttaaaggggatattcatttgattatacgggggagggtcagggaagaacgaaccttgacgttgcagtgcagtttcacagatcgttgttagatctttatttttagccatgcactgttgtgaggaaaaattacctgtcttgactgccatgtgttcatcatcttaagtattgtaagctgctatgtatggatttaaaccgtaatcatatctttttcctatctgaggcactggtggaataaaaaacctgtatattttactttgttgcagatagtcttgccgcatcttggcaagttgcagagatggtggagctagaaaaaaaaaaattttctgaaatgaaatgtttgtttagacgagatcataccggtaaagcaggaatgacaaagcttgcttttctggtatgttctaggtgtattgtgacttttactgttatattaattgccaatataagtaaatatagattatatatgtatagtgtttcacaaagcttagacctttaccttccagccaccccacagtgcttgatatttcagagtcagtcattggttatacatgtgtagttccaaagcacataagctagaagaagaaatatttctaggagcactaccatctgttttcaacatgaaatgccacacacatagaactccaacaacatcaatttcattgcacagactgactgtagttaattttgtcacagaatctatggactgaatctaatgcttggtttaagctgtactgaactaaatctgtggaatgcattgtgaactgtaaaagcaaagtatcaataaagcttatagacttaaaata

SEQ ID NO: 1328 - DNA, 5238 bp, Homo sapiens; identical to SEQ ID NO: 1319

SEQ ID NO: 1329 - DNA, 6259 bp, Homo sapiens
gggcgggagcagcggcggcggcggcacaggctcggggccagccgggcgcgcatccccgggcgccctgcgcggtggagagcttggcgggctgcgggtgccgcaggacaggagtggacaaagcaagatggcagggatcttagcctggttctggaacgagaggttttggctcccgcacaatgtcacctgggcggacctgaagaacacggaggaggccaccttcccgcaggctgaggacctctatctcgcttttcccctggccttctgtatcttcatggtgcggctcatcttcgagagatttgtagccaaaccgtgcgccatagccctcaacattcaggccaatggaccacaaattgctccgcccaatgccattctggaaaaggtcttcactgcaattacaaagcatcctgatgaaaagagattggaaggcctctccaagcaactggactgggatgttcgaagcattcagcgctggtttcgacaaagacgcaatcaggagaagccaagcacgctgacgaggttctgtgagagcatgtggagattttcattttacctttatgtatttacctacggagtcagattcctgaaaaagaccccctggttgtggaatacgaggcattgctggtacaactacccctatcagccactcacaactgaccttcactactattacatcctggagctgtcgttttattggtctttgatgttttctcagttcactgatatcaaaagaaaggactttggcattatgttcctgcaccaccttgtatctattttcttgattaccttttcatatgtcaacaatatggcccgagtaggaacgctggtcctttgtcttcatgattcagctgatgctcttctggaggctgccaaaatggcaaattatgccaagtttcagaaaatgtgtgatctcctgtttgttatgtttgccgtggtttttatcaccacacgactgggtatatttcctctctgggtgttaaataccacattatttgaaagctgggagatcgttggaccttacccttcctggtgggtttttaacctactgctattgctagtacaagggttgaactgcttctggtcttacttgattgtgaaaatagcttgcaaagctgtttcaagaggcaaggtgtccaaggatgatcgaagtgatattgagtctagctcagatgaggaggactcagaacctccgggaaagaatccccacactgcgacaaccaccaatgggaccagtggtaccaacgggtatctcctgactggctcctgctccatggatgattaattactcaaaactacaagtcccaagcaaagtgaactatttgttcctggaagtatttaataagttgcaaatgcagttcctttcataatatctcagcaccagaaacaaaaattaagattatcaaagcattttgaatagtgcactgccatgtgtcctgtctgtgaatgaagaagaattaccattctctctttgtaggcatgctgtatgtaattgacacaagggaacagtatttgcatttgtactgtcttagaatattatttatttttttgtatttgtaaatctgtggacaaaagagggtttcctcactccttttactcactgggctcatgacagtgaaggagatgctccatctgcttctccccctttctcttgctgtagtccaatgtgctatgagcatcagcttactttgtcacttagagcaagcaaaacccagtgcaagagtctcgttcagctctaaataggtttgctttcttttagttacagtgcccattttgaaattgcctatacagtcttagtgaccatttaaaccggacgaactaggtgtttaattttcactcttcatgttcaattagcagttcaaattaaagaagatggttattggagaacttttttgaatggttttgtattaaattgctttgaaatagatttcatttcttgtgcacacagccaagatttcttcaatgggtgtgagctagttgagggttaaccttgtaggttgcagagtgtatttgtttgtttgtttgtttttctctgtgatgaggtcagtgctctgattttgaaggaggatattcactgaagctcatagttataaacaaggaaatcactgttaagaatgggaatttgtcctgtgttctgggaataacataaagagagcaactgatttcagccaggttttgccactaccctataattagtgcagtcttatgttataaaagaaagaagttaactatatttggggacaaaaaaatatttcaagagttgataaagattacctgtgcagtgcagagcactttaatgcaaccagctttcaagaaaaagccctatctagtacttgatgttgatgtttttattttgctgagcaaaataaagccaatgggagaaagactattttaccctttgcttttctccttaaacgtaatccagatgactttcctgttactaaacactgagcagcattacactacaatgcttctttggtttccaggaatttttttcaaatggggctgtttctggaaaaatgaaaaattctattggacaatggcaatatcaacaatgaggaaaattactgaagaataagtttccataagtctcctacatagcagtgttatttatgtacagataagaaaaccatatgtcagccaaagattttatctcttcttctaacttttagtaagaggaaaaagggattataaaacccttcataaatcaagaaggccatcacttagaacgaaccccaaacaaaaatgccataatataaatgtgtgaatcagggctgtgaagacaacagcagaaatgctaacaagcgtgcagaaacaccagagagtgcgtatcctgctcagaaccattcacatttaattcaattcttggaaaaaattaaagctttttgcccacaatttgcaatctgtgggttaatagttaaaagaatgttcccaaccaaaaaattcttaccgtaatattatatcttgccctacttatttacaaaataatatgtttctgttatggtccttagtaataattgaagaggcttagaaatacatctgcttgtttattgagaaaacgatgcaaataattctgcttttagagccttgttattttatttcacaaaacaggcatatgtctaggagtgtaatttgtggatggttgagtttgtaagaacaatcataaaaggacttgttagtctccagaacatctgctaaaatgcaagtatatgtataaggtaatagcatattacagctgaaaattttgagaaggtaaaagtttcttaattaaaatatgaacatatttagcttgctttagtgtctggggcaagtcctctcaatggctaaaattaactttagagatccatgtgttcaggtttagatcatatgacactcgagcacagaagaataatttcaaggaggtcatcttgtaaattaaaggtttagaagaattgcataaaacgtagtaaatggggtctgtcattagcaaaggcaaatctaagcaatcatttttccccccagaagttacttagaaggagaactgggaacacttggggtctctctaactgatggcattcacttcacacagtcgtctatgttatccagagatttttatttcattttacattttagggcacagttctttggggctaattaaaatggggtttgcaggctttttatggtgaagaataatatatctctgtctatagctttcccatggtagcctgataaggctgagagagaaaaatatgtgcagtatctcatcctccccctgtaccaggccatagctttgaagtgtattttgtaaattcaactataggttagtcagaatgctgtttttcgttaattaacttagcctgtgttgatatctcctccttcctggtcacattcaaaccttcccagagtacaaaggggtatgtagaaaggattccagaagaagtaatactttattctctaatgttaatagcttttctggatctcttagtagggggaaagtagaaaatcgagtagaatttggcctcaggtcaataaatgatataaaaacatgtgttctatttatgtatatatatgtatgtttctccaaaaagtgataaaaccaaaatatcactgactcatccctacccatattcttttcataaaacccactcaccaggtacaatagaaacttccctccttgtttgtcagcctcctgttcatgttccccacacacctgaaggtggtagaatcttttcagcctcttagccagtgagctaaatatggctaagcacaggtcataagagcacctaaggccagcatataagccaactacagttcacctttccaaatttggtcctatggatgttgagcatagggaagcaactctcagtattttggattattcaagtgtatgtggtaaaaatgcagatgattgctgctttaccccagggtttattagcatcctacttctgctgggctgcatcattatataatgccacaggcatctagtcaaggtaaagaagccagaaaggttaggcaagaagtgagataaaatcagatcacctttgatcaaaatggttggtgaacctccacatgtccagttctgttgccaaactttccattcagagtatttggtggagtttgaatttgagcaaactaaatgccttcatcttaggtagaaagggcctgaatcttccattttatattcaaacctcattgttatttggcctaagtaaaaagtcagatttcatttccatttacctgagttcgctttaaagagcttttcaaagagagctttatagacacccacaattgtccccaatctcttcatgatgttgcattaatagttgtttttgtccctttcttggaaatgttaatgccaaagttgcctgaacattgggcggttttcttaatttgaagtataaaaattataaagagtaattccaaaggtattaaaagattgtttaacagtatgtgtggtgatgtcattatctccagagaggcttcaagaaatcctttggaaataaaaagttaaatgtttacatttcatgtggtatttcaggtcttcaggttctgattagcttacttttttcctttgtctttggctgatttctgctttgtagataaataataatagccctgagatgtttctaacatttaaataagaaaaaaatcaaatcgaagtcagcctgctggaaaagtgatcacatggcagttgcagtaacttgtatggaaagagaaaatgcaatgagcccagttactgcacttgccactaccatgctgtccatggaaggaataatcagcagttcagttgtcacaagccgcccttgaagaaaacgcagcaaaatattttaaaatgaagatattgcagtccccagagccagtgaaggtttcttttggtaaaatgaaattgtgccattgtcaaagtaccccgtagtgatgagcactgactggttcactggccacattttagttcttcataataataggccacaaaagggctctgtggtttgcctccatgtgcactggcccctccccacccctagggggcactcagtagctgctgagaaggcctgtccacgaggctgttggaacccctccaataaatacttagaggtagtgtatctgatgcttgttttcgtggagaaaattgtattggagaacttaaaacatcacgaatatttttaataggatccgcagacacccaaaggagaagcttggtcttttccaggtatttccaacttgagttcaacccaaagcctttgaaaggaatgcattaccacatgaccacatgctgagaccccatggggtctaacacgggacctaagaaagtctctgcagccagatagtacatggtgtctccacaaaactaggcattctggagattgcccagaaagggatgtgaggggaccgttaagatctgtcttgcttatctcatgcactcacattccttcagcctcctggagttcctgataaaaggaagccagggtgttgacattttttagctattgatttcccaatagcttgtggatcagttgtacacccacacttccttctctgcctaattccgtttttctggaaaaagtagtatgcccatgtatgtgtgtttttcttaacacaggtccatgaaagtttggcttcctggtttgatgtctgttgcgtggcctggaaaccagggagcagcaactattgagatggtttctgtgttcagtgaaaaattctatttcattgagacaattttttctttatccacagtaattttttgacactgtcatcatgaaactacccttaggaaaataagattacctgc

SEQ ID NO: 1330 - DNA, 3939 bp, Homo sapiens
cgcggaggaggcggcggcggcgggcgggagcagcggcggcggcggcacaggctcggggccagccgggcgcgcatccccgggcgccctgcgcggtggagagcttggcgggctgcgggtgccgcaggacaggagtggacaaagcaagatggcagggatcttagcctggttctggaacgagaggttttggctcccgcacaatgtcacctgggcggacctgaagaacacggaggaggccaccttcccgcaggctgaggacctctatctcgcttttcccctggccttctgtatcttcatggtgcggctcatcttcgagagatttgtagccaaaccgtgcgccatagccctcaacattcaggccaatggaccacaaattgctccgcccaatgccattctggaaaaggtcttcactgcaattacaaagcatcctgatgaaaagagattggaaggcctctccaagcaactggactgggatgttcgaagcattcagcgctggtttcgacaaagacgcaatcaggagaagccaagcacgctgacgaggttctgtgagagcatgtggagattttcattttacctttatgtatttacctacggagtcagattcctgaaaaagaccccctggttgtggaatacgaggcattgctggtacaactacccctatcagccactcacaactgaccttcactactattacatcctggagctgtcgttttattggtctttgatgttttctcagttcactgatatcaaaagaaaggtaagagcggttatgtcgtaaagtgcttgcaagcatgcatctttaatggcccttagcaggtgggtttagactctcaaaggcactcacccctgttctcctggcagccctaggttagtacgacttgctgcgttattacagaaagttctctatttttgtttgtgctgttttatatttttttctattgtttcttcgctcatcccctaaaactcagctctcttttctccatgtaataatgtagcaatgaatccccgtagaaatgattttctctcaatctaattcccaagttcctctgttctccaaattaaataaaaagcaagaattctatttgtagctcctgggagagagtaaagtctcagtgtttcaaccctacagaattaattccccaattgcagggttgtccagtgtcaaaatatgtctcggaaatgcagcattcctcagtgaactgtgatctggtttccacctatcccctccactgtaatcacttttgtgtgaccccttacgtgttaaatccacttattctggctttcgtcctaccagcttctgggcagaattggcacttctagctctttactgcttatttttctgtgacaccatatttggattaatccttcaaagtcactttgctgtccttgtcttaatgccccatgctctacatatttgggtgcaacagagttctggacctgaattacaggatgccatctccctggatgattgagttgatacttcctgacacttccaaccataacctacatgccatgaattctgaaatgtttctcttctgccccacattctctctgggtccatacttccacatctgtagtcacagatgatagtactggttgaacatccctaaatctggaaatccaaaatgctctgaaatttgatactttttgagtgttaacatgatcctcaaagtaaataaatgctcattggagcattttgcattttagatttttatattagggatgcaaatctgtaagcataatgcaaacattccgaaatccaaggaaaacagttctaatcccaagcatttggggtaagggatacacaatgtatattgtgttatttttgtacattatatcatttagtcctgacaacaaatcagaggtccagtttgattattttattatttatgcttattttatgaatgatgaaactaagccttacatacaaagtgctcctgactgaagacatggtcttctagtcttgttcttctccagtaacccttagaaccaaaagtcatgtcagccaggacgttttcctttgctctcgtttttgccactccgtataccttcttccttaatgtcactgacaaacttacagttccctctccttttgcccactctattatgtagtctcttaaacagtctttctatctaagtagtcattcttgtttatctgctgcctaagaattatgtttctaaaaccttcaagacaaagttcaaatacgtggaggataaaatgcaatgtcttaatccaattgagctaatacaaaaaaatgccagattgactgagtggcttataaaatctatttctcacggttctagaaggtgaggtgccccagatcaaggcaccagcagattcagtgtctggcaacagcccactttctcatagatgacaaccttctcactgtgtcctcacatggtggaaggggcaagacagctctatgaggcctccttgtgaaaaggcatgagtcccattcacaagggcttctgccaaaaggccccatgtcctaatactatcactttgggggttagagtttcaatatatatatttgagaaggacacaagcatttagtccccagcaagcaagatatgttcgcctttgcacccccatgactatcagtgtagctgctcatcgtgggaatcagtaagttgagggtaaatgaataagcaaaatcagttcctttacattatgatggagcacagtactgtaatgtatcatttcttggttaaatcagtaatctgctaagttgcaaactggtatccaagtggcagctgaaaagcgtttaggagtctgtgggcctactactacccaagtcccctgtccccacatatgctccttccaccatcctacagcagtggcttacttggctggcaaaaagctatcttttctgacttgtatggctacagggcccttaatatggtatatatcagctgattctcagaagtaggtggtccctgtcaaagcgagcttgggcataacagatgactctttgacacccgtaatttgtggttcccttactcattgcacccaacactccgagttggtttctgaaatcatttacggactctttagtgatggtatgtcaagggaatctcttctgtcctacatgagggagccttctttggtcatgtagtgtcaatacatgtagactgattattttctgtgtgccaggtactgtgcgaggctcatgttgcatttattttcttttttgaggagatcttttgtccaggtagtcacgtaaaactcttatataacagagagctagaacattcttcctttttttttttttttaacttgggagaattgatgcacagagtgagtttatgtaagtttctcaaggccatgcaatataggaatgaattagaggctaggcttaccaagcagagccctgtgattcactcttagattagacacatacataatccttgccttgccatgctcctgacattacaggtagttagcctttaacagctctttgccattttatcagtccttctcttgcttagtgagaactagaggtgccatccagagtcaaaagcaggaatagctgtccttggcttccagaagcctagtcctagtaagacattgctataccaaaagttaccaagtccctgcactagcttgagctttctcatcacatgtggaatgtggctttgcagtgagccagcagggctcaaaatatctttattgctgtattagtttgttttcgcactgctgtaaagaagtacctgtggccaggcatggtgactcatggctgtaatcccagcacattaggaggccgaggtgggtgggtggatcacttgagctcacaagttcaagaccagcctgagcaacatgacgaaaccctgtctgtataaaatatacaaaatttagccagatatggtgttgtgcaccaagtgagccaagatggcaccgccgcactccagccggggtgatagagccagaccttgtctcacagg

SEQ ID NO: 1331 - DNA, 14760 bp, Homo sapiens
ccaggaggccatgtcgggtgaggacgctgaggtccgggcagtctctgaagatgtctccaatggaagcagtggctcgcccagccctggggacacactgccctggaaccttgggaaaacgcagcggagccggcgcagcgggggtggcgctgggagcaacgggagtgtcctggacccagctgagcgggcggtcattcgcatcgcagatgagcgggatcgtgtgcagaagaaaaccttcaccaagtgggtcaacaagcacctcatcaaggcccagaggcacatcagtgacctgtatgaagacctccgcgatggccacaacctcatctccctgctggaggtcctctcgggggacagcctgccccgggagaaggggaggatgcgtttccacaagctgcagaatgtccagattgccctggactacctccggcaccgccaggtgaagctggtgaacatcaggaatgatgacatcgctgacggcaaccccaagctgacccttggcctcatctggacaatcattctgcacttccagatctcagatatccaggtgagtgggcagtcggaggacatgacggccaaggagaagctgctgctgtggtcgcagcgaatggtggaggggtaccagggcctgcgatgcgacaacttcacctccagctggagagacggccgcctcttcaatgccatcatccaccggcacaagcccctgctcatcgacatgaacaaggtgtaccggcagaccaacctggagaacctggaccaggccttctctgtggcggagcgggacctgggagtgacgcggctcctggaccctgaggacgtggatgtccctcagcccgacgagaagtccatcatcacctacgtctcgtcgctgtatgacgccatgccccgcgtgccggacgtgcaggatggggtgagggccaacgagctgcagctgcgctggcaggagtaccgggagctggtgctgctgctgcttcagtggatgcgacaccacacggccgcctttgaggaacgcaggttcccctccagcttcgaggagattgagatcctgtggtctcagttcctgaagtttaaggagatggagctaccagccaaggaggccgacaagaacaggtccaagggcatctaccaatccctggagggagcggtgcaagcaggccagctcaaggtgccccctggctaccacccgctggatgtggagaaggagtggggcaagctgcacgtggccatcctggagcgggagaagcagctccgcagcgagtttgagaggctggagtgtcttcagcgcatcgtgaccaagctgcagatggaggcggggctgtgtgaggagcagctgaaccaggccgacgccctgctgcagtcggatgtccggctgctggctgcaggcaaagtgccacagcgggcgggggaggtggaacgggacttggacaaggcggatagcatgatccggctgctcttcaacgacgtgcagaccctcaaggatggacggcacccgcagggcgagcagatgtaccgcagggtgtaccgtctgcacgagcgcctggtagccatccgcaccgagtacaacctacggctgaaggcaggcgtggcggcccctgcaacccaggtggtccaggtgactctgcagagtgtgcagaggcgccccgagctggaggactccactctgcgctacctgcaggacctgctggcctgggtggaggagaaccagcaccgtgtggatggcgctgagtggggtgtggacctgcccagcgtggaggcgcagctgggcagccaccgaggcctgcaccagtccatcgaagaattccgggccaagatcgagcgggcacggagtgacgagggccagctctcccccgccacccggggtgcctaccgtgactgcctgggtcggctggacctgcagtacgccaagctgctgaactcctccaaggcccgcctcaggtccctggagagcttgcacagctttgtggcagccgccactaaggagctaatgtggctgaatgagaaggaggaggaggaggtgggcttcgactggagcgaccgcaacaccaacatgaccgccaagaaggagagctactcggcgctgatgcgggagctggagctgaaggagaagaagatcaaggagctccaaaatgctggggaccggctgctgcgggaggaccacccggcccggcccacggtggagtccttccaggcggccctgcagacgcagtggagctggatgctacagctgtgctgctgtatcgaggcacacctgaaggagaacgctgcctactttcagttcttctcagatgtgcgggaggccgaggggcagttgcagaagctgcaggaggcactgcgtaggaaatacagttgtgatcgctccgccaccgtcacccggctggaggacctgctgcaggatgcccaggacgagaaggaacagctgaacgagtacaagggccacctctcaggcctggccaagcgggccaaggccgtcgtgcagctgaagccccgccacccagcccaccccatgcggggccgcctgcccctgctggccgtgtgcgactataagcaggtggaggtgactgtgcacaagggtgacgagtgccagctggtgggccctgcacagccgtcccactggaaggtgctcagcagctccggcagcgaggccgccgtgccctccgtgtgcttcctggtgcccccgcccaaccaggaggcccaggaggccgtcaccaggctggaggcccagcaccaggccctggtcacgctgtggcaccagttgcacgtggacatgaagagccttctggcctggcagagccttcgccgcgacgtgcagctcatccgctcctggtccctggccacgttccgcaccctgaagccagaggagcagcgccaagccctgcacagcctggagctgcactaccaggccttcctgcgggacagccaggacgcgggcggcttcggacccgaggaccggctgatggctgagcgcgagtacggctcctgcagccaccactaccagcagctgctgcagagcctggaacagggtgcacaggaagagtctcgctgccagcgctgcatctccgagctcaaagacatccggctgcagctggaggcctgtgagacgcgcaccgtgcaccgcctgcggctgccgctggacaaagagccggcacgggagtgtgcccagcgcatcgccgagcagcagaaggcacaggcagaggtggaggggctgggcaagggggtcgcccggctctctgccgaggccgagaaggtcttggccctaccagagccatcgcctgcggcccccacgctgcgctcggagctggagctgacgctgggcaagctggagcaggtccgcagcctgtctgccatctacctggagaagctcaagaccatcagcctggtgatccgcggcacgcagggggccgaggaggtgctcagggcccacgaggagcagctcaaggaggcccaggccgtgccggccaccctcccggagctcgaggccaccaaggcctctctgaagaagctgcgggcccaggccgaggcacagcagcccacgttcgacgccctgcgggatgagctgcggggggcacaggaggtgggggagcgactgcagcagcggcacggggagcgggacgtggaggtggagcgctggcgggagcgggtcgcccagctgcttgagcgctggcaggctgtgctggcccagaccgacgtgcggcagcgcgagctcgagcaactgggccgccagctgcgttactaccgcgagagtgcagaccccttgggcgcctggctgcaggacgccaggcggcggcaggagcagatccaggccatgccgctggccgacagccaggctgtgcgggagcagctgcggcaggagcaggccctgctggaggagatcgagcgccacggcgagaaggtcgaggagtgccagaggtttgcgaaacagtacatcaacgccatcaaggactatgaactccagctggtgacgtacaaggcgcagcttgagccggtggcctccccggccaagaagcccaaggtccagtcgggatcagagagtgtcatccaggagtacgtggacctgcgtacgcactacagcgagctgaccacactgacgagccagtacatcaagttcatcagcgagactctgcggcgcatggaggaggaggagaggctggctgagcagcagcgggcagaggagcgcgagcggctggccgaggtggaggccgcgctggagaagcagcggcagctggccgaggcgcacgcccaggcaaaggcacaggcggagcgggaggcgaaggagctgcagcagcgcatgcaggaggaggtggtgcggcgggaggaggcggcggtggacgcgcagcagcagaagcgcagcattcaggaggagctgcagcagctgcggcagagctcggaggcggagatccaggccaaggcccggcaggcagaggcggctgagcgcagccggctgcgcatcgaggaggagatccgcgtggtgcgcctgcagttggaggccaccgagcgccagcgtggcggggctgagggggagctgcaggcactgcgtgcacgggcggaggaggctgaggcacaaaagcgacaggcgcaggaggaggccgagcgcttgcggaggcaggtgcaggacgagagccagcgtaagcggcaggcggaggtggagctggcctcgcgcgtgaaggccgaggccgaggcggcgcgcgagaagcagcgggccctgcaggccctggaggagctgcggctgcaggcggaggaggcggagcggcgcctgcggcaggccgaggtggagcgagcgcggcaggtacaggtggccctggagacggcgcagcgcagtgcagaggcggagctgcagagcaaacgcgcctccttcgccgagaagacggcacagctggagcgctccctgcaggaggaacacgtggctgtggcacagctgcgggaggaggctgagcggcgggcacagcagcaggccgaggccgagcgggcgcgcgaggaggcagagcgggagctggagcgctggcagctcaaggccaacgaggcgctacggctgcggctgcaggcggaggaggtggcgcagcagaagagcctggcgcaggccgaggctgagaagcagaaggaggaggcggagcgcgaggcgcggcggcgcggcaaggcggaggagcaggccgtccggcagcgggagctggctgaacaagagctggagaagcagcggcagctggcggaaggcaccgcgcagcagcgcctggccgcggagcaggagttgatccggctgcgggccgagacggagcagggggagcagcagcggcagctgctggaggaggagctggcccggctgcagcgtgaggcggctgcagccacgcagaaacggcaggagctggaagccgagctggccaaggtgcgggccgagatggaggtgctgctggccagcaaggcgagggctgaggaggagtcgcgctccaccagcgagaagtccaagcagaggctggaggccgaggccggccggttccgcgagctggccgaggaggccgcccgcctgcgtgccctggcggaagaggccaagcggcagcggcagctggccgaggaagacgcggcgcggcagcgggccgaggcggagcgggtgcttgcggagaagctggccgccatcggcgaggccacgcggctcaagacggaggcggagatcgcgctcaaggagaaggaggcggagaacgagcgcctgcggcggctggcggaggacgaggccttccagcggcggcggctggaggagcaggccgcgcaacacaaggctgacatcgaggagcgcctggcccagctgcgcaaggcatcggacagcgagctggagcggcagaaggggctggtggaggacacgctgaggcagcggcggcaggtggaggaggagatcctggcgctgaaggcgagcttcgagaaggcggccgctggcaaggcggagctggagctggagctgggacgcatccgcagcaacgcggaggacacgctgcgcagcaaggagcaggccgagctggaggctgcgaggcagcggcagctggcggcggaggaggagcggcggcgccgtgaggctgaggagcgcgtgcagaagagcctggcggccgaggaggaggccgcacggcagcggaaggcggcgctggaggaagtcgagcggctgaaagccaaggtggaggaggcgcggcgcctgcgggagcgagcggagcaggagtcggcgcggcagctgcagctggcccaggaggccgcccagaagcggctgcaggcggaagagaaggcacacgccttcgcggtgcagcagaaggagcaggagctacagcagacgctgcagcaggagcagagcgtgctggaccagctgcgcggcgaggcggaggcggcccggcgggcggctgaggaggcggaggaggcccgggtgcaggcggagcgtgaggcggcgcagtcccggcggcaggtggaagaggccgagcggctgaagcagtcggcagaggagcaggcacaggcccgggctcaggcacaggcggctgcagagaagctgcgcaaggaggccgagcaagaggcggcgcggcgggcacaggcggagcaggcggccctgcggcagaagcaggcagctgacgcggagatggagaagcataagaaattcgccgagcagacgctgcggcagaaggcgcaggtggagcaggagctgacaacactgcggctgcagctggaggagaccgaccaccagaagaacctgctggacgaggagctgcagcggctgaaggcggaggccacggaggccgcacgccagcgcagccaggtggaggaggagctcttctcggtgcgcgtgcagatggaggagctgagcaagctcaaggcacgcatcgaggctgagaaccgcgcactcatcttgcgtgacaaggacaatacgcagcgcttcctgcaggaggaggctgagaagatgaagcaggtggcggaggaggccgcgcggctgagtgtggcggcccaagaggctgcgcgactgcggcagctggcagaggaggacctggcacagcagcgggccttggcagagaagatgctcaaggagaagatgcaggcggtgcaggaggccacgcgactcaaggctgaggcggaactgctgcagcagcagaaggagcttgcgcaggagcaggcgcggcggctgcaggaggacaaggagcagatggcgcagcagctggcggaggagacgcagggcttccagcggacgctggaggccgagcggcagcggcagctggagatgagcgctgaggctgagcgcctcaagctgcgtgtggccgagatgagccgagcccaggcccgcgctgaggaggacgcccagcgcttccggaagcaggcggaggagatcggtgagaagctgcaccgcacggagctcgccacccaggagaaggtgaccctggtgcagacactggagatccagcgacagcagagtgaccatgatgccgagcgcctgcgggaggccatcgctgagctggagcgtgagaaggagaagctccaacaggaggccaaactgctgcagctcaagtctgaggaggatgcagacggtgcagcaggagcagctgctgcaggagacgcaggccctgcagcaaagcttcctctctgaaaaggacagcctgctacagcgggagcgcttcatcgagcaggagaaggccaagctggagcagctcttccaggacgaggtggccaaggcacagcagctgcgtgaggagcagcagcggcagcagcagcagatggagcaggaacggcagcggctggtggccagcatggaggaggcgcggcggcggcagcatgaggccgaggagggcgtgcggcgcaagcaggaggagctgcagcagctggagcagcagcggcggcagcaggaggagctgctggctgaggagaaccagaggctgcgtgagcagctgcagctcctggaggagcagcaccgggccgcgctggcgcactcagaggaggtcactgcctcgcaggtggctgccacaaagaccctgcccaatggccgggatgcacttgatggccccgcggcagaggcagagccggagcacagcttcgatggcctgcggcggaaggtgtcagctcagaggctgcaggaggccggcatcctgagtgcggaggagctgcagcggttggcgcagggccacaccacggtggacgagctcgcacggcgggaagacgtgcgccactacctgcagggccgcagcagtatcgcagggctgttgctgaaggccaccaatgagaagctgagtgtttacgccgccctgcagaggcagctgctgagtcccggcacggccctcatcctgctggaggcgcaggcggcctcaggcttcctgctggaccctgtgcggaaccggcggctgaccgtcaacgaggctgtgaaggagggtgtggtgggccccgagctgcaccacaagctgctgtcggccgagcgcgccgtcactggctacaaggacccctacactggccagcagatctctctcttccaagccatgcagaagggcctcatcgtccgggagcacggcatccgcctgctggaggcccagatcgccacgggcggcgttatcgaccccgtgcacagccaccgcgtgcccgtggacgtggcctaccggcgcggctacttcgacgaggagatgaaccgcgtcctggcggaccccagcgacgacaccaagggcttctttgaccccaacacgcacgagaacctcacgtacctgcagctactggagcgctgcgtggaggaccccgagacgggcctgtgccttctgccactcacggataaggctgccaagggcggggagctggtctacactgactccgaggcccgggacgtctttgagaaggccaccgtgtctgcgccgttcggcaagttccagggcaagacggtgaccatttgggagatcatcaactcggaatacttcacggcagagcagcggcgggacctgctgcggcagttccgcacgggccggatcacagtggagaagatcatcaagatcatcatcacggtggtggaggagcaggagcagaagggccggctttgctttgagggcctgcgcagcctggtgccagccgccgagctgctggagagcagggtcatcgaccgcgagctctaccagcagctgcagcgaggtgagcgctctgtgcgagacgtagccgaggtggacactgtgcggcgggctctccggggtgccaacgtcatcgcgggtgtatggctggaggaggcggggcagaagctgagtatctacaatgccctgaagaaagacctgctgccatccgacatggccgtggccctgttggaagcccaggccggcaccgggcacatcatcgaccccgccaccagcgcccggctgaccgtggacgaggcagtgcgtgctggcctggtgggccccgagtttcatgagaagctgctatcagccgagaaggctgtgacagggtacagggacccctacacagggcagagcgtctccctgttccaggccctgaagaagggcctcattccccgggagcagggcctgcgcctgttggacgcccagctgtccacgggcggcatcgtggaccccagcaagagccaccgcgtgcccctggatgtcgcctgcgcccgaggctgcctggatgaggagaccagcagggccctgtcggcaccaagggccgacgccaaggcctacagtgaccccagcacaggggagccggccacctacggcgagctccagcagcggtgccggcccgaccagctgaccgggctgagcctgctgccgctctcagaaaaggctgctcgggcccggcaggaggagctctactcagagctgcaggcccgtgagacctttgaaaagaccccggttgaggtccccgtgggtggcttcaagggcaggacggtgacggtgtgggagctcatcagctctgagtacttcactgcggagcagcggcaggagctgttgcgtcagttccgcacgggcaaggtcaccgtggagaaggtcatcaagattctcattaccatcgtggaggaggtggagaccctgcggcaggagaggctgtccttcagcggcctccgtgcccctgtgccagccagcgagctcctggcttccggggtcctcagcagagcccagtttgagcagctcaaggacggcaagacgacggtcaaggacctttcggagctgggctccgtgcggacgctgctgcagggcagtggctgcctcgccggcatctacctggaggacaccaaggagaaggtgtccatctacgaggccatgcgccggggcctgctgagagccacaacggctgcgctcctgctggaggcgcaggcggccactggcttcctggtggaccccgtgcggaaccagcgcctgtatgtccacgaggccgtgaaggcgggcgtggtgggccccgagcttcacgagcagctgctgtctgccgagaaggccgtcaccggctacagagacccctactcgggcagcaccatctccctcttccaggccatgcagaagggcctggttctccggcagcacggcatccgcctgctggaggcccagatcgccacgggcggcatcatcgaccccgtgcacagccaccgcgtgcctgtggacgtggcctaccagcgcggctacttcagtgaggagatgaaccgcgtcctggcggaccccagcgacgacaccaagggcttctttgaccccaacacgcatgagaacctcacgtacaggcagctgctggagcggtgcgtggaggaccccgagacgggcttgcgccttctgccactgaaaggggcggagaaggctgaggtggtggagaccacgcaggtgtacactgaggaggagacaagaagggcatttgaagagacacagatcgacattcccggcggcggcagccacggcggctccaccatgtccctgtgggaggtgatgcagtcggacctgatccccgaggagcagcgggcccagctgatggctgacttccaggccggccgggtgaccaaggaacgcatgatcatcatcatcatcgagatcattgagaagacagagatcatccgccagcagggtctggcctcctacgactacgtgcgccgccgcctcacggctgaggacctgttcgaggctcggatcatctctctcgagacctacaacctgctccgggagggcaccaggagcctccgtgaggctctcgaggcggagtccgcctggtgctacctctatggcacgggctccgtggctggtgtctacctgcccggttccaggcagacactgagcatctaccaggctctcaagaaagggctgctgagtgccgaggtggcccgcctgctgctggaggcacaggcagccacaggcttcctgctggacccggtgaagggggagcggctgactgtggatgaggctgtgcggaagggcctcgtggggcccgagctgcacgaccgcctgctctcggctgagcgggcggtcaccggctaccgtgacccctacaccgagcagaccatctcgctcttccaggccatgaagaaggagctgatccctactgaggaggccctgcggctgctggatgcccagctggccaccggcggcatcgtggacccccgcctgggcttccaccttcccctggaggtggcttaccagcgtggctacctcaacaaggacacgcacgaccagctgtcagagcccagcgaggtgcgcagctacgtggacccgtccaccgacgagcgcctcagctacacgcagctgctcaggcggtgccgtcgtgacgacggcaccggccagctgctcctgccactgtcggacgcccgcaagctgaccttccgtggcctgcggaagcagatcaccatggaggagctggtgcgctcgcaggtcatggacgaggccacggcgctgcagctgcgggagggcctgacctccatcgaggaggtcaccaagaacttgcagaagttcctggaaggcaccagctgcatcgctggtgtcttcgtggacgccaccaaggaacggctctcggtgtaccaggccatgaagaagggcatcatccgccccggcacagcctttgagctcctggaggcgcaggcggccaccggttacgtcatcgaccccatcaagggactgaagctgacggtggaggaggctgtgcgtatgggcattgtgggccccgagttcaaggacaagctgctgtcggccgagcgcgccgtcactgggtacaaggacccctactctgggaagctcatctccctcttccaggccatgaagaagggcctgatcctgaaggaccatggcatccgcctgctggaggcccagatcgccacgggcggcatcatcgaccctgaggagagccaccggctgcccgtggaggtggcctacaagcgcggcctcttcgatgaggagatgaacgagatcctgaccgacccctcggacgacaccaagggcttctttgaccctaacacggaggagaacctcacctacctgcagctgatggagcgttgtatcactgacccccagacgggcctgtgtctcttgccgctgaaggagaagaagcgggagcggaagacgtcctccaagtcctccgtgcgcaagcgccgagtggtcatcgtggaccccgagacgggcaaggagatgtcagtgtacgaggcctaccgcaagggcctgattgaccaccagacgtacctggagctgtccgagcaggagtgcgagtgggaggagatcaccatctcctcctcggacggcgtggtcaagtccatgatcatcgaccgccgctccgggcgccagtacgacatcgatgatgccatcgccaagaacctcatcgaccgctcggcactggaccagtaccgcgccggcacgctctccatcaccgagttcgccgacatgctctcgggcaacgccggtggtttccgctcccgttcctcctcggtgggatcctcctcctcctaccccatcagccccgccgtctccaggacccagctggcctcctggtcagaccccactgaggagacgggccccgtggctggcatcctggacacggagacgctggagaaggtgtccatcaccgaggccatgcaccggaacctggtggataacatcacggggcagcggctgctggaggcgcaggcctgcaccgggggcatcatcgaccccagcaccggtgagcgcttccctgtcaccgacgccgtcaacaagggcctggtggacaagatcatggtggaccgcatcaacctggcccagaaggccttctgcggcttcgaggacccacgcaccaagaccaagatgtcggccgcccaggccctgaagaagggctggctctactacgaggccggccagcgcttcctggaggtgcagtacctgaccggcggcttgatcgagcccgacacgccgggccgcgtgcccctggacgaggccctgcagcgcggcacggtggacgcccgcaccgcacagaagctgcgtgacgtgggcgcctactccaagtacctcacctgccctaagaccaagctcaagatctcctataaggacgcgctggaccgcagcatggtggaggagggcacggggctgcggctgctggaggctgccgcgcagtccaccaagggctactacagcccctacagcgtcagcggctccggctctaccgctggctcccgcaccggctcgcgcaccggctcccgggccggctcccgccgcggcagctttgacgccaccggctccggcttctccatgaccttctcttcatcctcctactcctcctcgggctacggccgccgctacgcctcggggtcctcggcctccctggggggccctgagtctgccgtggcctgaggctgcctgcgcccaccccgctctgcatgcggcccagcccggctcccaccgaggcgcgggggccgttttcaacgcttaaaggtgtcttcctcccaagtggtgcctaaagtttaaccaaaaagaccagactaatatattaatatatatctgctgtccagacagcctgtatcttgggggacagggctggcccagccctgctggccgcctcaccccctcgggtctcctcactcccttctacctgccactcacacagccaggtgccttggagggtcccaagctgggccccagcccaccctcctgtcttcccagggtagcccgcctgccagtcctagctgcacagggcagctgggcccaaccctgtctgtagagggccctggtgtttctagcactggcctgcacggtgggccttgctggggacggggggccccagtcagcctctctcccagtctacccagagaagccccttccccatgggaagacgaggccctcgggcccagcccccacagtgctgtctgatctgtgctttccagctcaccccccacactcactcctgagacccctggcctccggcgtcagcctccagcctctgttcccctagtaagtgccttccatgtcggcctctaaccccaggccccgaggacccagacccagtggggaggcggacgttccagccggcatggctgggaactgcagacctgtcctcctggtgggtccaggggcccctccagcttgtggagccccacactggggtgccgcctgcccgtctctctcccatggagccccagccccctttgggcccagggacaccagccaggctctgtgctgaccctcctgttgcacccagccctggtctcagcagcgaccacccctgcctccaccctctgagctttgcatgttccactaaccccgggcgggtggcaggtggaggtgtcaggctgctggcgcctctgcaagggcagaacactaacctgaccgtgggcggggccttgcggtatccgcccccaataaaagcaattccaacctt

SEQ ID NO: 1332 - DNA, 14760 bp, Homo sapiens; identical to SEQ ID NO: 1331

SEQ ID NO: 1333 - DNA, 14760 bp, Homo sapiens; identical to SEQ ID NO: 1331

SEQ ID NO: 1334 - DNA, 702 bp, Homo sapiens
atgttccgcatcatcaaatggctgattgccctgcccgtcggcatctttatctttttcaatgcctatgtgtacggcaacatcattacctaccgcgccgtcgcgccccatcggactgcctttatgtcgatgcggatgaagcagtttgaacaggaaggtcgcgatgtcgcactggattaccgctggatgccctacaaacgcatttccaccaacctgaaaaaagccctgattgcttccgaagatgcccgtttcgccgggcacggcggcttcgattggggcggcattcaaaacgccatcaggcgcaaccggaacagcggcaaagtgaaggcgggcggctcgaccatcagccagcagcttgccaaaaacctgtttttaaacgaaagccgcagctatatccgcaaaggcgaagaagcggcgattaccgcgatgatggaagccgttaccgacaaagacaggatttttgaactgtatttaaactcaatcgaatggcactacggcgttttcggcgcggaagccgcgtcccggtatttttatcaaatacccgccgccaagctgaccaaacagcaggcggcaaaactgacggcgcgcgtccccgccccgctctactacgccgaccatccgaaaagcaaacggctccgcaacaaaaccaatatcgtgctcaaacgcatgggttcggcagagttgcctgaaagcgacacggactga

SEQ ID NO: 1335 - DNA, 2500 bp, Homo sapiens
cttgactcgggggagcagcgggtggatcctgtgacgtcagcgggttcgaaccgccggagctgagcgagaggccgggggtgccgagccgggcggggagagctgggccgggagagcagaacagggaggctagagcgcagcgggaaccggcccggagccggagccggagccccacaggcacctactaaaccgcccagccgatcggcccccacagagtggcccgcgggcctccggccgggcccagtcccctcccgggccctccatggcccgggccgctgccctcctgccgtcgagatcgccgccgacgccgctgctgtggccgctgctgctgctgctgctcctggaaaccggagcccaggatgtgcgagttcaagtgctacccgaggtgcgaggccagctcgggggcaccgtggagctgccgtgccacctgctgccacctgttcctggactgtacatctccctggtgacctggcagcgcccagatgcacctgcgaaccaccagaatgtggccgccttccaccctaagatgggtcccagcttccccagcccgaagcctggcagcgagcggctgtccttcgtctctgccaagcagagcactgggcaagacacagaggcagagctccaggacgccacgctggccctccacgggctcacggtggaggacgagggcaactacacttgcgagtttgccaccttccccaaggggtccgtccgagggatgacctggctcagagtcatagccaagcccaagaaccaagctgaggcccagaaggtcacgttcagccaggaccctacgacagtggccctctgcatctccaaagagggccgcccacctgcccggatctcctggctctcatccctggactgggaagccaaagagactcaggtgtcagggaccctggccggaactgtcactgtcaccagccgcttcaccttggtgccctcgggccgagcagatggtgtcacggtcacctgcaaagtggagcatgagagcttcgaggaaccagccctgatacctgtgaccctctctgtacgctaccctcctgaagtgtccatctccggctatgatgacaactggtacctcggccgtactgatgccaccctgagctgtgacgtccgcagcaacccagagcccacgggctatgactggagcacgacctcaggcaccttcccgacctccgcagtggcccagggctcccagctggtcatccacgcagtggacagtctgttcaataccaccttcgtctgcacagtcaccaatgccgtgggcatgggccgcgctgagcaggtcatctttgtccgagagacccccaacacagcaggcgcaggggccacaggcggcatcatcgggggcatcatcgccgccatcattgctactgctgtggctgccacgggcatccttatctgccggcagcagcggaaggagcagacgctgcagggggcagaggaggacgaagacctggagggacctccctcctacaagccaccgaccccaaaagcgaagctggaggcacaggagatgccctcccagctcttcactctgggggcctcggagcacagcccactcaagaccccctactttgatgctggcgcctcatgcactgagcaggaaatgcctcgataccatgagctgcccaccttggaagaacggtcaggacccttgcaccctggagccacaagcctggggtcccccatcccggtgcctccagggccacctgctgtggaagacgtttccctggatctagaggatgaggagggggaggaggaggaagagtatctggacaagatcaaccccatctatgatgctctgtcctatagcagcccctctgattcctaccagggcaaaggctttgtcatgtcccgggccatgtatgtgtgagctgccatgcgcctggcgtctcacatctcacctgttgatcccttagctttcttgccaaggatctagtgccccctgacctctggccaggccactgtcagttaacacatatgcattccatttgtgatgtctaccttggtggctccactatgacccctaacccatgagcccagagaaattcaccgtgataatggaatcctggcaaccttatctcatgaggcaggaggtggggaaggtgcttctgcacaacctctgatcccaaggactcctctcccagactgtgaccttagaccatacctctcaccccccaatgcctcgactcccccaaaatcacaaagaagaccctagacctataatttgtcttcaggtagtaaattcccaataggtctgctggagtgggcgctgagggctccctgctgctcagacctgagccctccaggcagcagggtcccacttaccccctccccaccctgttccccaaaggtgggaaagaggggattccccagcccaagtggaataggacctaaacatcccccttccggggaaagtgggtcatctgaattgggggtagcaattgatactgttttgtaaactacatttcctacaaaatatgaatttatactttga

SEQ ID NO: 1336 - DNA, 2020 bp, Homo sapiens
cttgactcgggggagcagcgggtggatcctgtgacgtcagcgggttcgaaccgccggagctgagcgagaggccgggggtgccgagccgggcggggagagctgggccgggagagcagaacagggaggctagagcgcagcgggaaccggcccggagccggagccggagccccacaggcacctactaaaccgcccagccgatcggcccccacagagtggcccgcgggcctccggccgggcccagtcccctcccgggccctccatggcccgggccgctgccctcctgccgtcgagatcgccgccgacgccgctgctgtggccgctgctgctgctgctgctcctggaaaccggagcccaggatgtgcgagttcaagtgctacccgaggtgcgaggccagctcgggggcaccgtggagctgccgtgccacctgctgccacctgttcctggactgtacatctccctggtgacctggcagcgcccagatgcacctgcgaaccaccagaatgtggccgccttccaccctaagatgggtcccagcttccccagcccgaagcctggcagcgagcggctgtccttcgtctctgccaagcagagcactgggcaagacacagaggcagagctccaggacgccacgctggccctccacgggctcacggtggaggacgagggcaactacacttgcgagtttgccaccttccccaaggggtccgtccgagggatgacctggctcagagtcatagccaagcccaagaaccaagctgaggcccagaaggtcacgttcagccaggaccctacgacagtggccctctgcatctccaaagagggccgcccacctgcccggatctcctggctctcatccctggactgggaagccaaagagactcaggtgtcagggaccctggccggaactgtcactgtcaccagccgcttcaccttggtgccctcgggccgagcagatggtgtcacggtcacctgcaaagtggagcatgagagcttcgaggaaccagccctgatacctgtgaccctctctgtacgctaccctcctgaagtgtccatctccggctatgatgacaactggtacctcggccgtactgatgccaccctgagctgtgacgtccgcagcaacccagagcccacgggctatgactggagcacgacctcaggcaccttcccgacctccgcagtggcccagggctcccagctggtcatccacgcagtggacagtctgttcaataccaccttcgtctgcacagtcaccaatgccgtgggcatgggccgcgctgagcaggtcatctttgtccgagaaacccccagggcctcgccccgagatgtgggcccgctggtgtggggggccgtgggggggacactgctggtgctgctgcttctggctggggggtccttggccttcatcctgctgagggtgaggaggaggaggaagagccctggaggagcaggaggaggagccagtggcgacgggggattctacgatccgaaagctcaggtgttgggaaatggggaccccgtcttctggacaccagtagtccctggtcccatggaaccagatggcaaggatgaggaggaggaggaggaggaagagaaggcagagaaaggcctcatgttgcctccacccccagcactcgaggatgacatggagtcccagctggacggctccctcatctcacggcgggcagtttatgtgtgacctggacacagacagagacagagccaggcccggccctcccgcccccgacctgaccacgccggcctagggttccagactggttggacttgttcgtctggacgacactggagtggaacactgcctcccactttcttgggacttggagggaggtggaacagcacactggacttctcccgtctctagggctgcatggggagcccggggagctgagtagtggggatccagagaggacccccgcccccagagacttggttttggctccagccttcccctggccccgtgacactcaggagttaataaatgccttggaggaaaacatca

SEQ ID NO: 1337 - DNA, 3690 bp, Homo sapiens
ggcgcactgcgaacgccggctgagctgagtctcgctgctcggtgcgaggcggcggagagcgaggcctggtgagcaccgccgaggcgcgggccagctcttcgaggttgtgcgcgggagtggcacggcgggcgggcgagcgaggggctaacttcagcggtggcaccgggatcggttgccttgagcctgaaatcatgaccaccccaggaaaagagaactttcgcctgaaaagttacaagaacaaatctctgaatcccgatgagatgcgcaggaggagggaggaagaaggactgcagttacgaaagcagaaaagagaagagcagttattcaagcggagaaatgttgctacagcagaagaagaaacagaagaagaagttatgtcagatggaggctttcatgaggctcagattaataacatggagatggcaccaggtggtgtcatcacttctgacatgattgaaatgatattttccaaaagcccagagcaacagctttcagcaacacagaaattcaggaagctgctttcaaaagaacctaaccctcctattgatgaagttatcagcacaccaggagtagtggccaggtttgtggagttcctcaaacgaaaagagaattgtacactgcagtttgaatcagcttgggtactgacaaatattgcttcaggaaattctcttcagacccgaattgtgattcaggcaggagctgtgcccatcttcatagagttgctcagctcagagtttgaagatgtccaggaacaggcagtctgggctcttggcaacattgctggagatagtaccatgtgcagggactatgtcttagactgcaatatccttccccctcttttgcagttattttcaaagcaaaaccgcctgaccatgacccggaatgcagtatgggctttgtctaatctctgtagagggaaaagtccacctccagaatttgcaaaggtttctccatgtctgaatgtgctttcctggttgctgtttgtcagtgacactgatgtactggctgatgcctgctgggccctctcatatctatcagatggacccaatgataaaattcaagcggtcatcgatgcgggagtatgtaggagacttgtggaactgctgatgcataatgattataaagtggtttctcctgctttgcgagctgtgggaaacattgtcacaggggatgatattcagacacaggtaattctgaattgctcagctctgcagagtttattgcatttgctgagtagcccaaaggaatctatcaaaaaggaagcatgttggacgatatctaatattacagctggaaatagggcacagatccagactgtgatagatgccaacattttcccagccctcattagtattttacaaactgctgaatttcggacaagaaaagaagcagcttgggccatcacaaatgcaacttctggaggatcagctgaacagatcaagtacctagtagaactgggttgtatcaagccgctctgtgatctcctcacggtcatggactctaagattgtacaggttgccctaaatggcttggaaaatatcctgaggcttggagaacaggaagccaaaaggaatggcactggcattaacccttactgtgctttgattgaagaagcttatggtctggataaaattgagttcttacagagtcatgaaaaccaggagatctaccaaaaggcctttgatcttattgagcattacttcgggaccgaagatgaagacagcagcattgcaccccaggttgaccttaaccagcagcagtacatcttccaacagtgtgaggctcctatggaaggtttccagctttgaagcaatactctgctttcacgttcctgtgtcagaccaggctacccagtcgagtcctcttgtggagcccacagtcctcatggagctaacttctcaaatgttttccataatactgtttgcgctcatttgcttgccttgcgcacctgctctcttacacacatctggaaaacctccggctctctgtggtggaatacccttctaataaaagggtaaccagaacggcccactctcttttacggaaaaatccctaggctttggagatccgcacttacattagagttatgggaatatacacatattaatgtggctccctttttcttgtgggggaataaaagaggactcctcctcattccctttaacatgggggaaaaaactgacattaaaagatgagactaaatctttatcttgaattttacacaactacttacgacaagggagatgtttagacctgttgtgtatacttcagagtacttttcatgagttcttccacagtgaacccttggattacctggtggctttttctagccagatttgcattaatccttactgagattggatggttttctttcctctattggcgccattcttcagatattaaagttaaaccatccactccctcaccttcagccttcagtgaatgtgctttctagttgtcaggaatgctgaagaattaacactttgactcctaaatgtgatactgaaaggagaggggcacatattaatttgtatcgcttttgcttctctttggtcttttgtgtcttagaatttggaagtggttcatttctgttgctggtatgaggatttcgaatacttagtaatcgaaaaccatatcctgtaatttaataaaaaaaactaaggacgaaaaaaccctccaattttcccaaatgcaatcagtgtaactaggggctgtgtttctgcattaaaataaatgtttcaggctttgtggtcctgatcaaggtcctcattaaaaaattggagttcaccctaggtgcttttcccctctgtgactggcagataacacatacttttgaaagtaactttgggatttttttcttaggtgcagctcgattctaatcttttcatgctgcacacgattcctttaatgtagcatccttatctgaaagaaataaccatcttctcaacatgacctgcttaacccaaataagaacagtgatcttataacctcattgtttcctaatcattttatttcatctcctgctagtactgtgccgcttccccctccccccacacaaaataaaaacagtatctgccttctggctcatttaatgatgactgcaatctgtacctgcaaatggcgcttccagtactgtgttcagtgatccacatttgtgcttggactggaatgaaaaaatacgcttaattgccaagacaactgcaaatgagttcaatacgacttctcggtgctagttggccatcttgactcaatgttgggatacactaccagagaagatttttttgttgatgtgctgttcaaagtgaattctgaaggaaaaggttgctcacctctgtttcagagcatacccttttaaacctttttagacttgtcctcttctagaattcattataaccccaaagtgtaaaaactatttggaagttgcccctgacaagctattatacatctctggtaaatcctgctgaatgtaagggatattcagagcttttcatacctcatcatgatgttatttaagcagccaacttatgtgacctgatttaaacttttaaaaaatccacttcattcaaactagaaagagtcaaagacaaaggacatttatcagccaagagtgtgacgcattcttcgcatctagtctgtagtagtgtctgtgctctgggatggataccgtctgatgtctgtttgttattgatg

SEQ ID NO: 1338 - DNA, 6980 bp, Homo sapiens
gaaagctgccgctgaagctgccgccgttgcctccgccgccaagagtgagcgagcggacccgcgatggagaccatggcgagcccagggaaagacaattatcgaatgaagagctataagaacaatgctctaaaccctgaagaaatgagacgaagaagagaggaagagggcattcagctccggaagcagaagcgagagcaacaactttttaaacggagaaatgtggagctgattaatgaagaagctgccatgttcgatagtcttctcatggactcttatgtgagctctaccactggggagagtgtgatcacaagagagatggtggagatgctcttttctgatgattctgacctgcagttagcaaccacacagaaattccggaaactgctctccaaagagcctagtcctccaatagatgaagttatcaacactccaagagtggtggatcggttcgtggagtttctgaagaggaatgagaattgtacattacagtttgaagctgcctgggctctaacgaatattgcctctggaacctctcagcagaccaaaattgtcattgaagcaggggctgtccccatttttatagagctgcttaattcagactttgaggatgttcaggaacaggcagtctgggcactgggaaacatagctggagatagctctgtttgccgagattacgtcttgaactgttccatccttaatcctttgttaacactccttaccaagtccacacgactgacgatgacacggaatgcagtctgggccctgtcaaatctctgccgagggaaaaacccacccccagagtttgcaaaggtctctccttgtttgcctgtactgtctcgcctactcttcagcagcgactcggacttgctggcagatgcttgctgggccctttcttatctgtctgatggccccaatgagaagatccaggcagtcatagactccggagtctgccggagattggtagagctgctgatgcacaatgattacaaagtggcttctcctgccctgagagccgtgggtaacatcgtcactggggatgacatccagacccaggtcattcttaactgttcagccctaccttgccttctccacttgttgagcagtcccaaggagtcaatccggaaggaagcttgctggactatttcaaatattactgctggcaacagggctcaaatacaggctgttatagatgcaaatatcttccctgtgttgatcgaaatccttcagaaagcagagtttcgtacaaggaaagaggcagcctgggccatcaccaatgccacatcaggaggaacccctgagcagatcaggtacctggtctcactgggctgcatcaaacccctatgtgacttgctgactgtaatggattcgaagattgtgcaagtggccctcaatggactggagaacatcctgcggcttggagagcaagagggcaagcgcagtggctcaggggtcaatccttattgtggcctcatagaggaagcctatggcttggataaaattgagtttctccagagccacgagaaccaggagatctaccagaaggccttcgacctcattgagcactactttggtgtagaagacgatgatagcagcctggctccccaagtcgatgaaacgcaacagcagttcatcttccagcagcctgaggcccccatggagggcttccagctataatatctgcctccagggaggggaggggatgggaagcaccaccagccagcggaagagcagccctctggtgggcgggaaaccagtgtccccaccatcagccaccacacacctctgctgccctggagactgtgctcttgacctgctccgcccccttccctggagggagcaccctctggacagacagaaccatctgaggctcacctttgggttttgtgacaagaaggggacgtgttgggtttttcttccttacactatattttggctgcacacatgtctttaacccaggagcccaggggtagacaaaggaggactaaggtaatcaatttgcacctttttttatttttattttttttctttttttcttcagtggtgacttccttccctttatcttttttcattcttcccggtcctctgccctgatctgtgtaactcttatcttgggtacttgagcagacggtatattccagaggtgggaggtgggaggggaagggagaaatccaaaacaaagtgttcttgctctgacagaatattaatcttgtacgcttggattgagttatttaatttttttttcttttgcacatttttcttgtattaagattgctcttcccaagagccacaagttcctggttttagtaaacccagctgcctgcattgcctgggactagaggctggggaggctaccatgaaacaaaggtccctccctccctctgactctttgcccagacctctttagtttgggggatcctcctcactctcctgaagtgtctcaagtataccagtgggagtgcaggggaggagcacaggccttcagatggggcttcccacgtgtagctactgatcccatatttcctactcaccttccaaatggtgcgacccaacttcatttgtttacttgaaaattccccctcgaggttgagagaacctctgaggtggctgtattttctcctaagcttgagatagggggctgtggtccttcctttctcctgaggagaaagtccttgctctggtgacctgtaagttgcagaggagggtggagtgagagtgtcatgtattgggatagtcagggatccctgcctttggcctttcttcttcttcttcttcctcttccatagttggatcatgtatattttacttctaaaggagagaatgtcaaaaagttctgtatttttttatattctatatattaggtaggtcaatcttaattggtctcaagaggaagaactgtctgtcatttcggtaagtaggatactgtgaggaagaccaaaaagagatatggatgcttcctcgctcaggaggcctgagcttggtccttttcctctctgcttggattctggaccaccacctgggaccaaccttcagctctggaaccttcataaagcaggtcagcgtggcctgattgtcccaggacctgaagggagcaaggatggcctcagggcctggtgaagtctgctactctgtccttactgctgaacatcctgcttgtatcaggaaactcagaagcagtttgccttgtcaaattcaatctcaatggccattgtccacataactgatcacccatggctgcctctcctattatctattatcactgaaacttagtagcctgctttttttttttttttttttagagctattgcgtatcttccctgtttgggatccttgtacctggtttgggttttcccttccttgtgacaattataatccagatgcctcttctttctgtttgaattacggtagtgcattgccttagtggcttgcctgtgcctctgggtggattacatatgatagtaaagcccacctgtttggatgggagtagaggaagttggtgtagaccagctgtggagctgaaggcacagtctgccccacccccacctccccactgtggttagtcagaggcatcctgctccaagctctgcttttccttcctctgaaacaatgccattcttgcttctattgctacacatctccttctggctcaggtgaaatccatgcccttctgcttatagacctaaagttcaggtacttattattggccattgatcttgaatttgccctctcctagtgctgcagtcccacttcaaagccattttctgaggaggatggtttaggtctggcaattgtccttgaaaaatcccacccatgttgtaccaccttggtgagtcatatgccactcatcagcttgggaatgatggctgccaactcccaatctcccaggaaggcagggggcagaatctttttttcacttggcctgctacctccattaaaaaaccattctcttacagtttaaaaaaaaaaaaaaaaaaaaagccttcccctacccaacctccgcccattgttctcttccaaagggcaatttagtaggatctactttgtacatctcaagtaagagttaagtccctgatacagggaccagtttcttagtgtaagacatacacatcctgcttgtccagctgttcctccaaaatctactttggcttcagctccgggtcctgtaccagatggaaaatgtttttggtgatctggctgctgcttaaagccagttttccctaagaactccaaaggctaaagtctactaggggcagagtgtgaggatagatttctaatcagagaaaagtggcctccaggagctttcatttatgtcttctccagaccaggttttcctgttatcttcctttaatcccctttcaaccaacaggtgaagttcttccagcccacagaggtagtaatatcatcttttctatctcctcctctcctttggccatgtaatgaagcaaaatattatttatttagcccaggcttgagagccactgtttgtggacagtcttcatctagattccataccctggcctaggcgaggtaaggctctctggttattgccaggatggagcccctctaccccagtctgctgtagggaataccctaattagttgaggcatgcttttggaatcctggcatgttggcatatggctggtctatcctttttaagatctctggttgggggtatctggatatggattaggagggacaaggagcctttttcttggctaatgttttccaatacttttttgaatggtgccagcccctccaggcatcccacccccaaatcatcatctttagtactaacagggtgtctggtcttagaagcctcccttcagatcccagctgaccctggtgactgcctggccttgatgttggctgcagccttctgatagaaccacatggattccacccacagctggccaggcttgttacatgggtcagggaatacaaatggcccccccccagggagcaggtgttggcctcagttttcagggacccttggtgttgctccttacctagagcccattaatctaccccatcaactctctgccatgaaagccatcttccaggagccctgttttttggagctgaactgcacagattatagctgctattgtacttaaataagggagaggaaaagaaggttctcaggcacagactttctatttttctcaagccaaaccagtttaaaatgtctagcagaatgaactgtatttccatttcttcatgtctacctgccttccccccacaccctaaagttgtacttgtttctagcaaactagaaggaaaagataggaaagcctggcactactaacctcacctctcatacacctctttgaaggccccagctcttttgttcaggcctctcttctcccctagactcactcagcttggtatccatcatcttgagcattcttcagtagattcatctagggttcagattccagactctcagctgaagacagggagccaatttcccccaggtccctgcaggtaatccagggaccccatagggagaacaggctgactggggcattaggaatgtttgtacctctctgcttccctggcagcctggggaagggtgcagggctcagtgcgctaaaccatggtaaacatcttcaatagaactaccctagaatttagtgagtgtgagactgagatattgctcagaataaatttattccatagccatttaggattgcatgttctggaccaaccttgtccagtatgttttctgtttgagctttttcattcttttgttaagccaacaagttgagaatttggccctgctgggatccatgtagtgggcactagctgctctttggccaaggccttcataaatgattcagtctctcattatctgtcctctagccccacaccctgatttagaccgtggcaaaggaagaacttgaggtcaagaccaaccaaatctgtgaattaaagctgttatttttttctctgcaagggcgctttgcttcaggtctgggctatgtgcagaacctaagcaggctgtgagagttagaagaggcagtattacatgttaggcccagaacaccatgggctgacttctgatgtccacattagctcgtacctgaaccctgttgctgaatgccagccctgttctcctgtaactattatatacgccatggcctggggggcattgaaggaagtaagctctcagagatcctaacactggctgggaacctctgactcagagcatgtctttaaagagtccacatctggccaggcgcggtggcacatgcctgtaatcccagcactttgggaggccgaggcgggtggatcacgaggtcaggagtttgagaccagcctggcaacatagttaaaaccccgtccctacaaaaataaaaaaataaaaaaaataagccaggtgtggtggtgggcacctgtgatctcagctacgtgggaggctgaggcaggagaatctcttgaacctaggaggcagaggttgcagtgagccaagattgtgccagcctgggcgacagggtgaggctcttgtctcaaaaaaaaaagtccacatcttcatgaaccctcagactctggagttgggtgtcggcttttttagccagcttttgtgggaattgcctttgacctattaaagaaggaaagtgggtaatggagtcccagccactcaagagactggatatcccccgagaatggcttgggttaccagctatggacccttggaagatgaatctaatccttctcactggtttttctttgcaaattcatttgcttttatttttctaataacaataaactctattttccatgttctcagggcccctgggtagacagacacagcttgatttcagagcagacataggcgaagaaaacatggcattgagtgtgctgagtccagacaaatgttatttatatacacatccaaatttgaagagaaaatgtatttctttaggtttcaaacactgtaatagatataaagcaaaaataaaaacctgttgcaaagttctaaa

SEQ ID NO: 1339 - DNA, 3690 bp, Homo sapiens; identical to SEQ ID NO: 1337

SEQ ID NO: 1340 - DNA, 3935 bp, Homo sapiens
ggactgcgaacgccggctaagctgagtcttggtgctccgtgcgaggcggcggagagcgaggcctggtgagcaccgccgaggcgcgggccagctcttcgaggttgtgcgcaggagcggcacggcgggcgggcgggcgagcgaaaggctcacttcagcggtggcaccgggatcggttgccttgagcctgaaatcatgaccaccccaggaaaagagaactttcgcctgaagagttacaagaacaaatctctgaatcccgatgagatgcgcaggaggagggaggaagaaggactgcagttacgaaagcagaaaagagaagagcagttattcaagcggagaaatgttgctacagcagaagaagaaacagaagaagaagttatgtcagatggaggctttcatgaggctcagattaataacatggagatggcaccaggtggtgtcatcacttctgacatgattgaaatgatattttccaaaagcccagagcaacagctttcagcaacacagaaattcaggaaactgctttcaaaagaacctaaccctcctattgatgaagttatcagcacaccaggagtagtggccaggtttgtggagttcctcaaacgaaaagagaattgtacactgcagtttgaatcagcttgggtactgacaaatattgcttcaggaaattctcttcagacccggattgtgattcaggcaggagctgtgcccatcttcatagagttgctcagctcagagtttgaagatgtccaggaacaggcagtctgggctcttggcaacattgctggagatagtaccatgtgcagggactatgtcttagactgcaatatccttccccctcttttgcagttattttcaaagcaaaaccgcctgaccatgacccggaatgcagtatgggctttgtctaatctctgtagagggaaaagtccacctccagaatttgcaaaggtttctccatgtctgaatgtgctttcctggttgctgtttgtcagtgacactgacgtactggctgatgcctgctgggccctctcatatctgtcagatggacccaatgataaaattcaagcagtcatcgatgcgggagtatgtaggagacttgtggaactgctgatgcataatgattataaagtggtttctcctgctttgcgagctgtgggaaacattgtcacaggggatgatattcagacacaggtaattctgaattgctcagctctgcagagtttattgcatttgctgagtagcccaaaggaatctatcaaaaaggaagcatgttggacgatatctaatattacagctggaaatagggcacagatccagactgtgatagatgccaacattttcccagccctcattagtattttacaaactgctgaatttcggacaagaaaagaagcagcttgggccatcacaaatgcaacttctggaggatcagctgaacagatcaagtacctagtagaactgggttgtatcaagcccctctgtgatctccttacggtcatggactctaagattgtacaggttgccctaaatggcttggaaaatatcctgaggcttggagaacaggaagccaaaaggaatggcactggcattaacccttactgtgctttgattgaagaagcttatggtctggataaaattgagttcttacagagtcatgaaaaccaggagatctaccaaaaggcttttgatcttattgagcattacttcgggactgaagatgaagacagcagcattgcaccccaggttgaccttaaccagcagcagtacatcttccaacagtgtgaggctcctatggaaggtttccagctttgaagcaatactctgctttcacgttcctgtgtcagaccaggctacccagttgagtcctcttgtggagcccacagtcctcatggagctaacttctcaaatgttttccataatactgtttgcgctcatttgcttgcctcgcgcacctgctctcttatacacatctggaaaacctccggctctctgtggtggaatacccttctaataaaagggtaaccagaacggcccactctctttacggaaaaatccctaggctttggagatccgcacttacattagagttatgggaatatacacatattaatgtgactccctttttcttgtgggggaataaaagaggactcctcctcattccctttaacatgggggaaaaaactgacattaaaagatgagactaaatctttatcttgaattttacacaactacttacgacaagggagatgtttagacctgttgtgtatacttcagagtacttttcatgagttcttccacagtgaacccttggattacctggtggctttttctagccaaatttgcattaatccttactgagattggatggttttctttcctctattggcgccattcttcagatattaaagttaaaccatccactccctcaccttcagccttcagtgaatgtgctttctagttgtcaggaatgctgaagaattaacactttgactcctaaatgtgatactggtttgtagattcccttagagcagaaaggagaggggcacatattaatttgtatcgcttttgcttctctttggtcttttgtatcttagaatttggaagtggttcatttctgttgctggtatgaggatttcgaatacttagtaatcgaaaaccatatcctgtaatttaattaaaaaaactaaggaagaaaaaaccctccaattttcccaaatgcaatcagtgtaactaggggctgtgtttctgcattaaaacaaatgtttcgggctttgtggtcctgatcaaggtcctcattaaaaaattggagttcaccctaggtgcttttcccctctgtgactggcagataacacatacttttgaaagtaactttgggatttttttcttaggtgcagctcgattctaatcttttcgtgctgcatacaattcctttaatgtagcatccttatctgaaagaaataaccatcttctcaacacgacctgcttaacccaaataagaacagtgatcttataatctcattgttccctaatcattttatttcatctcctgctagtactgtgccgcttccccctccccccacacaaaataaaaacagtatctgccttctggctcatttaatgatgactgcaatctgtacctgcaaatggctcttccagtactgtgttcagtgatccacatttgtgcttggactggaatgaaaaaatacgcttaattgccaagagaactgcaaatgagttcaatacgacttctcggtgctagttggccatcttgactcaatgttgggatacactaccagagaagattttttttgttgatgtgctgttcaaagtgaattctgaaggaaaaggttgctcacctctgtttcagagcatacccttttaaacctttttagacttgtcctcttctagaattcattataaccccaaagtgtaaaaactatttggaagttgcccctgacaagctattatacatctctggtaaatcctgctgaatgtaagggatattcagagcttttcatacctcatcatgatgttatttaagcagccaacttatgtgacctgatttaaacttttaaaaaatccacttcattcaaactagaaagagtcaaagacaaaggacatttatcagccaagagtgtgacgcattcttcgcatctagtctgtagtagtgtctgtgctctgggatggataccgtctgatgtctgtctgttattgatggcgcagccactgcaaaactagtcaactcccatctataactgttactttttctagtgctgctttgtgctgagagaacattttagtttactgcacttgacctgtaaaagactttgattctttgtaattttagagataaattagttggttaatttaaagaagaaatttcaatgttgcctttacatcacattaaaatataacttctttcagaaggaaaaaaaaaa

SEQ ID NO: 1341 - DNA, 3763 bp, Homo sapiens
ggccgctgaagctgccgctgctgcctccgccgccaagagtaagcgagcggagccgcgatggagaccatggcgagcccagggaaagacaattatcgaatgaagagctataagaacaatgctctaaaccctgaagaaatgagacgaagaagagaggaagagggcattcagctccggaagcagaagcgggagcaacaactttttaaacggcgaaatgtggagctgattaatgaagaagctgccatgttcgatagtcttctcatggactcttatgtgagctctaccactggggagagtgtgatcacaagagagatggtggagatgctcttttctgatgattctgacctgcagttagcaaccacacagaaattccggaaactgctctccaaagagcctagtcctccaatagatgaagttatcaacactccaagagtggtggatcggtttgtggagtttctgaagaggaatgagaattgtacattacagtttgaagctgcctgggctctaacgaatattgcctctggaacctctcagcagaccaaaattgtcattgaagcaggggctgtccccatttttatagagctgcttaattcagactttgaggatgttcaggaacaggcagtctgggcactgggaaacatagctggagatagctctgtttgccgagattacgtcttgaactgttccatccttaatcctttgttaacactccttaccaagtccacacgactgacgatgacacggaatgcggtctgggccctgtcaaatctctgccgagggaagaacccacccccagagtttgcaaaggtctctccttgtttgcctgtactgtctcgcctactcttcagcagcgactcggacttgctggcagatgcttgctgggccctttcttatctgtctgatggccccaatgagaagatccaggcagtcatagactccggagtctgccggagattggtagagctgctgatgcacaatgattacaaagtggcttctcctgccctgagagccgtgggtaacatcgtcactggggatgacatccagacccaggtcattcttaactgttcagccctaccttgccttctccacttgttgagcagtcccaaggagtcaatccgtaaggaagcttgctggactatttcaaatattactgctggcaacagggctcaaatacaggctgttatagatgcaaatatcttccctgtgttgatcgaaatccttcagaaagcagagtttcgtacaaggaaagaggcagcctgggccatcaccaatgccacatcaggaggaacccctgagcagatcaggtacctggtctcactgggctgcatcaaacccctatgtgacttgctgactgtaatggattcgaagattgtgcaagtggccctcaatggactggagaacatcctgcggcttggagaacaagagggcaagcgcagtggctcaggggtcaatccttattgtggcctcatagaggaagcctatggcttggataaaattgagtttctccagagccacgagaaccaggagatctaccagaaggcctttgacctcattgagcactactttggtgtagaagacgatgatagcagcctggctccccaagtcgatgaaacgcaacagcagttcatcttccagcagcctgaggcccccatggagggcttccagctataatatctgcctccggggaggggaggggatgggaagcaccaccagccagcggaagagcagccctctggtgggcgggaaaccagtgtccccaccatcagccaccacacacctctgctgccctggagactgtgctcttgacctgctccgcccccttccctggagggagcaccctctggacagacagaaccatctgaggctcacctttgggttttgtgacaagaaggggacgtgttgggtttttcttccttacactatattttggctgcacacatgtctttaacccaggagcccaggggtagacaaaggaggactaaggtaatcaatttgcaccttttttttatttttattttttttcttttttttttttcagtggtgacttccttccctttatcttttttcattcttcccggtcctctgccctgatctgtgtaactcttatcttgggtacttgagcagacggtatattccagaggtgggaggtgggaggggaagggagaaatccaaaacaaagtgttcttgctctgacagaatattaatcttgtacgcttggattgagttatttaatttttttttcttttgcacatttttcttgtattaagattgctcttcccaagagccacaagttcctggttttagtaaacccagctgcctgcattgcctgggactagaggctggggaggctaccatgaaacaaaggtccctccctccctctgactctttgcccagacctctttagtttgggagatcctcctcactctcctggagtgtctcaagtataccagtgggagtgcaggggaggagcacaggccttcagggggcttcccgcgtgtagctactgatcccatatttcctactcaccttccaaatggtgcgacccaacttcatttgtttacttgaaaattccccctcgaggttgagagaacctctgaggtggctgtatttactcctaagcttgagatagggggctgtggtccttcccttctcctgaggagaaagtccttgctctggtgacctgtaagttgcagaggagggtggagtgagagtgtcatgtattgggatagtcagggatccctgcctttggcctttcttcttcttcttcctcttccatagttggatcatgtatattttacttctaaaggagagaatgtcaaaaagttctgtatttttttatattctatatattaggtaggtcaatcttaattggtctcaagaggaagaactgtctgtcatttctgtaagtaggatactgtgaggaagaccaaaaagagatatggatgcttcctcgcttaggaggcctgagcttggtccttttcctctctgcttggattctggaccaccacctgggaccaaccttcagctctggaaccttcataaggcaggtcagcgtggcctgattgtcccaggacctgaagggagcaagggtggcctcagggcctggtgaagtctgctactctgtccttactgctgaacatcctgcttgtatcatgaaactcagaagcagtttgccttgtcaaattcaatctcaatggccattgtccacataactgatcacccatggctgcctctcctattatctattatcactgatacttagtagcctgctattgcttatcttccctgtttgggatccttgtacctggtttgggttttcccttccttgtgacaattataatccagatgcctcttctttctgtttgaattacggtagtgcactgcctcagtggcttgcctgtgcgtctgggtggattacatatgatagtaaagcccacctgtttggatgggagtagaggaagttggtgtagaccagctgtggaactgaaggcacagtctgccccacccccacctccccactgtggttagtcagaggcatcctgctccaagctctacttttccttcctctgaaacaatgccattcttgcttctattgctacacatctccttctggctcaggtgaaatccatgcccttctgcttacagacctaaagttcaggtacttattggccattggtcttgaatttgccctctcctagtgctgcagtcccacttcaaagccattttctgaggaggatggtttaggtctggcaattgtccttgaaaa

SEQ ID NO: 1342 - DNA, 6980 bp, Homo sapiens; identical to SEQ ID NO: 1338

SEQ ID NO: 1343 - DNA, 2382 bp, Homo sapiens
agcctcggggtctcggagaaggggcgcaggtggccgccatcttggattgcgaactgggtcgctacgcttcacgccaggggcggagtggcggcccttctgttacccgccacacacgtcgccgctggggactgggaaatcagggcatcggagagtgccacattaatggatgccatggctagtccagggaaagataactatagaatgaaaagttataagaataaagccctaaatcctcaagagatgcgtagacgaagagaagaagaaggaatacagcttagaaaacaaaaaagagaagaacagttgttcaaacgcagaaatgtctatttgcccagaaatgatgaatctatgcttgaaagtcctatacaggatccagatattagttccactgtacccattccagaggaagaagttgttactacagatatggttcagatgattttttctaataatgctgatcaacagctaacagcaacacagaaatttagaaagctgctttctaaagaacctaatccaccaatagatcaagttatacagaaaccaggagttgtacagagatttgtgaaatttcttgaaagaaatgaaaattgcactttacaatttgaagctgcatgggcattaacaaatatagcatctggaacttttctgcataccaaggtagtgattgaaactggggctgttccgatttttatcaaacttcttaattctgaacatgaagatgttcaggaacaggctgtttgggcacttggtaatattgctggtgacaatgcagaatgcagagattttgttttgaattgtgaaatacttccacctcttttagagttattaacaaattcaaacagactcacaacaacaagaaatgccgtgtgggccctctcaaatttatgtagaggcaaaaaccctcctccaaactttagtaaggtttcaccttgcttaaatgtcctgtcacgactgttgtttagcagtgacccagatgtgttagcagacgtgtgttgggccctttcttatctctccgatggacccaatgataaaattcaagcagtcattgattctggagtctgtcgaagattggtggaacttttgatgcacaatgattataaagttgtatcacctgcattaagggcagttggtaatattgtgactggtgatgatattcaaacacaggtaattttgaattgttctgcattaccctgtctcttacatttattgagtagcccaaaggagtcaattagaaaagaagcctgctggactgtttctaacatcactgctggaaatagagctcagattcaggctgttatagatgcaaatatttttcctgttttgattgagattcttcagaaagcagagtttcgtaccagaaaagaagcagcttgggctataactaatgcaacatcaggaggtactccagagcaaataaggtatttggtagctttaggctgcattaaaccactttgtgatcttttgactgttatggactccaaaatagtccaagtggctttaaatggacttgaaaatattttacgtcttggagaacaagaatctaagcagaatggaataggcattaatccatactgtgctctcattgaagaagcatatggtctggataaaattgagtttttgcaaagccatgaaaatcaggaaatttaccagaaggcatttgatctgattgaacattactttggtgtagaagaagatgaccccagcattgtacctcaggtggatgaaaaccaacaacagtttatatttcagcagcaggaagcaccaatggatggatttcaactttaacttactggaggaaaaaaaatttatggctaaaaagggtagcttcaggtaactcctctttgttgccaatgtaagaatgtttgtttttttacatagaacagtaaagagaatttgatgcacttttagaaagcaaaatgaaacaaaaatttccattcagatgcaacctttcattgtagtttgttgttgttttagttttgttgttgtgcctgtatttatatcttctattgtttggatttttgtatctatttgtgaataattgaatatgcaattatttagtaatttaagcttgaaaaggagaattttggtgaagcattacttagtaattctgaattttttcaagcattcttggaaactgcacattagcagtaaacctattgataattgcattttggcagtaagtcttacacatctaatctctactaaatctacctctatcttgaagcagaaataaaaacaaaaaagcttcagaagcatgaaataatgcaaatgctaaattagaatgtgaaaatatttattaccttaaattatacatatcactgtgctgtaggttatactttgcaaaaaattgcaacagaaaacctataaaatttatttataaaacag

SEQ ID NO: 1344 - DNA, 1694 bp, Homo sapiens
atgccatggctagtccagggaaagataactatagaatgaaaagttataagaataaagccctaaatcctcaagagatgcgtagacgaagagaagaagaaggaatacagcttagaaaacaaaaaagagaagaacagttgttcaaacgcagaaatgtctatttgcccagaaatgatgaatctatgcttgaaagtcctatacaggattcagatattagttccactgtacccattccagaggaaggagttgttactacagatatggttcaaatgattttttctaataatgctgatcaacagctaacagcaacacagaaatttagaaagctgctttctaaagaacctaatccaccaatagatcaagttatacagaaaccaggagttgtacagagatttgtgaaatttcttgaaagaaatgaaaattgcactttacaatttgaagctgcatgggcattaacaaatatagcatctggaacttttctgcataccaaggtagtgattgaaactggggctgttccgatttttatcaaacttcttaattctgaacatgaagatgttcaggaacaggctgtttgggcacttggtaatattgctggtgacaatgcagaatgcagagattttgttttgaattgtgaaatacttccacctcttttagagttattaacaaattcaaacagactcacaacaacaagaaatgccgtgtgggccctctcaaatttatgtagaggcaaaaaccctcctccaaactttagtaaggtttcaccttgcttaaatgtcctgtcacgactgttgtttagcagtgacccagatgtgttagcagacgtgtgttgggccctttcttatctttccgatggacccaatgataaaattcaagcagtcattgattctggagtctgtcgaagattggtggaacttttgatgcacaatgattataaagttgtatcacctgcattaagggcagttggtaatattgtgactggtgatgatattcaaacacaggtaattttgaattgttctgcattaccctgtctcttacatttattgagtagcccaaaggagtcaattagaaaagaagcctgctggactgtttctaacatcactgctggaaatagagctcagattcaggctgttatagatgcaaatatttttcctgttttgattgagattcttcagaaagcagagtttcgtaccagaaaagaagcagcttgggctataactaatgcaacatcaggaggtactccagagcaaataaggtatttggtagctttaggctgcattaaaccactttgtgatcttttgactgttatggactccaaaatagtccaagtggctttaaatggacttgaaaatattttacgtcttggagaacaagaatctaagcagaatggaataggcattaatccatactgtgctctcattgaagaagcatatggtctggataaaattgagtttttgcaaagccatgaaaatcaggaaatttaccagaaggcatttgatctgattgaacattactttggtgtagaagaagatgaccccagcattgtacctcaggtggatgaaaaccaacaacagtttatatttcagcagcaggaagcaccaatggatggatttcaactttaacttactggaggaaaaaaaatttatggctaaaaagggtagcttcaggtaactcctctttgttgccaatgtaaggaactg

SEQ ID NO: 1345 - DNA, 6926 bp, Homo sapiens
tcttttcttctagagaccatggcgagcccagggaaagacaattatcgaatgaagagctataagaacaatgctctaaaccctgaagaaatgagacgaagaagagaggaagagggcattcagctccggaagcagaagcgagagcaacaactttttaaacggagaaatgtggagctgattaatgaagaagctgccatgttcgatagtcttctcatggactcttatgtgagctctaccactggggagagtgtgatcacaagagagatggtggagatgctcttttctgatgattctgacctgcagttagcaaccacacagaaattccggaaactgctctccaaagagcctagtcctccaatagatgaagttatcaacactccaagagtggtggatcggttcgtggagtttctgaagaggaatgagaattgtacattacagtttgaagctgcctgggctctaacgaatattgcctctggaacctctcagcagaccaaaattgtcattgaagcaggggctgtccccatttttatagagctgcttaattcagactttgaggatgttcaggaacaggcagtctgggcactgggaaacatagctggagatagctctgtttgccgagattacgtcttgaactgttccatccttaatcctttgttaacactccttaccaagtccacacgactgacgatgacacggaatgcagtctgggccctgtcaaatctctgccgagggaaaaacccacccccagagtttgcaaaggtctctccttgtttgcctgtactgtctcgcctactcttcagcagcgactcggacttgctggcagatgcttgctgggccctttcttatctgtctgatggccccaatgagaagatccaggcagtcatagactccggagtctgccggagattggtagagctgctgatgcacaatgattacaaagtggcttctcctgccctgagagccgtgggtaacatcgtcactggggatgacatccagacccaggtcattcttaactgttcagccctaccttgccttctccacttgttgagcagtcccaaggagtcaatccggaaggaagcttgctggactatttcaaatattactgctggcaacagggctcaaatacaggctgttatagatgcaaatatcttccctgtgttgatcgaaatccttcagaaagcagagtttcgtacaaggaaagaggcagcctgggccatcaccaatgccacatcaggaggaacccctgagcagatcaggtacctggtctcactgggctgcatcaaacccctatgtgacttgctgactgtaatggattcgaagattgtgcaagtggccctcaatggactggagaacatcctgcggcttggagagcaagagggcaagcgcagtggctcaggggtcaatccttattgtggcctcatagaggaagcctatggcttggataaaattgagtttctccagagccacgagaaccaggagatctaccagaaggccttcgacctcattgagcactactttggtgtagaagacgatgatagcagcctggctccccaagtcgatgaaacgcaacagcagttcatcttccagcagcctgaggcccccatggagggcttccagctataatatctgcctccagggaggggaggggatgggaagcaccaccagccagcggaagagcagccctctggtgggcgggaaaccagtgtccccaccatcagccaccacacacctctgctgccctggagactgtgctcttgacctgctccgcccccttccctggagggagcaccctctggacagacagaaccatctgaggctcacctttgggttttgtgacaagaaggggacgtgttgggtttttcttccttacactatattttggctgcacacatgtctttaacccaggagcccaggggtagacaaaggaggactaaggtaatcaatttgcacctttttttatttttattttttttctttttttcttcagtggtgacttccttccctttatcttttttcattcttcccggtcctctgccctgatctgtgtaactcttatcttgggtacttgagcagacggtatattccagaggtgggaggtgggaggggaagggagaaatccaaaacaaagtgttcttgctctgacagaatattaatcttgtacgcttggattgagttatttaatttttttttcttttgcacatttttcttgtattaagattgctcttcccaagagccacaagttcctggttttagtaaacccagctgcctgcattgcctgggactagaggctggggaggctaccatgaaacaaaggtccctccctccctctgactctttgcccagacctctttagtttgggggatcctcctcactctcctgaagtgtctcaagtataccagtgggagtgcaggggaggagcacaggccttcagatggggcttcccacgtgtagctactgatcccatatttcctactcaccttccaaatggtgcgacccaacttcatttgtttacttgaaaattccccctcgaggttgagagaacctctgaggtggctgtattttctcctaagcttgagatagggggctgtggtccttcctttctcctgaggagaaagtccttgctctggtgacctgtaagttgcagaggagggtggagtgagagtgtcatgtattgggatagtcagggatccctgcctttggcctttcttcttcttcttcttcctcttccatagttggatcatgtatattttacttctaaaggagagaatgtcaaaaagttctgtatttttttatattctatatattaggtaggtcaatcttaattggtctcaagaggaagaactgtctgtcatttcggtaagtaggatactgtgaggaagaccaaaaagagatatggatgcttcctcgctcaggaggcctgagcttggtccttttcctctctgcttggattctggaccaccacctgggaccaaccttcagctctggaaccttcataaagcaggtcagcgtggcctgattgtcccaggacctgaagggagcaaggatggcctcagggcctggtgaagtctgctactctgtccttactgctgaacatcctgcttgtatcaggaaactcagaagcagtttgccttgtcaaattcaatctcaatggccattgtccacataactgatcacccatggctgcctctcctattatctattatcactgaaacttagtagcctgctttttttttttttttttttagagctattgcgtatcttccctgtttgggatccttgtacctggtttgggttttcccttccttgtgacaattataatccagatgcctcttctttctgtttgaattacggtagtgcattgccttagtggcttgcctgtgcctctgggtggattacatatgatagtaaagcccacctgtttggatgggagtagaggaagttggtgtagaccagctgtggagctgaaggcacagtctgccccacccccacctccccactgtggttagtcagaggcatcctgctccaagctctgcttttccttcctctgaaacaatgccattcttgcttctattgctacacatctccttctggctcaggtgaaatccatgcccttctgcttatagacctaaagttcaggtacttattattggccattgatcttgaatttgccctctcctagtgctgcagtcccacttcaaagccattttctgaggaggatggtttaggtctggcaattgtccttgaaaaatcccacccatgttgtaccaccttggtgagtcatatgccactcatcagcttgggaatgatggctgccaactcccaatctcccaggaaggcagggggcagaatctttttttcacttggcctgctacctccattaaaaaaccattctcttacagtttaaaaaaaaaaaaaaaaaaaaagccttcccctacccaacctccgcccattgttctcttccaaagggcaatttagtaggatctactttgtacatctcaagtaagagttaagtccctgatacagggaccagtttcttagtgtaagacatacacatcctgcttgtccagctgttcctccaaaatctactttggcttcagctccgggtcctgtaccagatggaaaatgtttttggtgatctggctgctgcttaaagccagttttccctaagaactccaaaggctaaagtctactaggggcagagtgtgaggatagatttctaatcagagaaaagtggcctccaggagctttcatttatgtcttctccagaccaggttttcctgttatcttcctttaatcccctttcaaccaacaggtgaagttcttccagcccacagaggtagtaatatcatcttttctatctcctcctctcctttggccatgtaatgaagcaaaatattatttatttagcccaggcttgagagccactgtttgtggacagtcttcatctagattccataccctggcctaggcgaggtaaggctctctggttattgccaggatggagcccctctaccccagtctgctgtagggaataccctaattagttgaggcatgcttttggaatcctggcatgttggcatatggctggtctatcctttttaagatctctggttgggggtatctggatatggattaggagggacaaggagcctttttcttggctaatgttttccaatacttttttgaatggtgccagcccctccaggcatcccacccccaaatcatcatctttagtactaacagggtgtctggtcttagaagcctcccttcagatcccagctgaccctggtgactgcctggccttgatgttggctgcagccttctgatagaaccacatggattccacccacagctggccaggcttgttacatgggtcagggaatacaaatggcccccccccagggagcaggtgttggcctcagttttcagggacccttggtgttgctccttacctagagcccattaatctaccccatcaactctctgccatgaaagccatcttccaggagccctgttttttggagctgaactgcacagattatagctgctattgtacttaaataagggagaggaaaagaaggttctcaggcacagactttctatttttctcaagccaaaccagtttaaaatgtctagcagaatgaactgtatttccatttcttcatgtctacctgccttccccccacaccctaaagttgtacttgtttctagcaaactagaaggaaaagataggaaagcctggcactactaacctcacctctcatacacctctttgaaggccccagctcttttgttcaggcctctcttctcccctagactcactcagcttggtatccatcatcttgagcattcttcagtagattcatctagggttcagattccagactctcagctgaagacagggagccaatttcccccaggtccctgcaggtaatccagggaccccatagggagaacaggctgactggggcattaggaatgtttgtacctctctgcttccctggcagcctggggaagggtgcagggctcagtgcgctaaaccatggtaaacatcttcaatagaactaccctagaatttagtgagtgtgagactgagatattgctcagaataaatttattccatagccatttaggattgcatgttctggaccaaccttgtccagtatgttttctgtttgagctttttcattcttttgttaagccaacaagttgagaatttggccctgctgggatccatgtagtgggcactagctgctctttggccaaggccttcataaatgattcagtctctcattatctgtcctctagccccacaccctgatttagaccgtggcaaaggaagaacttgaggtcaagaccaaccaaatctgtgaattaaagctgttatttttttctctgcaagggcgctttgcttcaggtctgggctatgtgcagaacctaagcaggctgtgagagttagaagaggcagtattacatgttaggcccagaacaccatgggctgacttctgatgtccacattagctcgtacctgaaccctgttgctgaatgccagccctgttctcctgtaactattatatacgccatggcctggggggcattgaaggaagtaagctctcagagatcctaacactggctgggaacctctgactcagagcatgtctttaaagagtccacatctggccaggcgcggtggcacatgcctgtaatcccagcactttgggaggccgaggcgggtggatcacgaggtcaggagtttgagaccagcctggcaacatagttaaaaccccgtccctacaaaaataaaaaaataaaaaaaataagccaggtgtggtggtgggcacctgtgatctcagctacgtgggaggctgaggcaggagaatctcttgaacctaggaggcagaggttgcagtgagccaagattgtgccagcctgggcgacagggtgaggctcttgtctcaaaaaaaaaagtccacatcttcatgaaccctcagactctggagttgggtgtcggcttttttagccagcttttgtgggaattgcctttgacctattaaagaaggaaagtgggtaatggagtcccagccactcaagagactggatatcccccgagaatggcttgggttaccagctatggacccttggaagatgaatctaatccttctcactggtttttctttgcaaattcatttgcttttatttttctaataacaataaactctattttccatgttctcagggcccctgggtagacagacacagcttgatttcagagcagacataggcgaagaaaacatggcattgagtgtgctgagtccagacaaatgttatttatatacacatccaaatttgaagagaaaatgtatttctttaggtttcaaacactgtaatagatataaagcaaaaataaaaacctgttgcaaagttctaaa

SEQ ID NO: 1346 - DNA, 1539 bp, Homo sapiens
gggaggatgtggcgggtataaaagccccacccaggccagccggctctgctcagcatttggggacgctctcagctctcggcgcacggcccagcttccttcaaaatgtctactgttcacgaaatcctgtgcaagctcagcttggagggtgatcactctacacccccaagtgcatatgggtctgtcaaagcctatactaactttgatgctgagcgggatgctttgaacattgaaacagccatcaagaccaaaggtgtggatgaggtcaccattgtcaacattttgaccaaccgcagcaatgcacagagacaggatattgccttcgcctaccagagaaggaccaaaaaggaacttgcatcagcactgaagtcagccttatctggccacctggagacggtgattttgggcctattgaagacacctgctcagtatgacgcttctgagctaaaagcttccatgaaggggctgggaaccgacgaggactctctcattgagatcatctgctccagaaccaaccaggagctgcaggaaattaacagagtctacaaggaaatgtacaagactgatctggagaaggacattatttcggacacatctggtgacttccgcaagctgatggttgccctggcaaagggtagaagagcagaggatggctctgtcattgattatgaactgattgaccaagatgctcgggatctctatgacgctggagtgaagaggaaaggaactgatgttcccaagtggatcagcatcatgaccgagcggagcgtgccccacctccagaaagtatttgataggtacaagagttacagcccttatgacatgttggaaagcatcaggaaagaggttaaaggagacctggaaaatgctttcctgaacctggttcagtgcattcagaacaagcccctgtattttgctgatcggctgtatgactccatgaagggcaaggggacgcgagataaggtcctgatcagaatcatggtctcccgcagtgaagtggacatgttgaaaattaggtctgaattcaagagaaagtacggcaagtccctgtactattatatccagcaagacactaagggcgactaccagaaagcgctgctgtacctgtgtggtggagatgactgaagcccgacacggcctgagcgtccagaaatggtgctcaccatgcttccagctaacaggtctagaaaaccagaaaaaattagccgggcgtgggggcgggctcctgtagtcccagctactccggaggctgaggcaggagaatggcgtgaacccaggaggcggatgagccaagatcacgccactgcactccagcttgggcaacagagcgagactcgcggtggctcatgcctgtaatcccaacactttgggaggccaaggtgggcggatcatgaggtcaggagatcgtgaccatcctggctaatacagtgaaaccccgtctctactaaaaatacaaaaaaattagccaggcatggtggcgggcgcttgtagtgccagctactcgggaggctgaggcaagagaatggtgtgaacctgggaggc

SEQ ID NO: 1347 - DNA, 1635 bp, Homo sapiens
gctcagcatttggggacgctctcagctctcggcgcacggcccaggtaagcggggcgcgccctgcccgcccgcgatgggccgccagctagcggggtgcggagacgctgggaagaaggcttccttcaaaatgtctactgttcacgaaatcctgtgcaagctcagcttggagggtgatcactctacacccccaagtgcatatgggtctgtcaaagcctatactaactttgatgctgagcgggatgctttgaacattgaaacagccatcaagaccaaaggtgtggatgaggtcaccattgtcaacattttgaccaaccgcagcaatgcacagagacaggatattgccttcgcctaccagagaaggaccaaaaaggaacttgcatcagcactgaagtcagccttatctggccacctggagacggtgattttgggcctattgaagacacctgctcagtatgacgcttctgagctaaaagcttccatgaaggggctgggaaccgacgaggactctctcattgagatcatctgctccagaaccaaccaggagctgcaggaaattaacagagtctacaaggaaatgtacaagactgatctggagaaggacattatttcggacacatctggtgacttccgcaagctgatggttgccctggcaaagggtagaagagcagaggatggctctgtcattgattatgaactgattgaccaagatgctcgggatctctatgacgctggagtgaagaggaaaggaactgatgttcccaagtggatcagcatcatgaccgagcggagcgtgccccacctccagaaagtatttgataggtacaagagttacagcccttatgacatgttggaaagcatcaggaaagaggttaaaggagacctggaaaatgctttcctgaacctggttcagtgcattcagaacaagcccctgtattttgctgatcggctgtatgactccatgaagggcaaggggacgcgagataaggtcctgatcagaatcatggtctcccgcagtgaagtggacatgttgaaaattaggtctgaattcaagagaaagtacggcaagtccctgtactattatatccagcaagacactaagggcgactaccagaaagcgctgctgtacctgtgtggtggagatgactgaagcccgacacggcctgagcgtccagaaatggtgctcaccatgcttccagctaacaggtctagaaaaccagcttgcgaataacagtccccgtggccatccctgtgagggtgacgttagcattacccccaacctcattttagttgcctaagcattgcctggccttcctgtctagtctctcctgtaagccaaagaaatgaacattccaaggagttggaagtgaagtctatgatgtgaaacactttgcctcctgtgtactgtgtcataaacagatgaataaactgaatttgtactttagaaacacgtactttgtggccctgctttcaactgaattgtttgaaaattaaacgtgcttggggttcagctggtgaggctgtccctgtaggaagaaagctctgggactgagctgtacagtatggttgcccctatccaagtgtcgctatttaagttaaatttaaatgaaataaaataaaataaaatcaaaaaaaaaa

SEQ ID NO: 1348 - DNA, 1622 bp, Homo sapiens
ggggacgctctcagctctcggcgcacggcccaggtaagcggggcgcgccctgcccgcccgcgatgggccgccagctagcggggtgcggagacgctgggaagaaggcttccttcaaaatgtctactgttcacgaaatcctgtgcaagctcagcttggagggtgatcactctacacccccaagtgcatatgggtctgtcaaagcctatactaactttgatgctgagcgggatgctttgaacattgaaacagccatcaagaccaaaggtgtggatgaggtcaccattgtcaacattttgaccaaccgcagcaatgcacagagacaggatattgccttcgcctaccagagaaggaccaaaaaggaacttgcatcagcactgaagtcagccttatctggccacctggagacggtgattttgggcctattgaagacacctgctcagtatgacgcttctgagctaaaagcttccatgaaggggctgggaaccgacgaggactctctcattgagatcatctgctccagaaccaaccaggagctgcaggaaattaacagagtctacaaggaaatgtacaagactgatctggagaaggacattatttcggacacatctggtgacttccgcaagctgatggttgccctggcaaagggtagaagagcagaggatggctctgtcattgattatgaactgattgaccaagatgctcgggatctctatgacgctggagtgaagaggaaaggaactgatgttcccaagtggatcagcatcatgaccgagcggagcgtgccccacctccagaaagtatttgataggtacaagagttacagcccttatgacatgttggaaagcatcaggaaagaggttaaaggagacctggaaaatgctttcctgaacctggttcagtgcattcagaacaagcccctgtattttgctgatcggctgtatgactccatgaagggcaaggggacgcgagataaggtcctgatcagaatcatggtctcccgcagtgaagtggacatgttgaaaattaggtctgaattcaagagaaagtacggcaagtccctgtactattatatccagcaagacactaagggcgactaccagaaagcgctgctgtacctgtgtggtggagatgactgaagcccgacacggcctgagcgtccagaaatggtgctcaccatgcttccagctaacaggtctagaaaaccagcttgcgaataacagtccccgtggccatccctgtgagggtgacgttagcattacccccaacctcattttagttgcctaagcattgcctggccttcctgtctagtctctcctgtaagccaaagaaatgaacattccaaggagttggaagtgaagtctatgatgtgaaacactttgcctcctgtgtactgtgtcataaacagatgaataaactgaatttgtactttagaaacacgtactttgtggccctgctttcaactgaattgtttgaaaattaaacgtgcttggggttcagctggtgaggctgtccctgtaggaagaaagctctgggactgagctgtacagtatggttgcccctatccaagtgtcgctatttaagttaaatttaaatgaaataaaataaaataaaatcagttcctg

SEQ ID NO: 1349 - DNA, 1622 bp, Homo sapiens; identical to SEQ ID NO: 1348

SEQ ID NO: 1350 - DNA, 1562 bp, Homo sapiens
attccagcaggaaaacaggatggaggaaggtacaaagcatgaatgagcctggcctgtccagcagtggcacatggagcggtgaagagtgaagatgtgggggaatgaggctgcccagcttccttcaaaatgtctactgttcacgaaatcctgtgcaagctcagcttggagggtgatcactctacacccccaagtgcatatgggtctgtcaaagcctatactaactttgatgctgagcgggatgctttgaacattgaaacagccatcaagaccaaaggtgtggatgaggtcaccattgtcaacattttgaccaaccgcagcaatgcacagagacaggatattgccttcgcctaccagagaaggaccaaaaaggaacttgcatcagcactgaagtcagccttatctggccacctggagacggtgattttgggcctattgaagacacctgctcagtatgacgcttctgagctaaaagcttccatgaaggggctgggaaccgacgaggactctctcattgagatcatctgctccagaaccaaccaggagctgcaggaaattaacagagtctacaaggaaatgtacaagactgatctggagaaggacattatttcggacacatctggtgacttccgcaagctgatggttgccctggcaaagggtagaagagcagaggatggctctgtcattgattatgaactgattgaccaagatgctcgggatctctatgacgctggagtgaagaggaaaggaactgatgttcccaagtggatcagcatcatgaccgagcggagcgtgccccacctccagaaagtatttgataggtacaagagttacagcccttatgacatgttggaaagcatcaggaaagaggttaaaggagacctggaaaatgctttcctgaacctggttcagtgcattcagaacaagcccctgtattttgctgatcggctgtatgactccatgaaggtaagggcaggcgagataaggtcctgatcagaatcatggtctcccgcagtgaagtggacatgttgaaaattaggtctgaattcaagagaaagtacggcaagtccctgtactattatatccagcaagacactaagggcgactaccagaaagcgctgctgtacctgtgtggtggagatgactgaagcccgacacggcctgagcgtccagaaatggtgctcaccatgcttccagctaacaggtctagaaaaccagaaaaaattagccgggcgtgggggcgggctcctgtagtcccagctactccggaggctgaggcaggagaatggcgtgaacccaggaggcggatgagccaagatcacgccactgcactccagcttgggcaacagagcgagactcgcggtggctcatgcctgtaatcccaacactttgggaggccaaggtgggcggatcatgaggtcaggagatcgtgaccatcctggctaatacagtgaaaccccgtctctactaaaaatacaaaaaaattagccaggcatggtggcgggcgcttgtagtgccagctactcgggaggctgaggcaagagaatggtgtgaacctgggaggc

SEQ ID NO: 1351 - DNA, 1539 bp, Homo sapiens; identical to SEQ ID NO: 1346

SEQ ID NO: 1352 - DNA, 1539 bp, Homo sapiens; identical to SEQ ID NO: 1346

SEQ ID NO: 1353 - DNA, 2166 bp, Homo sapiens
tgcgggtgaggctggcgcccgtaccatgagcgaggcggacgggctgcgacagcgccggcccctgcggccgcaggtcgtcacagacgatgatggccaggccccggaggctaaggacggcagctcctttagcggcagagttttccgagtgaccttcttgatgctggctgtttctctcaccgttcccctgcttggagccatgatgctgctggaatctcctatagatccacagcctctcagcttcaaagaacccccgctcttgcttggtgttctgcatccaaatacgaagctgcgacaggcagaaaggctgtttgaaaatcaacttgttggaccggagtccatagcacatattggggatgtgatgtttactgggacagcagatggccgggtcgtaaaacttgaaaatggtgaaatagagaccattgcccggtttggttcgggcccttgcaaaacccgagatgatgagcctgtgtgtgggagacccctgggtatccgtgcagggcccaatgggactctctttgtggccgatgcatacaagggactatttgaagtaaatccctggaaacgtgaagtgaaactgctgctgtcctccgagacacccattgaggggaagaacatgtcctttgtgaatgatcttacagtcactcaggatgggaggaagatttatttcaccgattctagcagcaaatggcaaagacgagactacctgcttctggtgatggagggcacagatgacgggcgcctgctggagtatgatactgtgaccagggaagtaaaagttttattggaccagctgcggttcccgaatggagtccagctgtctcctgcagaagactttgtcctggtggcagaaacaaccatggccaggatacgaagagtctacgtttctggcctgatgaagggcggggctgatctgtttgtggagaacatgcctggatttccagacaacatccggcccagcagctctggggggtactgggtgggcatgtcgaccatccgccctaaccctgggttttccatgctggatttcttatctgagagaccctggattaaaaggatgatttttaagctctttagtcaagagacggtgatgaagtttgtgccgcggtacagcctcgtcctagaactcagcgacagcggtgccttccggagaagcctgcatgatcccgatgggctggtggccacctacatcagcgaggtgcacgaacacgatgggcacctgtacctgggctctttcaggtcccccttcctctgcagactcagcctccaggctgtttagccctcccagatagctgcccctgccacgcaggccaggagtcttcacactcaggcaccaggcctggtccaggaggagctgtggacacagtcgtggttcaagtgtccacatgcacctattagtccctgagaggtggtgggaatggctgcttcattcctcgaggatgcccgggccccacctgggcttgtctttctgtttagagggaagtgtaacatatctgccatgaggaacataaattcatgtaaagccattttctcttaaacaaaacaaaactttctaagtacagtcattctctaggatttgggaagctccttgcacttggaacagggctcaggtgggtggagcagtaaggcactacccagagagcttgctgctgcggccctgtcctgcggcctcaaagttcttctttactatatataacgtgcggtcatacctttcttcgttgtggtggggatggaagagcagagggagcatggcccaggggtgttgaggccagcggtgagagccgtgttagccaagacatggaactgtgttctcaagggttatgtggggcgtgggctctccatagtgtgtatgaaaagcttgttgactctagcggctcagagaggactttgctgggtttctttctgtgaatatctccgtgctgaccatgctggaattggatgattctgcaattcgggacctactgcaggggtccgtttagtaacgtcttgtctgtgatctttgttcttgacctctagaccccaagatgtgaacagtgcacgtgttaatgtcatctttgctcatgtgttataagccccaagttgctgtatattttcacaagtatgtctacacactggtcatgattttgataataaataacgataaatcgaaaaaaaaaaaaaaaaaaaaaa

SEQ ID NO: 1354 - DNA, 2431 bp, Homo sapiens
aaccactcgcgttctgggccccggagtccgagacaggcggggaccccggcagctcccggtgctatctctgagcgggttccgagccccacttccgggcggtcagaattagcctcagagcgccgagcaacgacgcgccggggacctcccgcccatgaggccggaaggggcggggagaacgctgcggaatggtccctgggcgcaacgtcatttccgcgtacgggggagggcgggcctggagtctgagccggcgccgctcagtgtgaggtggtttctgcgggtgaggctggcgcccgtaccatgagcgaggcggacgggctgcgacagcgccggcccctgcggccgcaggtcgtcacagacgatgatggccaggccccggaggctaaggacggcagctcctttagcggcagagttttccgagtgaccttcttgatgctggctgtttctctcaccgttcccctgcttggagccatgatgctgctggaatctcctatagatccacagcctctcagcttcaaagaacccccgctcttgcttggtgttctgcatccaaatacgaagctgcgacaggcagaaaggctgtttgaaaatcaacttgttggaccggagtccatagcacatattggggatgtgatgtttactgggacagcagatggccgggtcgtaaaacttgaaaatggtgaaatagagaccattgcccggtttggttcgggcccttgcaaaacccgagatgatgagcctgtgtgtgggagacccctgggtatccgtgcagggcccaatgggactctctttgtggccgatgcatacaagggactatttgaagtaaatccctggaaacgtgaagtgaaactgctgctgtcctccgagacacccattgaggggaagaacatgtcctttgtgaatgatcttacagtcactcaggatgggaggaagatttatttcaccgattctagcagcaaatggcaaagacgagactacctgcttctggtgatggagggcacagatgacgggcgcctgctggagtatgatactgtgaccagggaagtaaaagttttattggaccagctgcggttcccgaatggagtccagctgtctcctgcagaagactttgtcctggtggcagaaacaaccatggccaggatacgaagagtctacgtttctggcctgatgaagggcggggctgatctgtttgtggagaacatgcctggatttccagacaacatccggcccagcagctctggggggtactgggtgggcatgtcgaccatccgccctaaccctgggttttccatgctggatttcttatctgagagaccctggattaaaaggatgatttttaagctctttagtcaagagacggtgatgaagtttgtgccgcggtacagcctcgtcctagaactcagcgacagcggtgccttccggagaagcctgcatgatcccgatgggctggtggccacctacatcagcgaggtgcacgaacacgatgggcacctgtacctgggctctttcaggtcccccttcctctgcagactcagcctccaggctgtttagccctcccagatagctgcccctgccacgcaggccaggagtcttcacactcaggcaccaggcctggtccaggaggagctgtggacacagtcgtggttcaagtgtccacatgcacctgttagtccctgagaggtggtgggaatggctgcttcattcctcgaggatgcccgggccccacctgggcttgtctttctgtttagagggaagtgtaacatatctgccatgaggaacataaattcatgtaaagccattttctcttaaacaaaacaaaactttctaagtacagtcattctctaggatttgggaagctccttgcacttggaacagggctcaggtgggtggagcagtaaggcactacccagagagcttgctgctgcggccctgtcctgcggcctcaaagttcttctttactatatataacgtgcggtcatacctttcttcgttgtggtggggatggaagagcagagggagcatggcccaggggtgttgaggccagcggtgagagccgtgttagccaagacatggaactgtgttctcaagggttatgtggggcgtgggctctccatagtgtgtatgaaaagcttgttgactctagcggctcagagaggactttgctgggtttctttctgtgaatatctccgtgctgaccatgctggaattggatgattctgcaattcgggacctactgcaggggtccgtttagtaacgtcttgtctgtgatctttgttcttgacctctagaccccaagatgtgaacagtgcacgtgttaatgtcatctttgctcatgtgttataagccccaagttgctgtatattttcacaagtatgtctacacactggtcatgattttgataataaataacgataaatcgacttctgctgattaa

SEQ ID NO: 1355 - DNA, 2431 bp, Homo sapiens; identical to SEQ ID NO: 1354

SEQ ID NO: 1356 - DNA, 7028 bp, Homo sapiens
gcgggcgggcatctctgccgaaaacacctacagcgcccgctccctcggtccttcgagcagtgatccctccgcggccaacctccccagggaaaccagcgattcgcggttcagatagcgaccttcgcccgcaggttcctgctctgccttcagacttcggcttcagtggcacctgctcagcgaggcctcgtctaaccaagccatccgaattaactacccactcactcgccatcacatcaccccgatttaattcgcagcggggcactgactttacactcgtgtgtcttctgtgtttatttatggtctgtttctggaatgtccgctcctgggactgggaccatgattttctggcgcagtgcgggtgtctcggcgtccgggatcgggcgggtcgcagtagggctccacatttgttgagtgactgaacaccgttcccggccggggagagcgccgcagccgggtccacttcaggtaggggctgggctttcccggccccgcctaggccccgcccccagcgcgaacccgctcccacctcgcctgtccacggagcagcagggggtttgactgtgcttttccctcttgcttccctcgctctttctgcagctgccacgaaaacccggaacggcggagcggcgccgcccctcgcggcacctccctggcagcccttggaggccgcgctgggcatgctcagtcagctgggccgcctcagctctcggagtaggaagctcgggcgctccggctgtaaggagccgcggcggggggaaaatggagcccttcaccaatgatcggcttcagctccccaggaatatgattgaaaacagcatgtttgaggaagaaccagatgtggtggatttagccaaagagccttgtttacatcctctagagcctgatgaggtggaatatgagccccggggttcccgactgctggtgcggggtcttggtgagcatgagatggaggaggatgaagaggattatgagtcatcagcaaagctgctgggcatgtccttcatgaatagaagctcaggccttcggaacagtgcaactggttacaggcagagcccagatggggcttgttcagtaccctctgcaaggaccatggtggtctgtgcttttgtcatcgtggttgctgtttctgtaatcatggtgatttacttactgcccagatgtacctttaccaaagaaggctgccataaaaaaaaccagtcaattggactaattcagccatttgcaacaaatgggaaattgtttccatgggcacagatcaggcttcccactgccgttgtgccactacgctatgaactcagcctacacccgaacctaacctcgatgacattcaggggttctgtgacaatttcagttcaggctcttcaggtcacatggaatatcattcttcatagcacaggtcataatatttcaagagtgacctttatgtcagcagtttcaagccaagaaaaacaagctgagatcctggaatatgcatatcatggacagatcgccattgttgcccccgaagcccttctagcagggcacaattatacgttgaagatagagtactcggcaaatatatctagttcttattatgggttttatggcttctcctacacagatgaaagtaatgagaaaaagtactttgcagcaactcagtttgaacccctggcagcaagatctgcttttccttgttttgatgaaccagcatttaaagccacttttatcatcaagatcataagggatgagcaatacaccgctttatcaaatatgcctaagaagtcatcagtcgttctagatgatggacttgttcaggatgagttttctgagagtgtgaagatgagcacttacttggttgctttcattgtgggagagatgaagaacctgagtcaggacgtaaatggaaccctggtttctatatatgctgtaccagaaaagattggtcaagttcattatgccttggaaacaactgtgaagcttcttgagttttttcaaaactactttgaaattcagtacccacttaagaaattggatttggtggctattcctgactttgaagcaggagcaatggaaaattggggtttgctcaccttccgagaggagacacttctgtatgacagtaacacttcttcaatggcggatagaaagctggtgactaaaatcattgctcatgagctggcccaccagtggtttggcaatctggtaacaatgaagtggtggaatgacctatggctaaatgaaggttttgccactttcatggagtatttctctttggaaaaaatattcaaagagctttctagttatgaagatttcttagatgctcgatttaaaaccatgaagaaagattccttaaattcatctcatccaatatcatcatctgttcagtcttcagaacaaattgaagaaatgtttgattctctttcctattttaagggatcttctctcttgttgatgttgaaaacttaccttagtgaagatgtgtttcaacatgctgttgtcctttacctgcataatcacagctatgcatctattcaaagtgatgatctgtgggatagttttaatgaggtcacaaaccaaacactagatgtaaagagaatgatgaaaacctggaccctgcagaaaggatttcctttagtgactgttcaaaagaaaggaaaggaactttttatacaacaagagagattctttttaaatatgaagcctgaaattcagccttcagatacaagctacctgtggcatattccactatcctatgtcactgaaggaagaaattattcaaaatatcaatcggtatcattactggataagaaatcaggtgtcatcaatcttacagaagaagtgctgtgggtcaaagtgaatataaacatgaatggttattatattgtacactatgcagatgatgattgggaagcactaatccatcagttgaaaataaatccttatgttctgagtgacaaagaccgagccaaccttatcaacaacatctttgaacttgcaggcctaggcaaggtacctctcaagagggcctttgatttgattaattatcttggaaatgagaaccatactgcacccatcaccgaagccctgtttcagacagacctcatctataacctccttgaaaaactgggatacatggatctggcctcaagactggtgactagggtatttaaattacttcaaaaccaaattcaacaacaaacttggactgatgagggcactccatctatgcgagagcttcggtcagccctgctagagtttgcttgcacccacaacctggggaactgctctactactgccatgaaactgtttgatgactggatggcatccaatggaactcaaagcctacctactgatgtcatgacaactgtgttcaaagttggagcaaaaactgacaaaggctggtcattccttttgggcaaatacatttctataggctctgaagcagagaagaacaaaatactagaagcacttgccagctcagaggatgtgcggaagctttactggttaatgaaaagtagcctgaatggagataacttccgaacacagaagctgtcttttatcattagaacagtgggtcgacattttcctggacacttactggcatgggattttgtcaaagagaactggaataagcttgtacagaagttccctctggggtcctataccatacaaaatattgttgctggatcaacttacctgttttcaacaaagacacatttatctgaggttcaggcattctttgaaaatcagtcagaggcaaccttccggcttcgttgtgtccaggaggctttggaagtcattcagttgaatatccagtggatggagaagaacctcaaaagtctcacatggtggctgtagcatgcacaaccgcacctcattttgttgcccattcagagagcttgtaagcttgggctctgccgcttttgcaaaagccaaggtaaagccaggatcgctgccaagttgtttgcactctttggagttctagttagctcagggcctgactgtatttttcatccatcttttctgaagtgtctttgggcagtatgtagttatttattacaaaattatattcacgtaaatgccaaccatctacaaaaacaatgagtaatttttctactttgaagatacacagatggggacaaaaaccctgttttggaattctgttctattcctcagtatccagaaagttactgacacagtaaaacaaggaaagttctaccctaagagccgccatcacttcaggccgctggtttgtcagccatctgttgcttcttattgatagatggcattggaatgtggtacaaagttagctctgaagaatatggtaacgaagacaataaagcatgcactgtaagaactgacctcaggtgtgcagatctactttgatttggggttttgattaattctttatttttctgaaaaaaagtttaaataatgtctgtaactattgtgtttttttcctgccgaatagccaggtgctacagatttttaaaatttttgttgtattgaaaagctaaacaaggccaaaaggttaaattttttgaatatttaagactttctttttcatcttttatagcgttaccataggaaactgttccaaactgagttagctttaattataattattttattcataaatggtgatagtccccagatctgtacacctttatcactccctgccgtagatatactttaggttagtatttctacattcgtggcaagcattttggtaacaccagtggttttcattgtgacttttatcactatcactaagaatgcaatttaagttgccttttggcatcatagatcatagaaactttctctctgaatcatacccatgtgtgaattttcattttatatgatagtgtagcatattagaagcatattttaaaacagagcctttgagaaattgaaaaacaattatttgaagttcaccatagtaccttaaaggaacaaagagaatgtgggataggagtaacttgaattcgtgtttagtatggtgggctttgaatttttttcactatcaaaaatagtgcttttgtttagttaaaaattgtagtttttctttttttgtgtgtccaaactaacataaaaggagtggtcaaagaaggaaagaagaaaaatgagggaggatgtccgaaactgtatggcattttactccttctgaaagagaaatactgtacttgaatttttgagctatgcagacttatacctagattgttgtgtttctttgattcttaggagaaaagctttcttcctaataattcttgagaactttatattttgtttgaaaacagtttctatgtacataaaaagggtatttacccatttgtgagcacttaaaacactccacagagtcagacagtgggaaaggtcaccctttttttattcggcaggtatcaagttagaatgtatggaattgtgaataaaattatattttattttatgaaaatatttttatataataaaatttaaaaggctggtaagctaaaaaaatagtcttctttaatcctagtgtgttttccccaatttagtcttttctaaaatttatctgttttagagtagaaaatattatatcctgagaatcacagaatcatctaaatatgtcttattcaactgaagtgattgtaagtctttattcttgtgctttggttaaatgaatgataatttagttgatagtgaaagttaatgtgtttttatatttttagagtgagggaaaaatactaaacttttgagagttttgttgtcgttgctggttttttaccatgtggtactaaattccactttgatacaaaatttaaattttgtaacttctcaaaatcacttaagattcttcagttttacctgtgcttcttgacatcgctcctataatgtatgttagttaactctgcatatggcaaatcttgtcttgaattatatcatttctctccctctctctctctctctctgtgtgtgtgtgtgtgtgtgtgtgtgtgtgtgtgtgtgtgtagtgtggggggtattgttatgagtaaaactttatcaaaacttggcctgaaaaagagataactcatgatccattgctatctttattactcaaaggctgttcattcccataataccagatccataatagttgtagtttttttgatgttgttgcccttaccttaattatttgtagttttagtaggccttgcctcagtttttcccacagaattccataattttaatgttgaactaacccatctatataggacttctaaaaactacgtcaggaatgtaaggttaaatgagaggtagaacttgtagtgtaataggtataatggtagctttcaaagttttatcttctcaaaacattgtcttagccagtgtatttctgagaactcagactgaagcacagaagtcacagtatgcttcttttatttaagcacacagattcatgacacaagtacttgttgaacaagtgttctcattgcagagagatctacttgaatataaaagggtcatcatactagattattaaaaaagaattggaaatcttgagttgtggaagaaatgtttatgctttggagatctaaaaaagttatgaatgtaggaattagataagtccagtttgttctgttaatataaaatggttagatatattaaactgcaagtagtatcagcttcaccataagcttgggccttcctccatcttgttttatttaagtctctttaaatgaaattttgttgtcattgtttcagcattcatgaactttcttactatcacaggttctactttaattttccttgccatatgtgtttccattttgtgggacattagccaccacaggaacacaagagttgtcagaagactcctgggtgtacagagcaaatcaagctgcatcagtattataggataccaaacagaatcctttctattaggaaataagaaatcagttaagtgttggctgggcgcggtggcttatgcctgtaatcccagcattttgggatgccaaggtgggcagaccatttgaggccaggagttctaaaccagtttggccaacatggcaaaaccccatctctactaa

SEQ ID NO: 1357 - DNA, 14574 bp, Homo sapiens
ctgggcggccgggcgcggggagagggcgcgggagcggctcgtgcggcaggtaccatgcggacgcgcgagcccggcgagggccccggcaggcccggtccctgctcgggggcgcgctgagacggcgggtgagctccacgagagcgccgtcgccacttcgggccaactttgcgattcccgacagttaagcaatggggagacatttggctttgctcctgcttctgctccttctcttccaacattttggagacagtgatggcagccaacgacttgaacagactcctctgcagtttacacacctcgagtacaacgtcaccgtgcaggagaactctgcagctaagacttatgtggggcatcctgtcaagatgggtgtttacattacacatccagcgtgggaagtaaggtacaaaattgtttccggagacagtgaaaacctgttcaaagctgaagagtacattctcggagacttttgctttctaagaataaggaccaaaggaggaaatacagctattcttaatagagaagtgaaggatcactacacattgatagtgaaagcacttgaaaaaaatactaatgtggaggcgcgaacaaaggtcagggtgcaggtgctggatacaaatgacttgagaccgttattctcacccacctcatacagcgtttctttacctgaaaacacagctataaggaccagtatcgcaagagtcagcgccacggatgcagacataggaaccaacggggaattttactacagttttaaagatcgaacagatatgtttgctattcacccaaccagtggtgtgatagtgttaactggtagacttgattacctagagaccaagctctatgagatggaaatcctcgctgcggaccgtggcatgaagttgtatgggagcagtggcatcagcagcatggccaagctaacggtgcacatcgaacaggccaatgaatgtgctccggtgataacagcagtgacattgtcaccatcagaactggacagggacccagcatatgcaattgtgacagtggatgactgcgatcagggtgccaatggtgacatagcatctttaagcatcgtggcaggtgaccttctccagcagtttagaacagtgaggtcctttccagggagtaaggagtataaagtcaaagccatcggtggcattgattgggacagtcatcctttcggctacaatctcacactacaggctaaagataaaggaactccgccccagttctcttctgttaaagtcattcacgtgacttctccacagttcaaagccgggccagtcaagtttgaaaaggatgtttacagagcagaaataagtgaatttgctcctcccaacacacctgtggtcatggtaaaggccattcctgcttattcccatttgaggtatgtttttaaaaggacacctggaaaagctaaattcagtttaaattacaacactggtctcatttctattttagaaccagttaaaagacagcaggcagcccattttgaacttgaagtaacaacaagtgacagaaaagcgtccaccaaggtcttggtgaaagtcttaggtgcaaatagcaatccccctgaatttacccagacagcgtacaaagctgcttttgatgagaacgtgcccattggtactactgtcatgagcctgagtgccgtagaccctgatgagggtgagaatgggtacgtgacatacagtatcgcaaatttaaatcatgtgccgtttgcgattgaccatttcactggtgccgtgagtacgtcagaaaacctggactacgaactgatgcctcgggtttatactctgaggattcgtgcatcagactggggcttgccgtaccgccgggaagtcgaagtccttgctacaattactctcaataacttgaatgacaacacacctttgtttgagaaaataaattgtgaagggacaattcccagagatctaggcgtgggagagcaaataaccactgtttctgctattgatgcagatgaacttcagttggtacagtatcagattgaagctggaaatgaactggatttgtttagtttaaaccccaactcgggggtattgtcattaaagcgatcgctaatggatggcttaggtgcaaaggtgtctttccacagtctgagaatcacagctacagatggagaaaattttgccacaccattatatatcaacataacagtggctgccagtcacaagctggtaaacttgcagtgtgaagagactggtgttgccaaaatgctggcagagaagctcctgcaggcaaataaattacacaaccagggagaggtggaggatattttcttcgattctcactctgtcaatgctcacataccgcagtttagaagcactcttccgactggtattcaggtaaaggaaaaccagcctgtgggttccagtgtaattttcatgaactccactgaccttgacactggcttcaatggaaaactggtctatgctgtttctggaggaaatgaggatagttgcttcatgattgatatggaaacaggaatgctgaaaattttatctcctcttgaccgtgaaacaacagacaaatacaccctgaatattaccgtctatgaccttgggataccccagaaggctgcgtggcgtcttctacatgtcgtggttgtcgatgccaatgataatccacccgagtttttacaggagagctattttgtggaagtgagtgaagacaaggaggtacatagtgaaatcatccaggttgaagccacagataaagacctggggcccaacggacacgtgacgtactcaattcttacagacacagacacattttcaattgacagcgtgacgggtgttgttaacatcgcacgccctctggatcgagagctgcagcatgagcactccttaaagattgaggccagggaccaagccagagaagagcctcagctgttctccactgtcgttgtgaaagtatcactagaagatgttaatgacaacccacctacatttattccacctaattatcgtgtgaaagtccgagaggatcttccagaaggaaccgtcatcatgtggttagaagcccacgatcctgatttaggtcagtctggtcaggtgagatacagccttctggaccacggagaaggaaacttcgatgtggataaactcagtggagcagttaggatcgtccagcagttggactttgagaagaagcaagtgtataatctcactgtgagggccaaagacaagggaaagccagtttctctgtcttctacttgctatgttgaagttgaggtggttgatgtgaatgagaacctgcacccacccgtgttttccagctttgtggaaaaggggacagtgaaagaagatgcacctgttggttcattggtaatgacggtgtcggctcatgatgaggacgccggaagagatggggagatccgatactccattagagatggctctggcgttggtgttttcaaaataggtgaagagacaggtgtcatagagacgtcagatcgactggaccgtgaatcgacctcccattattggctaacagtctttgcaaccgatcagggtgtcgtgcctctttcatcgttcatagagatctacatagaggttgaggatgtcaatgacaatgcaccacagacatcagagcctgtttattacccagaaatcatggaaaattctcctaaagatgtatctgtggtccagatcgaggcatttgatccagattcgagctctaatgacaagctcatgtacaaaattacaagtggaaatccacaaggattcttttcaatacatcctaaaacaggtctcatcacaactacgtcaaggaagctagaccgagaacagcaagatgaacacatattagaggttactgtgacagacaatggtagtccccccaaatcaaccattgcaagagtcattgtgaaaatccttgatgaaaatgacaacaaacctcagtttctgcaaaagttctacaaaatcagactccctgagcgggaaaagccagaccgagaaagaaatgccagacgggagccgctctatcacgtcatagccaccgacaaggatgagggccccaatgcagaaatctcctacagcatcgaagacgggaatgagcatggcaaatttttcatcgaaccgaaaactggagtggtttcgtccaagaggttttcagcagctggagaatatgatattctttcaattaaggcagttgacaatggtcgccctcaaaagtcatcaaccaccagactccatattgaatggatctccaagcccaaaccgtccctggagcccatttcatttgaagaatcattttttacctttactgtgatggaaagtgaccccgttgctcacatgattggagtaatatctgtggagcctcctggcatacccctttggtttgacatcactggtggcaactacgacagtcacttcgatgtggacaagggaactggaaccatcattgttgccaaacctcttgatgcagaacagaagtcaaactacaacctcacagtcgaggctacagatggaaccaccactatcctcactcaggtattcatcaaagtaatagacacaaatgaccatcgtcctcagttttctacatcaaagtatgaagttgttattcctgaagatacagcgccagaaacagaaattttgcaaatcagtgctgtggatcaggatgagaaaaacaaactaatctacactctgcagagcagtagagatccactgagtctcaagaaatttcgtcttgatcctgcaaccggctctctctatacttctgagaaactggatcatgaagctgttcaccagcacaccctcacggtcatggtacgagatcaagatgtgcctgtaaaacgcaactttgcaaggattgtggtcaatgtcagcgacacgaatgaccacgccccgtggttcaccgcttcctcctacaaagggcgggtttatgaatcggcagccgttggctcagttgtgttgcaggtgacggctctggacaaggacaaagggaaaaatgctgaagtgctgtactcgatcgagtcaggaaatattggaaattcttttatgattgatcctgtcttgggctctattaaaactgccaaagaattagatcgaagtaaccaagcggagtatgatttaatggtaaaagctacagataagggcagtccaccaatgagtgaaataacttctgtgcgtatctttgtcacaattgctgacaacgcctctccgaagtttacatcaaaagaatattctgttgaacttagtgaaactgtcagcattgggagtttcgttgggatggttacagcccatagtcaatcatcagtggtgtatgaaataaaagatggaaatacaggtgatgcttttgatattaatccacattctggaactatcatcactcagaaagccctggactttgaaactttgcccatttacacattgataatacaaggaactaacatggctggtttgtccactaatacaacggttctagttcacttgcaggatgagaatgacaacgcgccagtttttatgcaggcagaatatacaggactcattagtgaatcagcctcaattaacagcgtggtcctaacagacaggaatgtcccactggtgattcgagcagctgatgctgataaagactcaaatgctttgcttgtatatcacattgttgaaccatctgtacacacatattttgctattgattctagcactggtgctattcatacagtactaagtctggactatgaagaaacaagtatttttcactttaccgtccaagtgcatgacatgggaaccccacgtttatttgctgagtatgcagcgaatgtaacagtacatgtaattgacattaatgactgcccccctgtgtttgccaagccattatatgaagcatctcttttgttaccaacatacaaaggagtaaaagtcatcacagtaaatgctacagatgctgattcaagtgcattctcacagttgatttactccatcaccgaaggcaacatcggggagaagttttctatggactacaagactggtgctctcactgtccaaaacacaactcagttaagaagccgctacgagctaaccgttagagcttccgatggcagatttgccggccttacctctgtcaaaattaatgtgaaagaaagcaaagaaagtcacctaaagtttacccaggatgtctactctgcggtagtgaaagagaattccaccgaggccgaaacattagctgtcattactgctattgggaatccaatcaatgagcctttgttttatcacatcctcaacccagatcgcagatttaaaataagccgcacttcaggagttctgtcaaccactggcacgcccttcgatcgtgagcagcaggaggcgtttgatgtggttgtagaagtgacagaggaacataagccttctgcagtggcccacgttgtcgtgaaggtcattgtagaagaccaaaatgataatgcgccggtgtttgtcaaccttccctactacgccgttgttaaagtggacactgaggtgggccatgtcattcgctatgtcactgctgtagacagagacagtggcagaaacggggaagtgcattactacctcaaggaacatcatgaacactttcaaattggacccttgggtgaaatttcactgaaaaagcaatttgagcttgacaccttaaataaagaatatcttgttacagtggttgcaaaagatggagggaacccggccttttcagcggaagttatcgttccgatcactgtcatgaataaagccatgcctgtgtttgaaaaacctttctacagtgcagagattgcagagagcatccaggtgcacagccctgtggtccacgtgcaggctaacagcccggaaggcctgaaagtgttctacagcatcacagacggagaccctttcagccagttcactattaacttcaatactggagttatcaatgtcatagctcctctggactttgaggcccacccggcatataagctgagcatacgcgcaactgactccttgacgggcgctcatgctgaagtatttgtggacatcatagtagacgacatcaatgataaccctcctgtgtttgctcagcagtcttatgcggtgaccctgtctgaggcatctgtaattggaacgtctgttgttcaagttagagccaccgattctgattcagaaccaaatagaggaatctcataccagatgtttgggaatcacagcaagagtcatgatcattttcatgtagacagcagcactggcctcatctcactactcagaaccctggattacgagcagtcccggcagcacacgatttttgtgagggcagttgatggtggtatgcccacgctgagcagtgatgtgattgtcacggtggacgttaccgacctcaatgataatccaccactctttgaacaacagatttatgaagccagaattagcgagcacgcccctcatgggcatttcgtgacctgtgtaaaagcctatgatgcagacagttcagacatagacaagttgcagtattccattctgtctggcaatgatcataaacattttgtcattgacagtgcaacagggattatcaccctctcaaacctgcaccggcacgccctgaagccattttacagtcttaacctgtcagtgtctgatggagtttttagaagttccacccaggttcatgtaactgtaattggaggcaatttgcacagtcctgctttccttcagaacgaatatgaagtggaactagctgaaaacgctcccctacataccctggtgatggaggtgaaaactacggatggggattctggtatttatggtcacgttacttaccatattgtaaatgactttgccaaagacagattttacataaatgagagaggacagatatttactttggaaaaacttgatcgagaaaccccggcggagaaagtgatctcagtccgtttaatggctaaggatgctggaggaaaagttgctttctgcaccgtgaatgtcatccttacagatgacaatgacaatgcaccacaatttcgagcaaccaaatacgaagtgaatatcgggtccagtgctgctaaagggacttcagtcgttaaagttcttgcaagtgatgccgatgagggctccaatgccgacatcacctatgccattgaagcagactctgaaagtgtaaaagagaatttggaaattaacaaactgtccggcgtaatcactacaaaggagagcctcattggcttggaaaatgaattcttcactttctttgttagagctgtggataatgggtctccatcaaaagaatctgttgttcttgtctatgttaaaatccttccaccggaaatgcagcttccaaaattttcagaacctttctatacctttacagtgtcagaggacgtgcctattggaacagagatagatctcatccgagcagaacatagtgggactgttctttacagcctggtcaaagggaatactccagaaagcaatagggatgagtcctttgtgattgacagacagagcgggagactgaagttggagaagagtcttgatcatgagacaactaagtggtatcagttttccatactggccaggtgcactcaagatgaccatgagatggtggcttctgtagatgttagtatccaagtgaaagatgcaaatgacaacagcccggtctttgaatctagtccatatgaggcattcattgttgaaaacctgccagggggaagtagagtaattcagatcagggcatctgatgctgactcaggaaccaacggccaagttatgtatagcctggatcagtcacaaagtgtggaagtcattgaatcctttgccattaacatggaaacaggctggattacaactttaaaggaacttgaccatgaaaagagagacaattaccagattaaagtggttgcatcagatcatggtgaaaagatccagctatcctccacagccattgtggatgttaccgtcaccgatgtcaacgatagtccaccacgattcacggccgagatctataaagggactgtgagtgaggatgacccccaaggtggggtgattgccatcttaagtaccacggatgctgattctgaagagatcaacagacaagttacatatttcataacaggaggggatcctttaggacagtttgccgttgaaactatacagaatgaatggaaggtatatgtgaagaaacctctagacagggaaaaaagggacaattaccttcttactatcacggcaactgatggcaccttctcatcaaaagcgatagttgaagtgaaagttctggatgcaaatgacaacagtccagtttgtgaaaagactttatattcagacactattcctgaagacgtccttcctggaaaattgatcatgcagatctctgctacagacgcagacatccgctctaacgctgaaattacttacacgttattgggttcaggtgcagaaaaattcaaactaaatccagacacaggtgaactgaaaacgtcaaccccccttgatcgtgaggagcaagctgtttatcatcttctcgtcagggccacagatggaggaggaagattctgccaagccagtattgtgctcacgctagaagatgtgaacgataacgcccccgaattctctgccgatccttatgccatcaccgtgtttgaaaacacagagccgggaacgctgctgacaagagtgcaggccacagatgccgacgcaggattaaatcggaagattttatactcactgattgactctgctgatgggcagttctccattaacgaattatctggaattattcagttagaaaaacctttggacagagaactccaggcagtatacaccctctctttgaaagctgtggatcaaggcttgccaaggaggctgactgccactggcactgtgattgtatcagttcttgacataaatgacaacccccctgtgtttgagtaccgtgaatatggtgccaccgtgtctgaggacattcttgttggaactgaagttcttcaagtgtatgcagcaagtcgggatattgaagcaaatgcagaaatcacctactcaataataagtggaaatgaacatgggaaattcagcatagattctaaaacaggggccgtatttatcattgagaatctggattatgagagctctcatgagtattacctaacagtagaggccactgatggaggcacgccttcactgagcgacgttgccactgtgaacgttaatgtaacagatatcaacgataatacccctgtgttcagccaagacacctacacgacagtcatcagtgaagatgccgttcttgagcagtctgtcatcacggttacacgctcacggttcaagcttctgataatggcagtccacccagagtcaacacgacgaccgtgaacatcgatgtgtccgatgtcaatgacaacgcgcccgtcttctccaggggaaactacagtgtcattatccaggaaaataagccagtgggcttcagcgtgctgcagctggtagtaacagatgaggattcttcccataacggtccacccttcttctttactattgtaactggaaatgatgagaaggcttttgaagttaacccgcaaggagtcctcctgacatcatctgccatcaagaggaaggagaaagatcattacttactgcaggtgaaggtggcagataatggaaagcctcagttgtcatctttgacatacattgacattagggtaattgaggagagcatctatccgcctgcgattttgcccctggagattttcatcaccgcttctggagaagaatactcaggtggcgtcattgggaagatccatgccacagaccaggacgtgtatgatactctaacctacagtctcgaccctcagatggacaacctgttctctgtttccagcacagggggcaagctgatagcacacaaaaagctagacatagggcaataccttctcaatgtcagcgtaacagatgggaagttcacgacggtggccgacatcacagtgcatatcagacaagtcacacaggagatgttgaaccacaccatcgcgatccgctttgccaacctcactccggaagaattcgttggtgactactggcgcaacttccagcgagctttacggaacatcctgggtgtgaggaggaacgacatacagattgttagtttgcagtcctctgaacctcacccacatctggacgtcttactttttgtagagaaaccaggtagtgctcagatctcaacaaaacaacttctgcacaagattaactcttccgtgactgacattgaggaaatcattggagttaggatactgaatgtattccagaaactctgcgcgggactggactgcccctggaagttctgcgatgaaaaggtgtctgtggatgaaagtgtgatgtcaacacacagcacagccagactgagttttgtgactccccgccaccacagggcagcggtgtgtctctgcaaagagggaaggtgcccacctgtccaccatggctgtgaagatgatccgtgccctgagggatccgaatgtgtgtctgatccctgggaggagaaacacacctgtgtctgtcccagcggcaggtttggtcagtgcccaggcagaggttgcagtgagttgagatcacgccactgcactccagcctgggcgacaagagtgaaactgtctcaaaaaacaaaaactgttacagtttatagagacatcctacatgtgtttcaaattcatcatggaaggctgcagtacaagtttgactgtggaagtggccctggaattgtctctgttcagagcattcaggtcaatgatgggcagtggcacgcagtggccctggaagtgaatggaaactatgctcgcttggttctagaccaagttcatactgcatcgggcacagccccagggactctgaaaaccctgaacctggataactatgtgttttttggtggccacatccgtcagcagggaacaaggcatggaagaagtcctcaagttggtaatggtttcaggggttgtatggactccatttatttgaatgggcaggagctccctttaaacagcaaacccagaagctatgcacacatcgaagagtcggtggatgtatctccaggctgcttcctgacggccacggaagactgcgccagcaacccttgccagaatggaggcgtttgcaatccgtcacctgctggaggttattactgcaaatgcagtgccttgtacatagggacccactgtgagataagcgtcaatccgtgttcctccaacccatgcctctatgggggcacgtgtgttgtcgacaacggaggctttgtttgccagtgtagaggattatatactggtcagaggtgtcagcttagtccatactgcaaagatgaaccctgtaagaatggcggaacatgctttgacagtttggatggcgccgtttgtcagtgtgattcgggttttaggggagaaaggtgtcagagtgatatcgacgagtgctctggaaacccttgcctgcacggggccctctgtgagaacacgcacggctcctatcactgcaactgcagccacgagtacaggggacgtcactgcgaggatgctgcgcccaaccagtatgtgtccacgccgtggaacattgggttggcggaaggaattggaatcgttgtgtttgttgcagggatatttttactggtggtggtgtttgttctctgccgtaagatgattagtcggaaaaagaagcatcaggctgaacctaaagacaagcacctgggacccgctacggctttcttgcaaagaccgtattttgattccaagctaaataagaacatttactcagacataccaccccaggtgcctgtccggcctatttcctacaccccgagtattccaagtgactcaagaaacaatctggaccgaaattccttcgaaggatctgctatcccagagcatcccgaattcagcacttttaaccccgagtctgtgcacgggcaccgaaaagcagtggcggtctgcagcgtggcgccaaacctgcctcccccacccccttcaaactccccttctgacagcgactccatccagaagcctagctgggactttgactatgacacaaaagtggtggatcttgatccctgtctttccaagaagcctctagaggaaaagccttcccagccatacagtgcccgggaaagcctgtctgaagtgcagtctctgagctccttccagtccgaatcgtgcgatgacaatgggtatcactgggatacatcagattggatgccaagcgttcctctgccggacatacaagagttccccaactatgaggtgattgatgagcagacacccctgtactcagcagatccaaacgccatcgatacggactattaccctggaggctacgacatcgaaagtgattttcctccacccccagaagacttccccgcagctgatgagctaccaccgttaccgcccgaattcagcaatcagtttgaatccatccaccctcctagagacatgcctgccgcgggtagcttgggttcttcatcaagaaaccggcagaggttcaacttgaatcagtatttgcccaatttttatcccctcgatatgtctgaacctcaaacaaaaggcactggtgagaatagtacttgtagagaaccccatgccccttacccgccagggtatcaaagacacttcgaggcgcccgctgtcgagagcatgcccatgtctgtgtacgcctccaccgcctcctgctctgacgtgtcagcctgctgcgaagtggagtccgaggtcatgatgagtgactatgagagcggggacgacggccacttcgaagaggtgacgatcccgcccctggattcccagcagcacacggaagtctgactctcaactccccccaaagtgcctgactttagtgaacctagaggtgatgtgagtaatccgcgctgttctttgcagcagtgcttccaagctttttttggtgagccgaatgggcatggctgcgctggatcctgcgcctctggacgtgctagccatttccagtgtcccaactactgtcatcgtgaggttttcatcggctgtgccatttcccaacgtcttttgggatttacatctgtctgtgttaaaataatcaaacgaaaaatcagtcctgtgttgtcagcatgattcatgtatttatatagatttgattattttaattttcctgtctcttttttttgtaaattttatgtacagatttgatttttcatagttttaactagatttccaagatattttgtgcatttgtttcaactgaattttggtggtgtcagtgccattatctagcaccctgatttttttttttttactataaccagggtttcattctgtctttttccactgaagtgtgacattttgttagtacatttcagtgtagtcattcatttctagctgtacataggatgaaggagagatcagatacatgaacatgtcttacatgggttgctgtatttagaattataaacatttttcattattggaaagtgtaacggggaccttctgcatacctgtttagaaccaaaaccaccatgacacagtttttatagtgtctgtatatttgtgatgcaatggtcttgtaaaggtttttaatgaaaactaccattagccagtctttcttactgacaataaattattaataaaatacttga

SEQ ID NO: 1358 - DNA, 14614 bp, Homo sapiens
ctgggcggccgggcgcggggagagggcgcgggagcggctcgtgcggcaggtaccatgcggacgcgcgagcccggcgagggccccggcaggcccggtccctgctcgggggcgcgctgagacggcgggtgagctccacgagagcgccgtcgccacttcgggccaactttgcgattcccgacagttaagcaatggggagacatttggctttgctcctgcttctgctccttctcttccaacattttggagacagtgatggcagccaacgacttgaacagactcctctgcagtttacacacctcgagtacaacgtcaccgtgcaggagaactctgcagctaagacttatgtggggcatcctgtcaagatgggtgtttacattacacatccagcgtgggaagtaaggtacaaaattgtttccggagacagtgaaaacctgttcaaagctgaagagtacattctcggagacttttgctttctaagaataaggaccaaaggaggaaatacagctattcttaatagagaagtgaaggatcactacacattgatagtgaaagcacttgaaaaaaatactaatgtggaggcgcgaacaaaggtcagggtgcaggtgctggatacaaatgacttgagaccgttattctcacccacctcatacagcgtttctttacctgaaaacacagctataaggaccagtatcgcaagagtcagcgccacggatgcagacataggaaccaacggggaattttactacagttttaaagatcgaacagatatgtttgctattcacccaaccagtggtgtgatagtgttaactggtagacttgattacctagagaccaagctctatgagatggaaatcctcgctgcggaccgtggcatgaagttgtatgggagcagtggcatcagcagcatggccaagctaacggtgcacatcgaacaggccaatgaatgtgctccggtgataacagcagtgacattgtcaccatcagaactggacagggacccagcatatgcaattgtgacagtggatgactgcgatcagggtgccaatggtgacatagcatctttaagcatcgtggcaggtgaccttctccagcagtttagaacagtgaggtcctttccagggagtaaggagtataaagtcaaagccatcggtggcattgattgggacagtcatcctttcggctacaatctcacactacaggctaaagataaaggaactccgccccagttctcttctgttaaagtcattcacgtgacttctccacagttcaaagccgggccagtcaagtttgaaaaggatgtttacagagcagaaataagtgaatttgctcctcccaacacacctgtggtcatggtaaaggccattcctgcttattcccatttgaggtatgtttttaaaaggacacctggaaaagctaaattcagtttaaattacaacactggtctcatttctattttagaaccagttaaaagacagcaggcagcccattttgaacttgaagtaacaacaagtgacagaaaagcgtccaccaaggtcttggtgaaagtcttaggtgcaaatagcaatccccctgaatttacccagacagcgtacaaagctgcttttgatgagaacgtgcccattggtactactgtcatgagcctgagtgccgtagaccctgatgagggtgagaatgggtacgtgacatacagtatcgcaaatttaaatcatgtgccgtttgcgattgaccatttcactggtgccgtgagtacgtcagaaaacctggactacgaactgatgcctcgggtttatactctgaggattcgtgcatcagactggggcttgccgtaccgccgggaagtcgaagtccttgctacaattactctcaataacttgaatgacaacacacctttgtttgagaaaataaattgtgaagggacaattcccagagatctaggcgtgggagagcaaataaccactgtttctgctattgatgcagatgaacttcagttggtacagtatcagattgaagctggaaatgaactggatttgtttagtttaaaccccaactcgggggtattgtcattaaagcgatcgctaatggatggcttaggtgcaaaggtgtctttccacagtctgagaatcacagctacagatggagaaaattttgccacaccattatatatcaacataacagtggctgccagtcacaagctggtaaacttgcagtgtgaagagactggtgttgccaaaatgctggcagagaagctcctgcaggcaaataaattacacaaccagggagaggtggaggatattttcttcgattctcactctgtcaatgctcacataccgcagtttagaagcactcttccgactggtattcaggtaaaggaaaaccagcctgtgggttccagtgtaattttcatgaactccactgaccttgacactggcttcaatggaaaactggtctatgctgtttctggaggaaatgaggatagttgcttcatgattgatatggaaacaggaatgctgaaaattttatctcctcttgaccgtgaaacaacagacaaatacaccctgaatattaccgtctatgaccttgggataccccagaaggctgcgtggcgtcttctacatgtcgtggttgtcgatgccaatgataatccacccgagtttttacaggagagctattttgtggaagtgagtgaagacaaggaggtacatagtgaaatcatccaggttgaagccacagataaagacctggggcccaacggacacgtgacgtactcaattcttacagacacagacacattttcaattgacagcgtgacgggtgttgttaacatcgcacgccctctggatcgagagctgcagcatgagcactccttaaagattgaggccagggaccaagccagagaagagcctcagctgttctccactgtcgttgtgaaagtatcactagaagatgttaatgacaacccacctacatttattccacctaattatcgtgtgaaagtccgagaggatcttccagaaggaaccgtcatcatgtggttagaagcccacgatcctgatttaggtcagtctggtcaggtgagatacagccttctggaccacggagaaggaaacttcgatgtggataaactcagtggagcagttaggatcgtccagcagttggactttgagaagaagcaagtgtataatctcactgtgagggccaaagacaagggaaagccagtttctctgtcttctacttgctatgttgaagttgaggtggttgatgtgaatgagaacctgcacccacccgtgttttccagctttgtggaaaaggggacagtgaaagaagatgcacctgttggttcattggtaatgacggtgtcggctcatgatgaggacgccggaagagatggggagatccgatactccattagagatggctctggcgttggtgttttcaaaataggtgaagagacaggtgtcatagagacgtcagatcgactggaccgtgaatcgacctcccattattggctaacagtctttgcaaccgatcagggtgtcgtgcctctttcatcgttcatagagatctacatagaggttgaggatgtcaatgacaatgcaccacagacatcagagcctgtttattacccagaaatcatggaaaattctcctaaagatgtatctgtggtccagatcgaggcatttgatccagattcgagctctaatgacaagctcatgtacaaaattacaagtggaaatccacaaggattcttttcaatacatcctaaaacaggtctcatcacaactacgtcaaggaagctagaccgagaacagcaagatgaacacatattagaggttactgtgacagacaatggtagtccccccaaatcaaccattgcaagagtcattgtgaaaatccttgatgaaaatgacaacaaacctcagtttctgcaaaagttctacaaaatcagactccctgagcgggaaaagccagaccgagaaagaaatgccagacgggagccgctctatcacgtcatagccaccgacaaggatgagggccccaatgcagaaatctcctacagcatcgaagacgggaatgagcatggcaaatttttcatcgaaccgaaaactggagtggtttcgtccaagaggttttcagcagctggagaatatgatattctttcaattaaggcagttgacaatggtcgccctcaaaagtcatcaaccaccagactccatattgaatggatctccaagcccaaaccgtccctggagcccatttcatttgaagaatcattttttacctttactgtgatggaaagtgaccccgttgctcacatgattggagtaatatctgtggagcctcctggcatacccctttggtttgacatcactggtggcaactacgacagtcacttcgatgtggacaagggaactggaaccatcattgttgccaaacctcttgatgcagaacagaagtcaaactacaacctcacagtcgaggctacagatggaaccaccactatcctcactcaggtattcatcaaagtaatagacacaaatgaccatcgtcctcagttttctacatcaaagtatgaagttgttattcctgaagatacagcgccagaaacagaaattttgcaaatcagtgctgtggatcaggatgagaaaaacaaactaatctacactctgcagagcagtagagatccactgagtctcaagaaatttcgtcttgatcctgcaaccggctctctctatacttctgagaaactggatcatgaagctgttcaccagcacaccctcacggtcatggtacgagatcaagatgtgcctgtaaaacgcaactttgcaaggattgtggtcaatgtcagcgacacgaatgaccacgccccgtggttcaccgcttcctcctacaaagggcgggtttatgaatcggcagccgttggctcagttgtgttgcaggtgacggctctggacaaggacaaagggaaaaatgctgaagtgctgtactcgatcgagtcaggtacttttggagaaatattggaaattcttttatgattgatcctgtcttgggctctattaaaactgccaaagaattagatcgaagtaaccaagcggagtatgatttaatggtaaaagctacagataagggcagtccaccaatgagtgaaataacttctgtgcgtatctttgtcacaattgctgacaacgcctctccgaagtttacatcaaaagaatattctgttgaacttagtgaaactgtcagcattgggagtttcgttgggatggttacagcccatagtcaatcatcagtggtgtatgaaataaaagatggaaatacaggtgatgcttttgatattaatccacattctggaactatcatcactcagaaagccctggactttgaaactttgcccatttacacattgataatacaaggaactaacatggctggtttgtccactaatacaacggttctagttcacttgcaggatgagaatgacaacgcgccagtttttatgcaggcagaatatacaggactcattagtgaatcagcctcaattaacagcgtggtcctaacagacaggaatgtcccactggtgattcgagcagctgatgctgataaagactcaaatgctttgcttgtatatcacattgttgaaccatctgtacacacatattttgctattgattctagcactggtgctattcatacagtactaagtctggactatgaagaaacaagtatttttcactttaccgtccaagtgcatgacatgggaaccccacgtttatttgctgagtatgcagcgaatgtaacagtacatgtaattgacattaatgactgcccccctgtgtttgccaagccattatatgaagcatctcttttgttaccaacatacaaaggagtaaaagtcatcacagtaaatgctacagatgctgattcaagtgcattctcacagttgatttactccatcaccgaaggcaacatcggggagaagttttctatggactacaagactggtgctctcactgtccaaaacacaactcagttaagaagccgctacgagctaaccgttagagcttccgatggcagatttgccggccttacctctgtcaaaattaatgtgaaagaaagcaaagaaagtcacctaaagtttacccaggatgtctactctgcggtagtgaaagagaattccaccgaggccgaaacattagctgtcattactgctattgggaatccaatcaatgagcctttgttttatcacatcctcaacccagatcgcagatttaaaataagccgcacttcaggagttctgtcaaccactggcacgcccttcgatcgtgagcagcaggaggcgtttgatgtggttgtagaagtgacagaggaacataagccttctgcagtggcccacgttgtcgtgaaggtcattgtagaagaccaaaatgataatgcgccggtgtttgtcaaccttccctactacgccgttgttaaagtggacactgaggtgggccatgtcattcgctatgtcactgctgtagacagagacagtggcagaaacggggaagtgcattactacctcaaggaacatcatgaacactttcaaattggacccttgggtgaaatttcactgaaaaagcaatttgagcttgacaccttaaataaagaatatcttgttacagtggttgcaaaagatggagggaacccggccttttcagcggaagttatcgttccgatcactgtcatgaataaagccatgcctgtgtttgaaaaacctttctacagtgcagagattgcagagagcatccaggtgcacagccctgtggtccacgtgcaggctaacagcccggaaggcctgaaagtgttctacagcatcacagacggagaccctttcagccagttcactattaacttcaatactggagttatcaatgtcatagctcctctggactttgaggcccacccggcatataagctgagcatacgcgcaactgactccttgacgggcgctcatgctgaagtatttgtggacatcatagtagacgacatcaatgataaccctcctgtgtttgctcagcagtcttatgcggtgaccctgtctgaggcatctgtaattggaacgtctgttgttcaagttagagccaccgattctgattcagaaccaaatagaggaatctcataccagatgtttgggaatcacagcaagagtcatgatcattttcatgtagacagcagcactggcctcatctcactactcagaaccctggattacgagcagtcccggcagcacacgatttttgtgagggcagttgatggtggtatgcccacgctgagcagtgatgtgattgtcacggtggacgttaccgacctcaatgataatccaccactctttgaacaacagatttatgaagccagaattagcgagcacgcccctcatgggcatttcgtgacctgtgtaaaagcctatgatgcagacagttcagacatagacaagttgcagtattccattctgtctggcaatgatcataaacattttgtcattgacagtgcaacagggattatcaccctctcaaacctgcaccggcacgccctgaagccattttacagtcttaacctgtcagtgtctgatggagtttttagaagttccacccaggttcatgtaactgtaattggaggcaatttgcacagtcctgctttccttcagaacgaatatgaagtggaactagctgaaaacgctcccctacataccctggtgatggaggtgaaaactacggatggggattctggtatttatggtcacgttacttaccatattgtaaatgactttgccaaagacagattttacataaatgagagaggacagatatttactttggaaaaacttgatcgagaaaccccggcggagaaagtgatctcagtccgtttaatggctaaggatgctggaggaaaagttgctttctgcaccgtgaatgtcatccttacagatgacaatgacaatgcaccacaatttcgagcaaccaaatacgaagtgaatatcgggtccagtgctgctaaagggacttcagtcgttaaagttcttgcaagtgatgccgatgagggctccaatgccgacatcacctatgccattgaagcagactctgaaagtgtaaaagagaatttggaaattaacaaactgtccggcgtaatcactacaaaggagagcctcattggcttggaaaatgaattcttcactttctttgttagagctgtggataatgggtctccatcaaaagaatctgttgttcttgtctatgttaaaatccttccaccggaaatgcagcttccaaaattttcagaacctttctatacctttacagtgtcagaggacgtgcctattggaacagagatagatctcatccgagcagaacatagtgggactgttctttacagcctggtcaaagggaatactccagaaagcaatagggatgagtcctttgtgattgacagacagagcgggagactgaagttggagaagagtcttgatcatgagacaactaagtggtatcagttttccatactggccaggtgcactcaagatgaccatgagatggtggcttctgtagatgttagtatccaagtgaaagatgcaaatgacaacagcccggtctttgaatctagtccatatgaggcattcattgttgaaaacctgccagggggaagtagagtaattcagatcagggcatctgatgctgactcaggaaccaacggccaagttatgtatagcctggatcagtcacaaagtgtggaagtcattgaatcctttgccattaacatggaaacaggctggattacaactttaaaggaacttgaccatgaaaagagagacaattaccagattaaagtggttgcatcagatcatggtgaaaagatccagctatcctccacagccattgtggatgttaccgtcaccgatgtcaacgatagtccaccacgattcacggccgagatctataaagggactgtgagtgaggatgacccccaaggtggggtgattgccatcttaagtaccacggatgctgattctgaagagatcaacagacaagttacatatttcataacaggaggggatcctttaggacagtttgccgttgaaactatacagaatgaatggaaggtatatgtgaagaaacctctagacagggaaaaaagggacaattaccttcttactatcacggcaactgatggcaccttctcatcaaaagcgatagttgaagtgaaagttctggatgcaaatgacaacagtccagtttgtgaaaagactttatattcagacactattcctgaagacgtccttcctggaaaattgatcatgcagatctctgctacagacgcagacatccgctctaacgctgaaattacttacacgttattgggttcaggtgcagaaaaattcaaactaaatccagacacaggtgaactgaaaacgtcaaccccccttgatcgtgaggagcaagctgtttatcatcttctcgtcagggccacagatggaggaggaagattctgccaagccagtattgtgctcacgctagaagatgtgaacgataacgcccccgaattctctgccgatccttatgccatcaccgtgtttgaaaacacagagccgggaacgctgctgacaagagtgcaggccacagatgccgacgcaggattaaatcggaagattttatactcactgattgactctgctgatgggcagttctccattaacgaattatctggaattattcagttagaaaaacctttggacagagaactccaggcagtatacaccctctctttgaaagctgtggatcaaggcttgccaaggaggctgactgccactggcactgtgattgtatcagttcttgacataaatgacaacccccctgtgtttgagtaccgtgaatatggtgccaccgtgtctgaggacattcttgttggaactgaagttcttcaagtgtatgcagcaagtcgggatattgaagcaaatgcagaaatcacctactcaataataagtggaaatgaacatgggaaattcagcatagattctaaaacaggggccgtatttatcattgagaatctggattatgagagctctcatgagtattacctaacagtagaggccactgatggaggcacgccttcactgagcgacgttgccactgtgaacgttaatgtaacagatatcaacgataatacccctgtgttcagccaagacacctacacgacagtcatcagtgaagatgccgttcttgagcagtctgtcatcacggttatggccgatgatgccgatggaccttccaacagccacatccactactcaattatagatggcaaccaaggaagctcgttcacaattgaccccgtcaggggagaagtcaaagtgaccaaacttctcgaccgagaaacgatttcaggttacacgctcacggttcaagcttctgataatggcagtccacccagagtcaacacgacgaccgtgaacatcgatgtgtccgatgtcaatgacaacgcgcccgtcttctccaggggaaactacagtgtcattatccaggaaaataagccagtgggcttcagcgtgctgcagctggtagtaacagatgaggattcttcccataacggtccacccttcttctttactattgtaactggaaatgatgagaaggcttttgaagttaacccgcaaggagtcctcctgacatcatctgccatcaagaggaaggagaaagatcattacttactgcaggtgaaggtggcagataatggaaagcctcagttgtcatctttgacatacattgacattagggtaattgaggagagcatctatccgcctgcgattttgcccctggagattttcatcaccgcttctggagaagaatactcaggtggcgtcattgggaagatccatgccacagaccaggacgtgtatgatactctaacctacagtctcgaccctcagatggacaacctgttctctgtttccagcacagggggcaagctgatagcacacaaaaagctagacatagggcaataccttctcaatgtcagcgtaacagatgggaagttcacgacggtggccgacatcacagtgcatatcagacaagtcacacaggagatgttgaaccacaccatcgcgatccgctttgccaacctcactccggaagaattcgttggtgactactggcgcaacttccagcgagctttacggaacatcctgggtgtgaggaggaacgacatacagattgttagtttgcagtcctctgaacctcacccacatctggacgtcttactttttgtagagaaaccaggtagtgctcagatctcaacaaaacaacttctgcacaagattaactcttccgtgactgacattgaggaaatcattggagttaggatactgaatgtattccagaaactctgcgcgggactggactgcccctggaagttctgcgatgaaaaggtgtctgtggatgaaagtgtgatgtcaacacacagcacagccagactgagttttgtgactccccgccaccacagggcagcggtgtgtctctgcaaagagggaaggtgcccacctgtccaccatggctgtgaagatgatccgtgccctgagggatccgaatgtgtgtctgatccctgggaggagaaacacacctgtgtctgtcccagcggcaggtttggtcagtgcccaggagattcatcatggaaggctgcagtacaagtttgactgtggaagtggccctggaattgtctctgttcagagcattcaggtcaatgatgggcagtggcacgcagtggccctggaagtgaatggaaactatgctcgcttggttctagaccaagttcatactgcatcgggcacagccccagggactctgaaaaccctgaacctggataactatgtgttttttggtggccacatccgtcagcagggaacaaggcatggaagaagtcctcaagttggtaatggtttcaggggttgtatggactccatttatttgaatgggcaggagctccctttaaacagcaaacccagaagctatgcacacatcgaagagtcggtggatgtatctccaggctgcttcctgacggccacggaagactgcgccagcaacccttgccagaatggaggcgtttgcaatccgtcacctgctggaggttattactgcaaatgcagtgccttgtacatagggacccactgtgagataagcgtcaatccgtgttcctccaacccatgcctctatgggggcacgtgtgttgtcgacaacggaggctttgtttgccagtgtagaggattatatactggtcagaggtgtcagcttagtccatactgcaaagatgaaccctgtaagaatggcggaacatgctttgacagtttggatggcgccgtttgtcagtgtgattcgggttttaggggagaaaggtgtcagagtgatatcgacgagtgctctggaaacccttgcctgcacggggccctctgtgagaacacgcacggctcctatcactgcaactgcagccacgagtacaggggacgtcactgcgaggatgctgcgcccaaccagtatgtgtccacgccgtggaacattgggttggcggaaggaattggaatcgttgtgtttgttgcagggatatttttactggtggtggtgtttgttctctgccgtaagatgattagtcggaaaaagaagcatcaggctgaacctaaagacaagcacctgggacccgctacggctttcttgcaaagaccgtattttgattccaagctaaataagaacatttactcagacataccaccccaggtgcctgtccggcctatttcctacaccccgagtattccaagtgactcaagaaacaatctggaccgaaattccttcgaaggatctgctatcccagagcatcccgaattcagcacttttaaccccgagtctgtgcacgggcaccgaaaagcagtggcggtctgcagcgtggcgccaaacctgcctcccccacccccttcaaactccccttctgacagcgactccatccagaagcctagctgggactttgactatgacacaaaagtggtggatcttgatccctgtctttccaagaagcctctagaggaaaagccttcccagccatacagtgcccgggaaagcctgtctgaagtgcagtctctgagctccttccagtccgaatcgtgcgatgacaatgggtatcactgggatacatcagattggatgccaagcgttcctctgccggacatacaagagttccccaactatgaggtgattgatgagcagacacccctgtactcagcagatccaaacgccatcgatacggactattaccctggaggctacgacatcgaaagtgattttcctccacccccagaagacttccccgcagctgatgagctaccaccgttaccgcccgaattcagcaatcagtttgaatccatccaccctcctagagacatgcctgccgcgggtagcttgggttcttcatcaagaaaccggcagaggttcaacttgaatcagtatttgcccaatttttatcccctcgatatgtctgaacctcaaacaaaaggcactggtgagaatagtacttgtagagaaccccatgccccttacccgccagggtatcaaagacacttcgaggcgcccgctgtcgagagcatgcccatgtctgtgtacgcctccaccgcctcctgctctgacgtgtcagcctgctgcgaagtggagtccgaggtcatgatgagtgactatgagagcggggacgacggccacttcgaagaggtgacgatcccgcccctggattcccagcagcacacggaagtctgactctcaactccccccaaagtgcctgactttagtgaacctagaggtgatgtgagtaatccgcgctgttctttgcagcagtgcttccaagctttttttggtgagccgaatgggcatggctgcgctggatcctgcgcctctggacgtgctagccatttccagtgtcccaactactgtcatcgtgaggttttcatcggctgtgccatttcccaacgtcttttgggatttacatctgtctgtgttaaaataatcaaacgaaaaatcagtcctgtgttgtcagcatgattcatgtatttatatagatttgattattttaattttcctgtctcttttttttgtaaattttatgtacagatttgatttttcatagttttaactagatttccaagatattttgtgcatttgtttcaactgaattttggtggtgtcagtgccattatctagcaccctgatttttttttttttactataaccagggtttcattctgtctttttccactgaagtgtgacattttgttagtacatttcagtgtagtcattcatttctagctgtacataggatgaaggagagatcagatacatgaacatgtcttacatgggttgctgtatttagaattataaacatttttcattattggaaagtgtaacggggaccttctgcatacctgtttagaaccaaaaccaccatgacacagtttttatagtgtctgtatatttgtgatgcaatggtcttgtaaaggtttttaatgaaaactaccattagccagtctttcttactgacaataaattattaataaaatacttga

SEQ ID NO: 1359 - DNA, 14773 bp, Homo sapiens
ctgggcggccgggcgcggggagagggcgcgggagcggctcgtgcggcaggtaccatgcggacgcgcgagcccggcgagggccccggcaggcccggtccctgctcgggggcgcgctgagacggcgggtgagctccacgagagcgccgtcgccacttcgggccaactttgcgattcccgacagttaagcaatggggagacatttggctttgctcctgcttctgctccttctcttccaacattttggagacagtgatggcagccaacgacttgaacagactcctctgcagtttacacacctcgagtacaacgtcaccgtgcaggagaactctgcagctaagacttatgtggggcatcctgtcaagatgggtgtttacattacacatccagcgtgggaagtaaggtacaaaattgtttccggagacagtgaaaacctgttcaaagctgaagagtacattctcggagacttttgctttctaagaataaggaccaaaggaggaaatacagctattcttaatagagaagtgaaggatcactacacattgatagtgaaagcacttgaaaaaaatactaatgtggaggcgcgaacaaaggtcagggtgcaggtgctggatacaaatgacttgagaccgttattctcacccacctcatacagcgtttctttacctgaaaacacagctataaggaccagtatcgcaagagtcagcgccacggatgcagacataggaaccaacggggaattttactacagttttaaagatcgaacagatatgtttgctattcacccaaccagtggtgtgatagtgttaactggtagacttgattacctagagaccaagctctatgagatggaaatcctcgctgcggaccgtggcatgaagttgtatgggagcagtggcatcagcagcatggccaagctaacggtgcacatcgaacaggccaatgaatgtgctccggtgataacagcagtgacattgtcaccatcagaactggacagggacccagcatatgcaattgtgacagtggatgactgcgatcagggtgccaatggtgacatagcatctttaagcatcgtggcaggtgaccttctccagcagtttagaacagtgaggtcctttccagggagtaaggagtataaagtcaaagccatcggtggcattgattgggacagtcatcctttcggctacaatctcacactacaggctaaagataaaggaactccgccccagttctcttctgttaaagtcattcacgtgacttctccacagttcaaagccgggccagtcaagtttgaaaaggatgtttacagagcagaaataagtgaatttgctcctcccaacacacctgtggtcatggtaaaggccattcctgcttattcccatttgaggtatgtttttaaaagtacacctggaaaagctaaattcagtttaaattacaacactggtctcatttctattttagaaccagttaaaagacagcaggcagcccattttgaacttgaagtaacaacaagtgacagaaaagcgtccaccaaggtcttggtgaaagtcttaggtgcaaatagcaatccccctgaatttacccagacagcgtacaaagctgcttttgatgagaacgtgcccattggtactactgtcatgagcctgagtgccgtagaccctgatgagggtgagaacgggtacgtgacatacagtatcgcaaatttaaatcatgtgccgtttgcgattgaccatttcactggtgccgtgagtacgtcagaaaacctggactacgaactgatgcctcgggtttatactctgaggattcgtgcatcagactggggcttgccgtaccgccgggaagtcgaagtccttgctacaattactctcaataacttgaatgacaacacacctttgtttgagaaaataaattgtgaagggacaattcccagagatctaggcgtgggagagcaaataaccactgtttctgctattgatgcagatgaacttcagttggtacagtatcagattgaagctggaaatgaactggatttctttagtttaaaccccaactcgggggtattgtcattaaagcgatcgctaatggatggcttaggtgcaaaggtgtctttccacagtctgagaatcacagctacagatggagaaaattttgccacaccattatatatcaacataacagtggctgccagtcacaagctggtaaacttgcagtgtgaagagactggtgttgccaaaatgctggcagagaagctcctgcaggcaaataaattacacaaccagggagaggtggaggatattttcttcgattctcactctgtcaatgctcacataccgcagtttagaagcactcttccgactggtattcaggtaaaggaaaaccagcctgtgggttccagtgtaattttcatgaactccactgaccttgacactggcttcaatggaaaactggtctatgctgtttctggaggaaatgaggatagttgcttcatgattgatatggaaacaggaatgctgaaaattttatctcctcttgaccgtgaaacaacagacaaatacaccctgaatattaccgtctatgaccttgggataccccagaaggctgcgtggcgtcttctacatgtcgtggttgtcgatgccaatgataatccacccgagtttttacaggagagctattttgtggaagtgagtgaagacaaggaggtacatagtgaaatcatccaggttgaagccacagataaagacctggggcccaacggacacgtgacgtactcaattgttacagacacagacacattttcaattgacagcgtgacgggtgttgttaacatcgcacgccctctggatcgagagctgcagcatgagcactccttaaagattgaggccagggaccaagccagagaagagcctcagctgttctccactgtcgttgtgaaagtatcactagaagatgttaatgacaacccacctacatttattccacctaattatcgtgtgaaagtccgagaggatcttccagaaggaaccgtcatcatgtggttagaagcccacgatcctgatttaggtcagtctggtcaggtgagatacagccttctggaccacggagaaggaaacttcgatgtggataaactcagtggagcagttaggatcgtccagcagttggactttgagaagaagcaagtgtataatctcactgtgagggccaaagacaagggaaagccagtttctctgtcttctacttgctatgttgaagttgaggtggttgatgtgaatgagaacctgcacccacccgtgttttccagctttgtggaaaaggggacagtgaaagaagatgcacctgttggttcattggtaatgacggtgtcggctcatgatgaggacgccagaagagatggggagatccgatactccattagagatggctctggcgttggtgttttcaaaataggtgaagagacaggtgtcatagagacgtcagatcgactggaccgtgaatcgacctcccattattggctaacagtctttgcaaccgatcagggtgtcgtgcctctttcatcgttcatagagatctacatagaggttgaggatgtcaatgacaatgcaccacagacatcagagcctgtttattacccagaaatcatggaaaattctcctaaagatgtatctgtggtccagatcgaggcatttgatccagattcgagctctaatgacaagctcatgtacaaaattacaagtggaaatccacaaggattcttttcaatacatcctaaaacaggtctcatcacaactacgtcaaggaagctagaccgagaacagcaagatgaacacatattagaggttactgtgacagacaatggtagtccccccaaatcaaccattgcaagagtcattgtgaaaatccttgatgaaaatgacaacaaacctcagtttctgcaaaagttctacaaaatcagactccctgagcgggaaaagccagaccgagaaagaaatgccagacgggagccgctctatcacgtcatagccaccgacaaggatgagggccccaatgcagaaatctcctacagcatcgaagacgggaatgagcatggcaaatttttcatcgaaccgaaaactggagtggtttcgtccaagaggttttcagcagctggagaatatgatattctttcaattaaggcagttgacaatggtcgccctcaaaagtcatcaaccaccagactccatattgaatggatctccaagcccaaaccgtccctggagcccatttcatttgaagaatcattttttacctttactgtgatggaaagtgaccccgttgctcacatgattggagtaatatctgtggagcctcctggcatacccctttggtttgacatcactggtggcaactacgacagtcacttcgatgtggacaagggaactggaaccatcattgttgccaaacctcttgatgcagaacagaagtcaaactacaacctcacagtcgaggctacagatggaaccaccactatcctcactcaggtattcatcaaagtaatagacacaaatgaccatcgtcctcagttttctacatcaaagtatgaagttgttattcctgaagatacagcgccagaaacagaaattttgcaaatcagtgctgtggatcaggatgagaaaaacaaactaatctacactctgcagagcagtagagatccactgagtctcaagaaatttcgtcttgatcctgcaaccggctctctctatacttctgagaaactggatcatgaagctgttcaccagcacaccctcacggtcatggtacgagatcaagatgtgcctgtaaaacgcaactttgcaaggattgtggtcaatgtcagcgacacgaatgaccacgccccgtggttcaccgcttcctcctacaaagggcgggtttatgaatcggcagccgttggctcagttgtgttgcaggtgacggctctggacaaggacaaagggaaaaatgctgaagtgctgtactcgatcgagtcaggaaatattggaaattcttttatgattgatcctgtcttgggctctattaaaactgccaaagaattagatcgaagtaaccaagcggagtatgatttaatggtaaaagctacagataagggcagtccaccaatgagtgaaataacttctgtgcgtatctttgtcacaattgctgacaacgcctctccgaagtttacatcaaaagaatattctgttgaacttagtgaaactgtcagcattgggagtttcgttgggatggttacagcccatagtcaatcatcagtggtgtatgaaataaaagatggaaatacaggtgatgcttttgatattaatccacattctggaactatcatcactcagaaagccctggactttgaaactttgcccatttacacattgataatacaaggaactaacatggctggtttgtccactaatacaacggttctagttcacttgcaggatgagaatgacaacgcgccagtttttatgcaggcagaatatacaggactcattagtgaatcagcctcaattaacagcgtggtcctaacagacaggaatgtcccactggtgattcgagcagctgatgctgataaagactcaaatgctttgcttgtatatcacattgttgaaccatctgtacacacatattttgctattgattctagcactggtgctattcatacagtactaagtctggactatgaagaaacaagtatttttcactttaccgtccaagtgcatgacatgggaaccccacgtttatttgctgagtatgcagcgaatgtaacagtacatgtaattgacattaatgactgcccccctgtgtttgccaagccattatatgaagcatctcttttgttaccaacatacaaaggagtaaaagtcatcacagtaaatgctacagatgctgattcaagtgcattctcacagttgatttactccatcaccgaaggcaacatcggggagaagttttctatggactacaagactggtgctctcactgtccaaaacacaactcagttaagaagccgctacgagctaaccgttagagcttccgatggcagatttgccggccttacctctgtcaaaattaatgtgaaagaaagcaaagaaagtcacctaaagtttacccaggatgtctactctgcggtagtgaaagagaattccaccgaggccgaaacattagctgtcattactgctattgggaatccaatcaatgagcctttgttttatcacatcctcaacccagatcgcagatttaaaataagccgcacttcaggagttctgtcaaccactggcacgcccttcgatcgtgagcagcaggaggcgtttgatgtggttgtagaagtgacagaggaacataagccttctgcagtggcccacgttgtcgtgaaggtcattgtagaagaccaaaatgataatgcgccggtgtttgtcaaccttccctactacgccgttgttaaagtggacactgaggtgggccatgtcattcgctatgtcactgctgtagacagagacagtggcagaaacggggaagtgcattactacctcaaggaacatcatgaacactttcaaattggacccttgggtgaaatttcactgaaaaagcaatttgagcttgacaccttaaataaagaatatcttgttacagtggttgcaaaagatggagggaacccggccttttcagcggaagttatcgttccgatcactgtcatgaataaagccatgcctgtgtttgaaaaacctttctacagtgcagagattgcagagagcatccaggtgcacagccctgtggtccacgtgcaggctaacagcccggaaggcctgaaagtgttctacagcatcacagacggagaccctttcagccagttcactattaacttcaatactggagttatcaatgtcatagctcctctggactttgaggcccacccggcatataagctgagcatacgcgcaactgactccttgacgggcgctcatgctgaagtatttgtggacatcatagtagacgacatcaatgataaccctcctgtgtttgctcagcagtcttatgcggtgaccctgtctgaggcatctgtaattggaacgtctgttgttcaagttagagccaccgattctgattcagaaccaaatagaggaatctcataccagatgtttgggaatcacagcaagagtcatgatcattttcatgtagacagcagcactggcctcatctcactactcagaaccctggattacgagcagtcccggcagcacacgatttttgtgagggcagttgatggtggtatgcccacgctgagcagtgatgtgattgtcacggtggacgttaccgacctcaatgataatccaccactctttgaacaacagatttatgaagccagaattagcgagcacgcccctcatgggcatttcgtgacctgtgtaaaagcctatgatgcagacagttcagacatagacaagttgcagtattccattctgtctggcaatgatcataaacattttgtcattgacagtgcaacagggattatcaccctctcaaacctgcaccggcacgccctgaagccattttacagtcttaacctgtcagtgtctgatggagtttttagaagttccacccaggttcatgtaactgtaattggaggcaatttgcacagtcctgctttccttcagaacgaatatgaagtggaactagctgaaaacgctcccctacataccctggtgatggaggtgaaaactacggatggggattctggtatttatggtcacgttacttaccatattgtaaatgactttgccaaagacagattttacataaatgagagaggacagatatttactttggaaaaacttgatcgagaaaccccggcggagaaagtgatctcagtccgtttaatggctaaggatgctggaggaaaagttgctttctgcaccgtgaatgtcatccttacagatgacaatgacaatgcaccacaatttcgagcaaccaaatacgaagtgaatatcgggtccagtgctgctaaagggacttcagtcgttaaagttcttgcaagtgatgccgatgagggctccaatgccgacatcacctatgccattgaagcagactctgaaagtgtaaaagagaatttggaaattaacaaactgtccggcgtaatcactacaaaggagagcctcattggcttggaaaatgaattcttcactttctttgttagagctgtggataatgggtctccatcaaaagaatctgttgttcttgtctatgttaaaatccttccaccggaaatgcagcttccaaaattttcagaacctttctatacctttacagtgtcagaggacgtgcctattggaacagagatagatctcatccgagcagaacatagtgggactgttctttacagcctggtcaaagggaatactccagaaagcaatagggatgagtcctttgtgattgacagacagagcgggagactgaagttggagaagagtcttgatcatgagacaactaagtggtatcagttttccatactggccaggtgcactcaagatgaccatgagatggtggcttctgtagatgttagtatccaagtgaaagatgcaaatgacaacagcccggtctttgaatctagtccatatgaggcattcattgttgaaaacctgccagggggaagtagagtaattcagatcagggcatctgatgctgactcaggaaccaacggccaagttatgtatagcctggatcagtcacaaagtgtggaagtcattgaatcctttgccattaacatggaaacaggctggattacaactttaaaggaacttgaccatgaaaagagagacaattaccagattaaagtggttgcatcagatcatggtgaaaagatccagctatcctccacagccattgtggatgttaccgtcaccgatgtcaacgatagtccaccacgattcacggccgagatctataaagggactgtgagtgaggatgacccccaaggtggggtgattgccatcttaagtaccacggatgctgattctgaagagatcaacagacaagttacatatttcataacaggaggggatcctttaggacagtttgccgttgaaactatacagaatgaatggaaggtatatgtgaagaaacctctagacagggaaaaaagggacaattaccttcttactatcacggcaactgatggcaccttctcatcaaaagcgatagttgaagtgaaagttctggatgcaaatgacaacagtccagtttgtgaaaagactttatattcagacactattcctgaagacgtccttcctggaaaattgatcatgcagatctctgctacagacgcagacatccgctctaacgctgaaattacttacacgttattgggttcaggtgcagaaaaattcaaactaaatccagacacaggtgaactgaaaacgtcaaccccccttgatcgtgaggagcaagctgtttatcatcttctcgtcagggccacagatggaggaggaagattctgccaagccagtattgtgctcacgctagaagatgtgaacgataacgcccccgaattctctgccgatccttatgccatcaccgtgtttgaaaacacagagccgggaacgctgctgacaagagtgcaggccacagatgccgacgcaggattaaatcggaagattttatactcactgattgactctgctgatgggcagttctccattaacgaattatctggaattattcagttagaaaaacctttggacagagaactccaggcagtatacaccctctctttgaaagctgtggatcaaggcttgccaaggaggctgactgccactggcactgtgattgtatcagttcttgacataaatgacaacccccctgtgtttgagtaccgtgaatatggtgccaccgtgtctgaggacattcttgttggaactgaagttcttcaagtgtatgcagcaagtcgggatattgaagcaaatgcagaaatcacctactcaataataagtggaaatgaacatgggaaattcagcatagattctaaaacaggggccgtatttatcattgagaatctggattatgagagctctcatgagtattacctaacagtagaggccactgatggaggcacgccttcactgagcgacgttgccactgtgaacgttaatgtaacagatatcaacgataatacccctgtgttcagccaagacacctacacgacagtcatcagtgaagatgccgttcttgagcagtctgtcatcacggttatggccgatgatgccgatggaccttccaacagccacatccactactcaattatagatggcaaccaaggaagctcgttcacaattgaccccgtcaggggagaagtcaaagtgaccaaacttctcgaccgagaaacgatttcaggttacacgctcacggttcaagcttctgataatggcagtccacccagagtcaacacgacgaccgtgaacatcgatgtgtccgatgtcaatgacaacgcgcccgtcttctccaggggaaactacagtgtcattatccaggaaaataagccagtgggcttcagcgtgctgcagctggtagtaacagatgaggattcttcccataacggtccacccttcttctttactattgtaactggaaatgatgagaaggcttttgaagttaacccgcaaggagtcctcctgacatcatctgccatcaagaggaaggagaaagatcattacttactgcaggtgaaggtggcagataatggaaagcctcagttgtcatctttgacatacattgacattagggtaattgaggagagcatctatccgcctgcgattttgcccctggagattttcatcacctcttctggagaagaatactcaggtggcgtcattgggaagatccatgccacagaccaggacgtgtatgatactctaacctacagtctcgaccctcagatggacaacctgttctctgtttccagcacagggggcaagctgatagcacacaaaaagctagacatagggcaataccttctcaatgtcagcgtaacagatgggaagttcacgacggtggccgacatcacagtgcatatcagacaagtcacacaggagatgttgaaccacaccatcgcgatccgctttgccaacctcactccggaagaattcgttggtgactactggcgcaacttccagcgagctttacggaacatcctgggtgtgaggaggaacgacatacagattgttagtttgcagtcctctgaacctcacccacatctggacgtcttactttttgtagagaaaccaggtagtgctcagatctcaacaaaacaacttctgcacaagattaactcttccgtgactgacattgaggaaatcattggagttaggatactgaatgtattccagaaactctgcgcgggactggactgcccctggaagttctgcgatgaaaaggtgtctgtggatgaaagtgtgatgtcaacacacagcacagccagactgagttttgtgactccccgccaccacagggcagcggtgtgtctctgcaaagagggaaggtgcccacctgtccaccatggctgtgaagatgatccgtgccctgagggatccgaatgtgtgtctgatccctgggaggagaaacacacctgtgtctgtcccagcggcaggtttggtcagtgcccagggagttcatctatgacactgactggaaacagctacgtgaaataccgtctgacggaaaatgaaaacaaattagagatgaaactgaccatgaggctcagaacatattccacgcatgcggttgtcatgtatgctcgaggaactgactatagcatcttggagattcatcatggaaggctgcagtacaagtttgactgtggaagtggccctggaattgtctctgttcagagcattcaggtcaatgatgggcagtggcacgcagtggccctggaagtgaatggaaactatgctcgcttggttctagaccaagttcatactgcatcgggcacagccccagggactctgaaaaccctgaacctggataactatgtgttttttggtggccacatccgtcagcagggaacaaggcatggaagaagtcctcaagttggtaatggtttcaggggttgtatggactccatttatttgaatgggcaggagctccctttaaacagcaaacccagaagctatgcacacatcgaagagtcggtggatgtatctccaggctgcttcctgacggccacggaagactgcgccagcaacccttgccagaatggaggcgtttgcaatccgtcacctgctggaggttattactgcaaatgcagtgccttgtacatagggacccactgtgagataagcgtcaatccgtgttcctccaagccatgcctctatgggggcacgtgtgttgtcgacaacggaggctttgtttgccagtgtagaggattatatactggtcagaggtgtcagcttagtccatactgcaaagatgaaccctgtaagaatggcggaacatgctttgacagtttggatggcgccgtttgtcagtgtgattcgggttttaggggagaaaggtgtcagagtgatatcgacgagtgctctggaaacccttgcctgcacggggccctctgtgagaacacgcacggctcctatcactgcaactgcagccacgagtacaggggacgtcactgcgaggatgctgcgcccaaccagtatgtgtccacgccgtggaacattgggttggcggaaggaattggaatcgttgtgtttgttgcagggatatttttactggtggtggtgtttgttctctgccgtaagatgattagtcggaaaaagaagcatcaggctgaacctaaagacaagcacctgggacccgctacggctttcttgcaaagaccgtattttgattccaagctaaataagaacatttactcagacataccaccccaggtgcctgtccggcctatttcctacaccccgagtattccaagtgactcaagaaacaatctggaccgaaattccttcgaaggatctgctatcccagagcatcccgaattcagcacttttaaccccgagtctgtgcacgggcaccgaaaagcagtggcggtctgcagcgtggcgccaaacctgcctcccccacccccttcaaactccccttctgacagcgactccatccagaagcctagctgggactttgactatgacacaaaagtggtggatcttgatccctgtctttccaagaagcctctagaggaaaagccttcccagccatacagtgcccgggaaagcctgtctgaagtgcagtctctgagctccttccagtccgaatcgtgcgatgacaatgggtatcactgggatacatcagattggatgccaagcgttcctctgccggacatacaagagttccccaactatgaggtgattgatgagcagacacccctgtactcagcagatccaaacgccatcgatacggactattaccctggaggctacgacatcgaaagtgattttcctccacccccagaagacttccccgcagctgatgagctaccaccgttaccgcccgaattcagcaatcagtttgaatccatccaccctcctagagacatgcctgccgcgggtagcttgggttcttcatcaagaaaccggcagaggttcaacttgaatcagtatttgcccaatttttatcccctcgatatgtctgaacctcaaacaaaaggcactggtgagaatagtacttgtagagaaccccatgccccttacccgccagggtatcaaagacacttcgaggcgcccgctgtcgagagcatgcccatgtctgtgtacgcctccaccgcctcctgctctgacgtgtcagcctgctgcgaagtggagtccgaggtcatgatgagtgactatgagagcggggacgacggccacttcgaagaggtgacgatcccgcccctggattcccagcagcacacggaagtctgactctcaactccccccaaagtgcctgactttagtgaacctagaggtgatgtgagtaatccgcgctgttctttgcagcagtgcttccaagctttttttggtgagccgaatgggcatggctgcgctggatcctgcgcctctggacgtgctagccatttccagtgtcccaactactgtcatcgtgaggttttcatcggctgtgccatttcccaacgtcttttgggatttacatctgtctgtgttaaaataatcaaacgaaaaatcagtcctgtgttgtcagcatgattcatgtatttatatagatttgattattttaattttcctgtctcttttttttgtaaattttatgtacagatttgatttttcatagttttaactagatttccaagatattttgtgcatttgtttcaactgaattttggtggtgtcagtgccattatctagcaccctgatttttttttttttactataaccagggtttcattctgtctttttccactgaagtgtgacattttgttagtacatttcagtgtagtcattcatttctagctgtacataggatgaaggagagatcagatacatgaacatgtcttacatgggttgctgtatttagaattataaacatttttcattattggaaagtgtaacggggaccttctgcatacctgtttagaaccaaaaccaccatgacacagtttttatagtgtctgtatatttgtgatgcaatggtcttgtaaaggtttttaatgaaaactaccattagccagtctttcttactgacaataaattattaataaaatacttgagctttaaaaaaaaaa

SEQ ID NO: 1360 - DNA, 14612 bp, Homo sapiens
ctgggcggccgggcgcggggagagggcgcgggagcggctcgtgcggcaggtaccatgcggacgcgcgagcccggcgagggccccggcaggcccggtccctgctcgggggcgcgctgagacggcgggtgagctccacgagagcgccgtcgccacttcgggccaactttgcgattcccgacagttaagcaatggggagacatttggctttgctcctgcttctgctccttctcttccaacattttggagacagtgatggcagccaacgacttgaacagactcctctgcagtttacacacctcgagtacaacgtcaccgtgcaggagaactctgcagctaagacttatgtggggcatcctgtcaagatgggtgtttacattacacatccagcgtgggaagtaaggtacaaaattgtttccggagacagtgaaaacctgttcaaagctgaagagtacattctcggagacttttgctttctaagaataaggaccaaaggaggaaatacagctattcttaatagagaagtgaaggatcactacacattgatagtgaaagcacttgaaaaaaatactaatgtggaggcgcgaacaaaggtcagggtgcaggtgctggatacaaatgacttgagaccgttattctcacccacctcatacagcgtttctttacctgaaaacacagctataaggaccagtatcgcaagagtcagcgccacggatgcagacataggaaccaacggggaattttactacagttttaaagatcgaacagatatgtttgctattcacccaaccagtggtgtgatagtgttaactggtagacttgattacctagagaccaagctctatgagatggaaatcctcgctgcggaccgtggcatgaagttgtatgggagcagtggcatcagcagcatggccaagctaacggtgcacatcgaacaggccaatgaatgtgctccggtgataacagcagtgacattgtcaccatcagaactggacagggacccagcatatgcaattgtgacagtggatgactgcgatcagggtgccaatggtgacatagcatctttaagcatcgtggcaggtgaccttctccagcagtttagaacagtgaggtcctttccagggagtaaggagtataaagtcaaagccatcggtggcattgattgggacagtcatcctttcggctacaatctcacactacaggctaaagataaaggaactccgccccagttctcttctgttaaagtcattcacgtgacttctccacagttcaaagccgggccagtcaagtttgaaaaggatgtttacagagcagaaataagtgaatttgctcctcccaacacacctgtggtcatggtaaaggccattcctgcttattcccatttgaggtatgtttttaaaaggacacctggaaaagctaaattcagtttaaattacaacactggtctcatttctattttagaaccagttaaaagacagcaggcagcccattttgaacttgaagtaacaacaagtgacagaaaagcgtccaccaaggtcttggtgaaagtcttaggtgcaaatagcaatccccctgaatttacccagacagcgtacaaagctgcttttgatgagaacgtgcccattggtactactgtcatgagcctgagtgccgtagaccctgatgagggtgagaatgggtacgtgacatacagtatcgcaaatttaaatcatgtgccgtttgcgattgaccatttcactggtgccgtgagtacgtcagaaaacctggactacgaactgatgcctcgggtttatactctgaggattcgtgcatcagactggggcttgccgtaccgccgggaagtcgaagtccttgctacaattactctcaataacttgaatgacaacacacctttgtttgagaaaataaattgtgaagggacaattcccagagatctaggcgtgggagagcaaataaccactgtttctgctattgatgcagatgaacttcagttggtacagtatcagattgaagctggaaatgaactggatttgtttagtttaaaccccaactcgggggtattgtcattaaagcgatcgctaatggatggcttaggtgcaaaggtgtctttccacagtctgagaatcacagctacagatggagaaaattttgccacaccattatatatcaacataacagtggctgccagtcacaagctggtaaacttgcagtgtgaagagactggtgttgccaaaatgctggcagagaagctcctgcaggcaaataaattacacaaccagggagaggtggaggatattttcttcgattctcactctgtcaatgctcacataccgcagtttagaagcactcttccgactggtattcaggtaaaggaaaaccagcctgtgggttccagtgtaattttcatgaactccactgaccttgacactggcttcaatggaaaactggtctatgctgtttctggaggaaatgaggatagttgcttcatgattgatatggaaacaggaatgctgaaaattttatctcctcttgaccgtgaaacaacagacaaatacaccctgaatattaccgtctatgaccttgggataccccagaaggctgcgtggcgtcttctacatgtcgtggttgtcgatgccaatgataatccacccgagtttttacaggagagctattttgtggaagtgagtgaagacaaggaggtacatagtgaaatcatccaggttgaagccacagataaagacctggggcccaacggacacgtgacgtactcaattcttacagacacagacacattttcaattgacagcgtgacgggtgttgttaacatcgcacgccctctggatcgagagctgcagcatgagcactccttaaagattgaggccagggaccaagccagagaagagcctcagctgttctccactgtcgttgtgaaagtatcactagaagatgttaatgacaacccacctacatttattccacctaattatcgtgtgaaagtccgagaggatcttccagaaggaaccgtcatcatgtggttagaagcccacgatcctgatttaggtcagtctggtcaggtgagatacagccttctggaccacggagaaggaaacttcgatgtggataaactcagtggagcagttaggatcgtccagcagttggactttgagaagaagcaagtgtataatctcactgtgagggccaaagacaagggaaagccagtttctctgtcttctacttgctatgttgaagttgaggtggttgatgtgaatgagaacctgcacccacccgtgttttccagctttgtggaaaaggggacagtgaaagaagatgcacctgttggttcattggtaatgacggtgtcggctcatgatgaggacgccggaagagatggggagatccgatactccattagagatggctctggcgttggtgttttcaaaataggtgaagagacaggtgtcatagagacgtcagatcgactggaccgtgaatcgacctcccattattggctaacagtctttgcaaccgatcagggtgtcgtgcctctttcatcgttcatagagatctacatagaggttgaggatgtcaatgacaatgcaccacagacatcagagcctgtttattacccagaaatcatggaaaattctcctaaagatgtatctgtggtccagatcgaggcatttgatccagattcgagctctaatgacaagctcatgtacaaaattacaagtggaaatccacaaggattcttttcaatacatcctaaaacaggtctcatcacaactacgtcaaggaagctagaccgagaacagcaagatgaacacatattagaggttactgtgacagacaatggtagtccccccaaatcaaccattgcaagagtcattgtgaaaatccttgatgaaaatgacaacaaacctcagtttctgcaaaagttctacaaaatcagactccctgagcgggaaaagccagaccgagaaagaaatgccagacgggagccgctctatcacgtcatagccaccgacaaggatgagggccccaatgcagaaatctcctacagcatcgaagacgggaatgagcatggcaaatttttcatcgaaccgaaaactggagtggtttcgtccaagaggttttcagcagctggagaatatgatattctttcaattaaggcagttgacaatggtcgccctcaaaagtcatcaaccaccagactccatattgaatggatctccaagcccaaaccgtccctggagcccatttcatttgaagaatcattttttacctttactgtgatggaaagtgaccccgttgctcacatgattggagtaatatctgtggagcctcctggcatacccctttggtttgacatcactggtggcaactacgacagtcacttcgatgtggacaagggaactggaaccatcattgttgccaaacctcttgatgcagaacagaagtcaaactacaacctcacagtcgaggctacagatggaaccaccactatcctcactcaggtattcatcaaagtaatagacacaaatgaccatcgtcctcagttttctacatcaaagtatgaagttgttattcctgaagatacagcgccagaaacagaaattttgcaaatcagtgctgtggatcaggatgagaaaaacaaactaatctacactctgcagagcagtagagatccactgagtctcaagaaatttcgtcttgatcctgcaaccggctctctctatacttctgagaaactggatcatgaagctgttcaccagcacaccctcacggtcatggtacgagatcaagatgtgcctgtaaaacgcaactttgcaaggattgtggtcaatgtcagcgacacgaatgaccacgccccgtggttcaccgcttcctcctacaaagggcgggtttatgaatcggcagccgttggctcagttgtgttgcaggtgacggctctggacaaggacaaagggaaaaatgctgaagtgctgtactcgatcgagtcaggtacttttggaaatattggaaattcttttatgattgatcctgtcttgggctctattaaaactgccaaagaattagatcgaagtaaccaagcggagtatgatttaatggtaaaagctacagataagggcagtccaccaatgagtgaaataacttctgtgcgtatctttgtcacaattgctgacaacgcctctccgaagtttacatcaaaagaatattctgttgaacttagtgaaactgtcagcattgggagtttcgttgggatggttacagcccatagtcaatcatcagtggtgtatgaaataaaagatggaaatacaggtgatgcttttgatattaatccacattctggaactatcatcactcagaaagccctggactttgaaactttgcccatttacacattgataatacaaggaactaacatggctggtttgtccactaatacaacggttctagttcacttgcaggatgagaatgacaacgcgccagtttttatgcaggcagaatatacaggactcattagtgaatcagcctcaattaacagcgtggtcctaacagacaggaatgtcccactggtgattcgagcagctgatgctgataaagactcaaatgctttgcttgtatatcacattgttgaaccatctgtacacacatattttgctattgattctagcactggtgctattcatacagtactaagtctggactatgaagaaacaagtatttttcactttaccgtccaagtgcatgacatgggaaccccacgtttatttgctgagtatgcagcgaatgtaacagtacatgtaattgacattaatgactgcccccctgtgtttgccaagccattatatgaagcatctcttttgttaccaacatacaaaggagtaaaagtcatcacagtaaatgctacagatgctgattcaagtgcattctcacagttgatttactccatcaccgaaggcaacatcggggagaagttttctatggactacaagactggtgctctcactgtccaaaacacaactcagttaagaagccgctacgagctaaccgttagagcttccgatggcagatttgccggccttacctctgtcaaaattaatgtgaaagaaagcaaagaaagtcacctaaagtttacccaggatgtctactctgcggtagtgaaagagaattccaccgaggccgaaacattagctgtcattactgctattgggaatccaatcaatgagcctttgttttatcacatcctcaacccagatcgcagatttaaaataagccgcacttcaggagttctgtcaaccactggcacgcccttcgatcgtgagcagcaggaggcgtttgatgtggttgtagaagtgacagaggaacataagccttctgcagtggcccacgttgtcgtgaaggtcattgtagaagaccaaaatgataatgcgccggtgtttgtcaaccttccctactacgccgttgttaaagtggacactgaggtgggccatgtcattcgctatgtcactgctgtagacagagacagtggcagaaacggggaagtgcattactacctcaaggaacatcatgaacactttcaaattggacccttgggtgaaatttcactgaaaaagcaatttgagcttgacaccttaaataaagaatatcttgttacagtggttgcaaaagatggagggaacccggccttttcagcggaagttatcgttccgatcactgtcatgaataaagccatgcctgtgtttgaaaaacctttctacagtgcagagattgcagagagcatccaggtgcacagccctgtggtccacgtgcaggctaacagcccggaaggcctgaaagtgttctacagcatcacagacggagaccctttcagccagttcactattaacttcaatactggagttatcaatgtcatagctcctctggactttgaggcccacccggcatataagctgagcatacgcgcaactgactccttgacgggcgctcatgctgaagtatttgtggacatcatagtagacgacatcaatgataaccctcctgtgtttgctcagcagtcttatgcggtgaccctgtctgaggcatctgtaattggaacgtctgttgttcaagttagagccaccgattctgattcagaaccaaatagaggaatctcataccagatgtttgggaatcacagcaagagtcatgatcattttcatgtagacagcagcactggcctcatctcactactcagaaccctggattacgagcagtcccggcagcacacgatttttgtgagggcagttgatggtggtatgcccacgctgagcagtgatgtgattgtcacggtggacgttaccgacctcaatgataatccaccactctttgaacaacagatttatgaagccagaattagcgagcacgcccctcatgggcatttcgtgacctgtgtaaaagcctatgatgcagacagttcagacatagacaagttgcagtattccattctgtctggcaatgatcataaacattttgtcattgacagtgcaacagggattatcaccctctcaaacctgcaccggcacgccctgaagccattttacagtcttaacctgtcagtgtctgatggagtttttagaagttccacccaggttcatgtaactgtaattggaggcaatttgcacagtcctgctttccttcagaacgaatatgaagtggaactagctgaaaacgctcccctacataccctggtgatggaggtgaaaactacggatggggattctggtatttatggtcacgttacttaccatattgtaaatgactttgccaaagacagattttacataaatgagagaggacagatatttactttggaaaaacttgatcgagaaaccccggcggagaaagtgatctcagtccgtttaatggctaaggatgctggaggaaaagttgctttctgcaccgtgaatgtcatccttacagatgacaatgacaatgcaccacaatttcgagcaaccaaatacgaagtgaatatcgggtccagtgctgctaaagggacttcagtcgttaaagttcttgcaagtgatgccgatgagggctccaatgccgacatcacctatgccattgaagcagactctgaaagtgtaaaagagaatttggaaattaacaaactgtccggcgtaatcactacaaaggagagcctcattggcttggaaaatgaattcttcactttctttgttagagctgtggataatgggtctccatcaaaagaatctgttgttcttgtctatgttaaaatccttccaccggaaatgcagcttccaaaattttcagaacctttctatacctttacagtgtcagaggacgtgcctattggaacagagatagatctcatccgagcagaacatagtgggactgttctttacagcctggtcaaagggaatactccagaaagcaatagggatgagtcctttgtgattgacagacagagcgggagactgaagttggagaagagtcttgatcatgagacaactaagtggtatcagttttccatactggccaggtgcactcaagatgaccatgagatggtggcttctgtagatgttagtatccaagtgaaagatgcaaatgacaacagcccggtctttgaatctagtccatatgaggcattcattgttgaaaacctgccagggggaagtagagtaattcagatcagggcatctgatgctgactcaggaaccaacggccaagttatgtatagcctggatcagtcacaaagtgtggaagtcattgaatcctttgccattaacatggaaacaggctggattacaactttaaaggaacttgaccatgaaaagagagacaattaccagattaaagtggttgcatcagatcatggtgaaaagatccagctatcctccacagccattgtggatgttaccgtcaccgatgtcaacgatagtccaccacgattcacggccgagatctataaagggactgtgagtgaggatgacccccaaggtggggtgattgccatcttaagtaccacggatgctgattctgaagagatcaacagacaagttacatatttcataacaggaggggatcctttaggacagtttgccgttgaaactatacagaatgaatggaaggtatatgtgaagaaacctctagacagggaaaaaagggacaattaccttcttactatcacggcaactgatggcaccttctcatcaaaagcgatagttgaagtgaaagttctggatgcaaatgacaacagtccagtttgtgaaaagactttatattcagacactattcctgaagacgtccttcctggaaaattgatcatgcagatctctgctacagacgcagacatccgctctaacgctgaaattacttacacgttattgggttcaggtgcagaaaaattcaaactaaatccagacacaggtgaactgaaaacgtcaaccccccttgatcgtgaggagcaagctgtttatcatcttctcgtcagggccacagatggaggaggaagattctgccaagccagtattgtgctcacgctagaagatgtgaacgataacgcccccgaattctctgccgatccttatgccatcaccgtgtttgaaaacacagagccgggaacgctgctgacaagagtgcaggccacagatgccgacgcaggattaaatcggaagattttatactcactgattgactctgctgatgggcagttctccattaacgaattatctggaattattcagttagaaaaacctttggacagagaactccaggcagtatacaccctctctttgaaagctgtggatcaaggcttgccaaggaggctgactgccactggcactgtgattgtatcagttcttgacataaatgacaacccccctgtgtttgagtaccgtgaatatggtgccaccgtgtctgaggacattcttgttggaactgaagttcttcaagtgtatgcagcaagtcgggatattgaagcaaatgcagaaatcacctactcaataataagtggaaatgaacatgggaaattcagcatagattctaaaacaggggccgtatttatcattgagaatctggattatgagagctctcatgagtattacctaacagtagaggccactgatggaggcacgccttcactgagcgacgttgccactgtgaacgttaatgtaacagatatcaacgataatacccctgtgttcagccaagacacctacacgacagtcatcagtgaagatgccgttcttgagcagtctgtcatcacggttatggccgatgatgccgatggaccttccaacagccacatccactactcaattatagatggcaaccaaggaagctcgttcacaattgaccccgtcaggggagaagtcaaagtgaccaaacttctcgaccgagaaacgatttcaggttacacgctcacggttcaagcttctgataatggcagtccacccagagtcaacacgacgaccgtgaacatcgatgtgtccgatgtcaatgacaacgcgcccgtcttctccaggggaaactacagtgtcattatccaggaaaataagccagtgggcttcagcgtgctgcagctggtagtaacagatgaggattcttcccataacggtccacccttcttctttactattgtaactggaaatgatgagaaggcttttgaagttaacccgcaaggagtcctcctgacatcatctgccatcaagaggaaggagaaagatcattacttactgcaggtgaaggtggcagataatggaaagcctcagttgtcatctttgacatacattgacattagggtaattgaggagagcatctatccgcctgcgattttgcccctggagattttcatcaccgcttctggagaagaatactcaggtggcgtcattgggaagatccatgccacagaccaggacgtgtatgatactctaacctacagtctcgaccctcagatggacaacctgttctctgtttccagcacagggggcaagctgatagcacacaaaaagctagacatagggcaataccttctcaatgtcagcgtaacagatgggaagttcacgacggtggccgacatcacagtgcatatcagacaagtcacacaggagatgttgaaccacaccatcgcgatccgctttgccaacctcactccggaagaattcgttggtgactactggcgcaacttccagcgagctttacggaacatcctgggtgtgaggaggaacgacatacagattgttagtttgcagtcctctgaacctcacccacatctggacgtcttactttttgtagagaaaccaggtagtgctcagatctcaacaaaacaacttctgcacaagattaactcttccgtgactgacattgaggaaatcattggagttaggatactgaatgtattccagaaactctgcgcgggactggactgcccctggaagttctgcgatgaaaaggtgtctgtggatgaaagtgtgatgtcaacacacagcacagccagactgagttttgtgactccccgccaccacagggcagcggtgtgtctctgcaaagagggaaggtgcccacctgtccaccatggctgtgaagatgatccgtgccctgagggatccgaatgtgtgtctgatccctgggaggagaaacacacctgtgtctgtcccagcggcaggtttggtcagtgcccaggagattcatcatggaaggctgcagtacaagtttgactgtggaagtggccctggaattgtctctgttcagagcattcaggtcaatgatgggcagtggcacgcagtggccctggaagtgaatggaaactatgctcgcttggttctagaccaagttcatactgcatcgggcacagccccagggactctgaaaaccctgaacctggataactatgtgttttttggtggccacatccgtcagcagggaacaaggcatggaagaagtcctcaagttggtaatggtttcaggggttgtatggactccatttatttgaatgggcaggagctccctttaaacagcaaacccagaagctatgcacacatcgaagagtcggtggatgtatctccaggctgcttcctgacggccacggaagactgcgccagcaacccttgccagaatggaggcgtttgcaatccgtcacctgctggaggttattactgcaaatgcagtgccttgtacatagggacccactgtgagataagcgtcaatccgtgttcctccaacccatgcctctatgggggcacgtgtgttgtcgacaacggaggctttgtttgccagtgtagaggattatatactggtcagaggtgtcagcttagtccatactgcaaagatgaaccctgtaagaatggcggaacatgctttgacagtttggatggcgccgtttgtcagtgtgattcgggttttaggggagaaaggtgtcagagtgatatcgacgagtgctctggaaacccttgcctgcacggggccctctgtgagaacacgcacggctcctatcactgcaactgcagccacgagtacaggggacgtcactgcgaggatgctgcgcccaaccagtatgtgtccacgccgtggaacattgggttggcggaaggaattggaatcgttgtgtttgttgcagggatatttttactggtggtggtgtttgttctctgccgtaagatgattagtcggaaaaagaagcatcaggctgaacctaaagacaagcacctgggacccgctacggctttcttgcaaagaccgtattttgattccaagctaaataagaacatttactcagacataccaccccaggtgcctgtccggcctatttcctacaccccgagtattccaagtgactcaagaaacaatctggaccgaaattccttcgaaggatctgctatcccagagcatcccgaattcagcacttttaaccccgagtctgtgcacgggcaccgaaaagcagtggcggtctgcagcgtggcgccaaacctgcctcccccacccccttcaaactccccttctgacagcgactccatccagaagcctagctgggactttgactatgacacaaaagtggtggatcttgatccctgtctttccaagaagcctctagaggaaaagccttcccagccatacagtgcccgggaaagcctgtctgaagtgcagtctctgagctccttccagtccgaatcgtgcgatgacaatgggtatcactgggatacatcagattggatgccaagcgttcctctgccggacatacaagagttccccaactatgaggtgattgatgagcagacacccctgtactcagcagatccaaacgccatcgatacggactattaccctggaggctacgacatcgaaagtgattttcctccacccccagaagacttccccgcagctgatgagctaccaccgttaccgcccgaattcagcaatcagtttgaatccatccaccctcctagagacatgcctgccgcgggtagcttgggttcttcatcaagaaaccggcagaggttcaacttgaatcagtatttgcccaatttttatcccctcgatatgtctgaacctcaaacaaaaggcactggtgagaatagtacttgtagagaaccccatgccccttacccgccagggtatcaaagacacttcgaggcgcccgctgtcgagagcatgcccatgtctgtgtacgcctccaccgcctcctgctctgacgtgtcagcctgctgcgaagtggagtccgaggtcatgatgagtgactatgagagcggggacgacggccacttcgaagaggtgacgatcccgcccctggattcccagcagcacacggaagtctgactctcaactccccccaaagtgcctgactttagtgaacctagaggtgatgtgagtaatccgcgctgttctttgcagcagtgcttccaagctttttttggtgagccgaatgggcatggctgcgctggatcctgcgcctctggacgtgctagccatttccagtgtcccaactactgtcatcgtgaggttttcatcggctgtgccatttcccaacgtcttttgggatttacatctgtctgtgttaaaataatcaaacgaaaaatcagtcctgtgttgtcagcatgattcatgtatttatatagatttgattattttaattttcctgtctcttttttttgtaaattttatgtacagatttgatttttcatagttttaactagatttccaagatattttgtgcatttgtttcaactgaattttggtggtgtcagtgccattatctagcaccctgatttttttttttttactataaccagggtttcattctgtctttttccactgaagtgtgacattttgttagtacatttcagtgtagtcattcatttctagctgtacataggatgaaggagagatcagatacatgaacatgtcttacatgggttgctgtatttagaattataaacatttttcattattggaaagtgtaacggggaccttctgcatacctgtttagaaccaaaaccaccatgacacagtttttatagtgtctgtatatttgtgatgcaatggtcttgtaaaggtttttaatgaaaactaccattagccagtctttcttactgacaataaattattaataaaatacttga

SEQ ID NO: 1361 - DNA, 1451 bp, Homo sapiens
tgcgcaggcaggtggagcaagatggctgtggagctgggcgtgctgctcgtccggccccggcccggaaccgggctgggtagagtgatgcggaccctcctgctggtgctgtggctggcgacgcgcggaagcgcgctctactttcacatcggagagacggagaagaagtgctttattgaggagatcccggacgagaccatggtcataggaaactaccggacgcagctgtatgacaagcagcgggaggagtaccagccggccaccccggggcttggcatgtttgtggaggtgaaggacccagaggacaaggtcatcctggcccggcagtatggctccgagggcaggttcactttcacttcccatacccctggtgagcaccagatctgtcttcactccaattccaccaagttctccctctttgctggaggcatgctgagagttcacctggacatccaggtaggtgaacatgccaatgactatgcagaaattgctgctaaagacaagttgagtgagttgcagctacgagtgcgacagctggtggaacaagtggagcagatccagaaagagcagaactaccagcggtggcgagaggagcgcttccggcagaccagtgagagcaccaaccagcgggtgctgtggtggtccattctgcagaccctcatcctcgtggccatcggtgtctggcagatgcggcacctcaagagcttctttgaagccaagaagcttgtgtagctgtcccaggcgtcacaacccatcctcccaggctgggggaggggaatgggcaggcaagccagtcttctgtcttcctttgctaacttagggttttgagcaggttggggtatggtgcctgtcatacccacctgccaccctgggaacctcactgttctctctttcagcctagacctgctgatccagggtgtgtgtgagttgagggtgggtggaggggtttgcagtgtgggaatgtggccctgcagttgacctgagctgcttcacatggttgtccattctggggcttaaagaactgggaccagaccaagtagaggccttggtgctggttggggtggggcctgcagagtcttagttactgatttcattttcaataaatgtaggtttgttacatgagtttcccaattaaaaaaaaaatgacttcttgtccagtgcaagtgactcagtcatcagtgggcacacactgcagggtgcctcagggaatgccagttcttccaaagagcaaagcacttcacattccaaagtgaattcccaccagtcagcttcattctttccttcttctccaggccttcctgtggcagggaatagtgggtttgtccaagattatacaacaagtaaattgggctggggctcaaatttacaccctttcctctgtgccagctccctggtgaagttccctctttctagagtcagtaagcaggattgtcatggatgctgccaggaagtgc

SEQ ID NO: 1362 - DNA, 1451 bp, Homo sapiens; identical to SEQ ID NO: 1361

SEQ ID NO: 1363 - DNA, 1455 bp, Homo sapiens
tgcgcaggcaggtggagcaagatggctgtggagctgggcgtgctgctcgtccggccccggcccggaaccgggctgggtagagtgatgcggaccctcctgctggtgctgtggctggcgacgcgcggaagcgcgctctactttcacatcggagagacggagaagaagtgctttattgaggagatcccggacgagaccatggtcataggaaactaccggacgcagctgtatgacaagcagcgggaggagtaccagccggccaccccggggcttggcatgtttgtggaggtgaaggacccagaggacaaggtcatcctggcccggcagtatggctccgagggcaggttcactttcacttcccatacccctggtgagcaccagatctgtcttcactccaattccaccaagttctccctctttgctggaggcatgctgagagttcacctggacatccaggtaggtgaacatgccaatgactatgcagaaattgctgctaaagacaagttgagtgagttgcagctacgagtgcgacagctggtggaacaagtggagcagatccagaaagagcagaactaccagcggtggcgagaggagcgcttccggcagaccagtgagagcaccaaccagcgggtgctgtggtggtccattctgcagaccctcatcctcggccgtttggtagtaatcacccaggggctggtaaagcccctcctcttggcacctcagaatcacagtgttactgatcagggatgtgaggctgctgttgggggtggggggaggggaatgggcaggcaagccagtcttctgtcttcctttgctaacttagggttttgagcaggttggggtatggtgcctgtcatacccacctgccaccctgggaacctcactgttctctctttcagcctagacctgctgatccagggtgtgtgtgagttgagggtgggtggaggggtttgcagtgtgggaatgtggccctgcagttgacctgagctgcttcacatggttgtccattctggggcttaaagaactgggaccagaccaagtagaggccttggtgctggttggggtggggcctgcagagtcttagttactgatttcattttcaataaatgtaggtttgttacatgagtttcccaattaaaaaaaaaatgacttcttgtccagtgcaagtgactcagtcatcagtgggcacacactgcagggtgcctcagggaatgccagttcttccaaagagcaaagcacttcacattccaaagtgaattcccaccagtcagcttcattctttccttcttctccaggccttcctgtggcagggaatagtgggtttgtccaagattatacaacaagtaaattgggctggggctcaaatttacaccctttcctctgtgccagctccctggtgaagttccctctttctagagtcagtaagcaggattgtcatggatgctgccaggaagtgcc

SEQ ID NO: 1364 - DNA, 3670 bp, Homo sapiens
agccgccgccacccgccgcgcccgacacccgggaggccccgccagcccgcgggagaggcccagcgggagtcgcggaacagcaggcccgagcccaccgcgccgggccccggacgccgcgcggaaaagatgaatttacaaccaattttctggattggactgatcagttcagtttgctgtgtgtttgctcaaacagatgaaaatagatgtttaaaagcaaatgccaaatcatgtggagaatgtatacaagcagggccaaattgtgggtggtgcacaaattcaacatttttacaggaaggaatgcctacttctgcacgatgtgatgatttagaagccttaaaaaagaagggttgccctccagatgacatagaaaatcccagaggctccaaagatataaagaaaaataaaaatgtaaccaaccgtagcaaaggaacagcagagaagctcaagccagaggatattactcagatccaaccacagcagttggttttgcgattaagatcaggggagccacagacatttacattaaaattcaagagagctgaagactatcccattgacctctactaccttatggacctgtcttactcaatgaaagacgatttggagaatgtaaaaagtcttggaacagatctgatgaatgaaatgaggaggattacttcggacttcagaattggatttggctcatttgtggaaaagactgtgatgccttacattagcacaacaccagctaagctcaggaacccttgcacaagtgaacagaactgcaccagcccatttagctacaaaaatgtgctcagtcttactaataaaggagaagtatttaatgaacttgttggaaaacagcgcatatctggaaatttggattctccagaaggtggtttcgatgccatcatgcaagttgcagtttgtggatcactgattggctggaggaatgttacacggctgctggtgttttccacagatgccgggtttcactttgctggagatgggaaacttggtggcattgttttaccaaatgatggacaatgtcacctggaaaataatatgtacacaatgagccattattatgattatccttctattgctcaccttgtccagaaactgagtgaaaataatattcagacaatttttgcagttactgaagaatttcagcctgtttacaaggagctgaaaaacttgatccctaagtcagcagtaggaacattatctgcaaattctagcaatgtaattcagttgatcattgatgcatacaattccctttcctcagaagtcattttggaaaacggcaaattgtcagaaggagtaacaataagttacaaatcttactgcaagaacggggtgaatggaacaggggaaaatggaagaaaatgttccaatatttccattggagatgaggttcaatttgaaattagcataacttcaaataagtgtccaaaaaaggattctgacagctttaaaattaggcctctgggctttacggaggaagtagaggttattcttcagtacatctgtgaatgtgaatgccaaagcgaaggcatccctgaaagtcccaagtgtcatgaaggaaatgggacatttgagtgtggcgcgtgcaggtgcaatgaagggcgtgttggtagacattgtgaatgcagcacagatgaagttaacagtgaagacatggatgcttactgcaggaaagaaaacagttcagaaatctgcagtaacaatggagagtgcgtctgcggacagtgtgtttgtaggaagagggataatacaaatgaaatttattctggcaaattctgcgagtgtgataatttcaactgtgatagatccaatggcttaatttgtggaggaaatggtgtttgcaagtgtcgtgtgtgtgagtgcaaccccaactacactggcagtgcatgtgactgttctttggatactagtacttgtgaagccagcaacggacagatctgcaatggccggggcatctgcgagtgtggtgtctgtaagtgtacagatccgaagtttcaagggcaaacgtgtgagatgtgtcagacctgccttggtgtctgtgctgagcataaagaatgtgttcagtgcagagccttcaataaaggagaaaagaaagacacatgcacacaggaatgttcctattttaacattaccaaggtagaaagtcgggacaaattaccccagccggtccaacctgatcctgtgtcccattgtaaggagaaggatgttgacgactgttggttctattttacgtattcagtgaatgggaacaacgaggtcatggttcatgttgtggagaatccagagtgtcccactggtccagacatcattccaattgtagctggtgtggttgctggaattgttcttattggccttgcattactgctgatatggaagcttttaatgataattcatgacagaagggagtttgctaaatttgaaaaggagaaaatgaatgccaaatgggacacgggtgaaaatcctatttataagagtgccgtaacaactgtggtcaatccgaagtatgagggaaaatgagtactgcccgtgcaaatcccacaacactgaatgcaaagtagcaatttccatagtcacagttaggtagctttagggcaatattgccatggttttactcatgtgcaggttttgaaaatgtacaatatgtataatttttaaaatgttttattattttgaaaataatgttgtaattcatgccagggatgcctttttgaccttttcttcctggactattgaaatcaagcttattggattaagtgatatttctatagcgattgaaagggcaatagttaaagtaatgagcatgatgagagtttctgttaatcatgtattaaaactgatttttagctttacaaatatgtcagtttgcagttatgcagaatccaaagtaaatgtcctgctagctagttaaggattgttttaaatctgttattttgctatttgcctgttagacatgactgatgacatatctgaaagacaagtatgttgagagttgctggtgtaaaatacgtttgaaatagttgatctacaaaggccatgggaaaaattcagagagttaggaaggaaaaaccaatagctttaaaacctgtgtgccattttaagagttacttaatgtttggtaacttttatgccttcactttacaaattcaagccttagataaaagaaccgagcaattttctgttgctgaatggggaccttttgagttgaatttattttattatttttattttgtttaatgtctggtgctttctatcacctcttctaatcttttaatgtatttgtttgcaattttggggtaagactttttttatgagtactttttctttgaagttttagcggtcaatttgcctttttaatgaacatgtgaagttatactgtggctatgcaacagctctcacctacgcgagtcttactttgagttagtgccataacagaccactgtatgtttacttctcaccatttgagttgcccatcttgtttcacactagtcacattcttgttttaagtgcctttagttttaacagttcactttttacagtgctatttactgaagttatttattaaatatgcctaaaatacttaaatcggatgtcttgactctgatgtattttatcaggttgtgtgcatgaaatttttatagattaaagaagttgaggaaaagcattt

SEQ ID NO: 1365 - DNA, 2481 bp, Homo sapiens
atgaatttacaaccaattttctggattggactgatcagttcagtttgctgtgtgtttgctcaaacagatgaaaatagatgtttaaaagcaaatgccaaatcatgtggagaatgtatacaagcagggccaaattgtgggtggtgcacaaattcaacatttttacaggaaggaatgcctacttctgcacgatgtgatgatttagaagccttaaaaaagaagggttgccctccagatgacatagaaaatcccagaggctccaaagatataaagaaaaataaaaatgtaaccaaccgtagcaaaggaacagcagagaagctcaagccagaggatattactcagatccaaccacagcagttggttttgcgattaagatcaggggagccacagacatttacattaaaattcaagagagctgaagactatcccattgacctctactaccttatggacctgtcttactcaatgaaagacgatttggagaatgtaaaaagtcttggaacagatctgatgaatgaaatgaggaggattacttcggacttcagaattggatttggctcatttgtggaaaagactgtgatgccttacattagcacaacaccagctaagctcaggaacccttgcacaagtgaacagaactgcaccagcccatttagctacaaaaatgtgctcagtcttactaataaaggagaagtatttaatgaacttgttggaaaacagcgcatatctggaaatttggattctccagaaggtggtttcgatgccatcatgcaagttgcagtttgtggatcactgattggctggaggaatgttacacggctgctggtgttttccacagatgccgggtttcactttgctggagatgggaaacttggtggcattgttttaccaaatgatggacaatgtcacctggaaaataatatgtacacaatgagccattattatgattatccttctattgctcaccttgtccagaaactgagtgaaaataatattcagacaatttttgcagttactgaagaatttcagcctgtttacaaggagctgaaaaacttgatccctaagtcagcagtaggaacattatctgcaaattctagcaatgtaattcagttgatcattgatgcatacaattccctttcctcagaagtcattttggaaaacggcaaattgtcagaaggagtaacaataagttacaaatcttactgcaagaacggggtgaatggaacaggggaaaatggaagaaaatgttccaatatttccattggagatgaggttcaatttgaaattagcataacttcaaataagtgtccaaaaaaggattctgacagctttaaaattaggcctctgggctttacggaggaagtagaggttattcttcagtacatctgtgaatgtgaatgccaaagcgaaggcatccctgaaagtcccaagtgtcatgaaggaaatgggacatttgagtgtggcgcgtgcaggtgcaatgaagggcgtgttggtagacattgtgaatgcagcacagatgaagttaacagtgaagacatggatgcttactgcaggaaagaaaacagttcagaaatctgcagtaacaatggagagtgcgtctgcggacagtgtgtttgtaggaagagggataatacaaatgaaatttattctggcaaattctgcgagtgtgataatttcaactgtgatagatccaatggcttaatttgtggaggaaatggtgtttgcaagtgtcgtgtgtgtgagtgcaaccccaactacactggcagtgcatgtgactgttctttggatactagtacttgtgaagccagcaacggacagatctgcaatggccggggcatctgcgagtgtggtgtctgtaagtgtacagatccgaagtttcaagggcaaacgtgtgagatgtgtcagacctgccttggtgtctgtgctgagcataaagaatgtgttcagtgcagagccttcaataaaggagaaaagaaagacacatgcacacaggaatgttcctattttaacattaccaaggtagaaagtcgggacaaattaccccagccggtccaacctgatcctgtgtcccattgtaaggagaaggatgttgacgactgttggttctattttacgtattcagtgaatgggaacaacgaggtcatggttcatgttgtggagaatccagagtgtcccactggtccagacatcattccaattgtagctggtgtggttgctggaattgttcttattggccttgcattactgctgatatggaagcttttaatgataattcatgacagaagggagtttgctaaatttgaaaaggagaaaatgaatgccaaatgggacacgcaagaaaatccgatttacaagagtcctattaataatttcaagaatccaaactacggacgtaaagctggtctctaaattgccggtgaaaatcctatttataagagtgccgtaacaactgtggtcaatccgaagtatgagggaaaatgagta

SEQ ID NO: 1366 - DNA, 3894 bp, Homo sapiens
agccgccgccacccgccgcgcccgacacccgggaggccccgccagcccgcgggagaggcccagcgggagtcgcggaacagcaggcccgagcccaccgcgccgggccccggacgccgcgcggaaaagatgaatttacaaccaattttctggattggactgatcagttcagtttgctgtgtgtttgctcaaacagatgaaaatagatgtttaaaagcaaatgccaaatcatgtggagaatgtatacaagcagggccaaattgtgggtggtgcacaaattcaacatttttacaggaaggaatgcctacttctgcacgatgtgatgatttagaagccttaaaaaagaagggttgccctccagatgacatagaaaatcccagaggctccaaagatataaagaaaaataaaaatgtaaccaaccgtagcaaaggaacagcagagaagctcaagccagaggatattactcagatccaaccacagcagttggttttgcgattaagatcaggggagccacagacatttacattaaaattcaagagagctgaagactatcccattgacctctactaccttatggacctgtcttactcaatgaaagacgatttggagaatgtaaaaagtcttggaacagatctgatgaatgaaatgaggaggattacttcggacttcagaattggatttggctcatttgtggaaaagactgtgatgccttacattagcacaacaccagctaagctcaggaacccttgcacaagtgaacagaactgcaccagcccatttagctacaaaaatgtgctcagtcttactaataaaggagaagtatttaatgaacttgttggaaaacagcgcatatctggaaatttggattctccagaaggtggtttcgatgccatcatgcaagttgcagtttgtggatcactgattggctggaggaatgttacacggctgctggtgttttccacagatgccgggtttcactttgctggagatgggaaacttggtggcattgttttaccaaatgatggacaatgtcacctggaaaataatatgtacacaatgagccattattatgattatccttctattgctcaccttgtccagaaactgagtgaaaataatattcagacaatttttgcagttactgaagaatttcagcctgtttacaaggagctgaaaaacttgatccctaagtcagcagtaggaacattatctgcaaattctagcaatgtaattcagttgatcattgatgcatacaattccctttcctcagaagtcattttggaaaacggcaaattgtcagaaggagtaacaataagttacaaatcttactgcaagaacggggtgaatggaacaggggaaaatggaagaaaatgttccaatatttccattggagatgaggttcaatttgaaattagcataacttcaaataagtgtccaaaaaaggattctgacagctttaaaattaggcctctgggctttacggaggaagtagaggttattcttcagtacatctgtgaatgtgaatgccaaagcgaaggcatccctgaaagtcccaagtgtcatgaaggaaatgggacatttgagtgtggcgcgtgcaggtgcaatgaagggcgtgttggtagacattgtgaatgcagcacagatgaagttaacagtgaagacatggatgcttactgcaggaaagaaaacagttcagaaatctgcagtaacaatggagagtgcgtctgcggacagtgtgtttgtaggaagagggataatacaaatgaaatttattctggcaaattctgcgagtgtgataatttcaactgtgatagatccaatggcttaatttgtggaggaaatggtgtttgcaagtgtcgtgtgtgtgagtgcaaccccaactacactggcagtgcatgtgactgttctttggatactagtacttgtgaagccagcaacggacagatctgcaatggccggggcatctgcgagtgtggtgtctgtaagtgtacagatccgaagtttcaagggcaaacgtgtgagatgtgtcagacctgccttggtgtctgtgctgagcataaagaatgtgttcagtgcagagccttcaataaaggagaaaagaaagacacatgcacacaggaatgttcctattttaacattaccaaggtagaaagtcgggacaaattaccccagccggtccaacctgatcctgtgtcccattgtaaggagaaggatgttgacgactgttggttctattttacgtattcagtgaatgggaacaacgaggtcatggttcatgttgtggagaatccagagtgtcccactggtccagacatcattccaattgtagctggtgtggttgctggaattgttcttattggccttgcattactgctgatatggaagcttttaatgataattcatgacagaagggagtttgctaaatttgaaaaggagaaaatgaatgccaaatgggacacgtctctctctgtcgcccagcctggagtgcagtggtgtgatatcagctcactgcaacctctgacttccagattccagcaattctcctgcctcagcctcccgagtacctgggattacagggtgaaaatcctatttataagagtgccgtaacaactgtggtcaatccgaagtatgagggaaaatgagtactgcccgtgcaaatcccacaacactgaatgcaaagtagcaatttccatagtcacagttaggtagctttagggcaatattgccatggttttactcatgtgcaggttttgaaaatgtacaatatgtataatttttaaaatgttttattattttgaaaataatgttgtaattcatgccagggactgacaaaagacttgagacaggatggttattcttgtcagctaaggtcacattgtgcctttttgaccttttcttcctggactattgaaatcaagcttattggattaagtgatatttctatagcgattgaaagggcaatagttaaagtaatgagcatgatgagagtttctgttaatcatgtattaaaactgatttttagctttacaaatatgtcagtttgcagttatgcagaatccaaagtaaatgtcctgctagctagttaaggattgttttaaatctgttattttgctatttgcctgttagacatgactgatgacatatctgaaagacaagtatgttgagagttgctggtgtaaaatacgtttgaaatagttgatctacaaaggccatgggaaaaattcagagagttaggaaggaaaaaccaatagctttaaaacctgtgtgccattttaagagttacttaatgtttggtaacttttatgccttcactttacaaattcaagccttagataaaagaaccgagcaattttctgctaaaaagtccttgatttagcactatttacatacaggccatactttacaaagtatttgctgaatggggaccttttgagttgaatttattttattatttttattttgtttaatgtctggtgctttctatcacctcttctaatcttttaatgtatttgtttgcaattttggggtaagactttttttatgagtactttttctttgaagttttagcggtcaatttgcctttttaatgaacatgtgaagttatactgtggctatgcaacagctctcacctacgcgagtcttactttgagttagtgccataacagaccactgtatgtttacttctcaccatttgagttgcccatcttgtttcacactagtcacattcttgttttaagtgcctttagttttaacagttcactttttacagtgctatttactgaagttatttattaaatatgcctaaaatacttaaatcggatgtcttgactctgatgtattttatcaggttgtgtgcatgaaatttttatagattaaagaagttgaggaaaagcattt

SEQ ID NO: 1367 - DNA, 3876 bp, Homo sapiens
agccgccgccacccgccgcgcccgacacccgggaggccccgccagcccgcgggagaggcccagcgggagtcgcggaacagcaggcccgagcccaccgcgccgggccccggacgccgcgcggaaaagatgaatttacaaccaattttctggattggactgatcagttcagtttgctgtgtgtttgctcaaacagatgaaaatagatgtttaaaagcaaatgccaaatcatgtggagaatgtatacaagcagggccaaattgtgggtggtgcacaaattcaacatttttacaggaaggaatgcctacttctgcacgatgtgatgatttagaagccttaaaaaagaagggttgccctccagatgacatagaaaatcccagaggctccaaagatataaagaaaaataaaaatgtaaccaaccgtagcaaaggaacagcagagaagctcaagccagaggatattactcagatccaaccacagcagttggttttgcgattaagatcaggggagccacagacatttacattaaaattcaagagagctgaagactatcccattgacctctactaccttatggacctgtcttactcaatgaaagacgatttggagaatgtaaaaagtcttggaacagatctgatgaatgaaatgaggaggattacttcggacttcagaattggatttggctcatttgtggaaaagactgtgatgccttacattagcacaacaccagctaagctcaggaacccttgcacaagtgaacagaactgcaccagcccatttagctacaaaaatgtgctcagtcttactaataaaggagaagtatttaatgaacttgttggaaaacagcgcatatctggaaatttggattctccagaaggtggtttcgatgccatcatgcaagttgcagtttgtggatcactgattggctggaggaatgttacacggctgctggtgttttccacagatgccgggtttcactttgctggagatgggaaacttggtggcattgttttaccaaatgatggacaatgtcacctggaaaataatatgtacacaatgagccattattatgattatccttctattgctcaccttgtccagaaactgagtgaaaataatattcagacaatttttgcagttactgaagaatttcagcctgtttacaaggagctgaaaaacttgatccctaagtcagcagtaggaacattatctgcaaattctagcaatgtaattcagttgatcattgatgcatacaattccctttcctcagaagtcattttggaaaacggcaaattgtcagaaggagtaacaataagttacaaatcttactgcaagaacggggtgaatggaacaggggaaaatggaagaaaatgttccaatatttccattggagatgaggttcaatttgaaattagcataacttcaaataagtgtccaaaaaaggattctgacagctttaaaattaggcctctgggctttacggaggaagtagaggttattcttcagtacatctgtgaatgtgaatgccaaagcgaaggcatccctgaaagtcccaagtgtcatgaaggaaatgggacatttgagtgtggcgcgtgcaggtgcaatgaagggcgtgttggtagacattgtgaatgcagcacagatgaagttaacagtgaagacatggatgcttactgcaggaaagaaaacagttcagaaatctgcagtaacaatggagagtgcgtctgcggacagtgtgtttgtaggaagagggataatacaaatgaaatttattctggcaaattctgcgagtgtgataatttcaactgtgatagatccaatggcttaatttgtggaggaaatggtgtttgcaagtgtcgtgtgtgtgagtgcaaccccaactacactggcagtgcatgtgactgttctttggatactagtacttgtgaagccagcaacggacagatctgcaatggccggggcatctgcgagtgtggtgtctgtaagtgtacagatccgaagtttcaagggcaaacgtgtgagatgtgtcagacctgccttggtgtctgtgctgagcataaagaatgtgttcagtgcagagccttcaataaaggagaaaagaaagacacatgcacacaggaatgttcctattttaacattaccaaggtagaaagtcgggacaaattaccccagccggtccaacctgatcctgtgtcccattgtaaggagaaggatgttgacgactgttggttctattttacgtattcagtgaatgggaacaacgaggtcatggttcatgttgtggagaatccagagtgtcccactggtccagacatcattccaattgtagctggtgtggttgctggaattgttcttattggccttgcattactgctgatatggaagcttttaatgataattcatgacagaagggagtttgctaaatttgaaaaggagaaaatgaatgccaaatgggacacgcctggagtgcagtggtgtgatatcagctcactgcaacctctgacttccagattccagcaattctcctgcctcagcctcccgagtacctgggattacagggtgaaaatcctatttataagagtgccgtaacaactgtggtcaatccgaagtatgagggaaaatgagtactgcccgtgcaaatcccacaacactgaatgcaaagtagcaatttccatagtcacagttaggtagctttagggcaatattgccatggttttactcatgtgcaggttttgaaaatgtacaatatgtataatttttaaaatgttttattattttgaaaataatgttgtaattcatgccagggactgacaaaagacttgagacaggatggttattcttgtcagctaaggtcacattgtgcctttttgaccttttcttcctggactattgaaatcaagcttattggattaagtgatatttctatagcgattgaaagggcaatagttaaagtaatgagcatgatgagagtttctgttaatcatgtattaaaactgatttttagctttacaaatatgtcagtttgcagttatgcagaatccaaagtaaatgtcctgctagctagttaaggattgttttaaatctgttattttgctatttgcctgttagacatgactgatgacatatctgaaagacaagtatgttgagagttgctggtgtaaaatacgtttgaaatagttgatctacaaaggccatgggaaaaattcagagagttaggaaggaaaaaccaatagctttaaaacctgtgtgccattttaagagttacttaatgtttggtaacttttatgccttcactttacaaattcaagccttagataaaagaaccgagcaattttctgctaaaaagtccttgatttagcactatttacatacaggccatactttacaaagtatttgctgaatggggaccttttgagttgaatttattttattatttttattttgtttaatgtctggtgctttctatcacctcttctaatcttttaatgtatttgtttgcaattttggggtaagactttttttatgagtactttttctttgaagttttagcggtcaatttgcctttttaatgaacatgtgaagttatactgtggctatgcaacagctctcacctacgcgagtcttactttgagttagtgccataacagaccactgtatgtttacttctcaccatttgagttgcccatcttgtttcacactagtcacattcttgttttaagtgcctttagttttaacagttcactttttacagtgctatttactgaagttatttattaaatatgcctaaaatacttaaatcggatgtcttgactctgatgtattttatcaggttgtgtgcatgaaatttttatagattaaagaagttgaggaaaagcattt

SEQ ID NO: 1368 - DNA, 2498 bp, Homo sapiens
atgaatttacaaccaattttctggattggactgatcagttcagtttgctgtgtgtttgctcaaacagatgaaaatagatgtttaaaagcaaatgccaaatcatgtggagaatgtatacaagcagggccaaattgtgggtggtgcacaaattcaacatttttacaggaaggaatgcctacttctgcacgatgtgatgatttagaagccttaaaaaagaagggttgccctccagatgacatagaaaatcccagaggctccaaagatataaagaaaaataaaaatgtaaccaaccgtagcaaaggaacagcagagaagctcaagccagaggatattactcagatccaaccacagcagttggttttgcgattaagatcaggggagccacagacatttacattaaaattcaagagagctgaagactatcccattgacctctactaccttatggacctgtcttactcaatgaaagacgatttggagaatgtaaaaagtcttggaacagatctgatgaatgaaatgaggaggattacttcggacttcagaattggatttggctcatttgtggaaaagactgtgatgccttacattagcacaacaccagctaagctcaggaacccttgcacaagtgaacagaactgcaccagcccatttagctacaaaaatgtgctcagtcttactaataaaggagaagtatttaatgaacttgttggaaaacagcgcatatctggaaatttggattctccagaaggtggtttcgatgccatcatgcaagttgcagtttgtggatcactgattggctggaggaatgttacacggctgctggtgttttccacagatgccgggtttcactttgctggagatgggaaacttggtggcattgttttaccaaatgatggacaatgtcacctggaaaataatatgtacacaatgagccattattatgattatccttctattgctcaccttgtccagaaactgagtgaaaataatattcagacaatttttgcagttactgaagaatttcagcctgtttacaaggagctgaaaaacttgatccctaagtcagcagtaggaacattatctgcaaattctagcaatgtaattcagttgatcattgatgcatacaattccctttcctcagaagtcattttggaaaacggcaaattgtcagaaggagtaacaataagttacaaatcttactgcaagaacggggtgaatggaacaggggaaaatggaagaaaatgttccaatatttccattggagatgaggttcaatttgaaattagcataacttcaaataagtgtccaaaaaaggattctgacagctttaaaattaggcctctgggctttacggaggaagtagaggttattcttcagtacatctgtgaatgtgaatgccaaagcgaaggcatccctgaaagtcccaagtgtcatgaaggaaatgggacatttgagtgtggcgcgtgcaggtgcaatgaagggcgtgttggtagacattgtgaatgcagcacagatgaagttaacagtgaagacatggatgcttactgcaggaaagaaaacagttcagaaatctgcagtaacaatggagagtgcgtctgcggacagtgtgtttgtaggaagagggataatacaaatgaaatttattctggcaaattctgcgagtgtgataatttcaactgtgatagatccaatggcttaatttgtggaggaaatggtgtttgcaagtgtcgtgtgtgtgagtgcaaccccaactacactggcagtgcatgtgactgttctttggatactagtacttgtgaagccagcaacggacagatctgcaatggccggggcatctgcgagtgtggtgtctgtaagtgtacagatccgaagtttcaagggcaaacgtgtgagatgtgtcagacctgccttggtgtctgtgctgagcataaagaatgtgttcagtgcagagccttcaataaaggagaaaagaaagacacatgcacacaggaatgttcctattttaacattaccaaggtagaaagtcgggacaaattaccccagccggtccaacctgatcctgtgtcccattgtaaggagaaggatgttgacgactgttggttctattttacgtattcagtgaatgggaacaacgaggtcatggttcatgttgtggagaatccagagtgtcccactggtccagacatcattccaattgtagctggtgtggttgctggaattgttcttattggccttgcattactgctgatatggaagcttttaatgataattcatgacagaagggagtttgctaaatttgaaaaggagaaaatgaatgccaaatgggacacgcctggagtgcagtggtgtgatatcagctcactgcaacctctgacttccagattccagcaattctcctgcctcagcctcccgagtacctgggattacagggtgaaaatcctatttataagagtgccgtaacaactgtggtcaatccgaagtatgagggaaaatgagta

SEQ ID NO: 1369 - DNA, 3399 bp, Homo sapiens
atgaatttacaaccaattttctggattggactgatcagttcagtttgctgtgtgtttgctcaaacagatgaaaatagatgtttaaaagcaaatgccaaatcatgtggagaatgtatacaagcagggccaaattgtgggtggtgcacaaattcaacatttttacaggaaggaatgcctacttctgcacgatgtgatgatttagaagccttaaaaaagaagggttgccctccagatgacatagaaaatcccagaggctccaaagatataaagaaaaataaaaatgtaaccaaccgtagcaaaggaacagcagagaagctcaagccagaggatattactcagatccaaccacagcagttggttttgcgattaagatcaggggagccacagacatttacattaaaattcaagagagctgaagactatcccattgacctctactaccttatggacctgtcttactcaatgaaagacgatttggagaatgtaaaaagtcttggaacagatctgatgaatgaaatgaggaggattacttcggacttcagaattggatttggctcatttgtggaaaagactgtgatgccttacattagcacaacaccagctaagctcaggaacccttgcacaagtgaacagaactgcaccagcccatttagctacaaaaatgtgctcagtcttactaataaaggagaagtatttaatgaacttgttggaaaacagcgcatatctggaaatttggattctccagaaggtggtttcgatgccatcatgcaagttgcagtttgtggatcactgattggctggaggaatgttacacggctgctggtgttttccacagatgccgggtttcactttgctggagatgggaaacttggtggcattgttttaccaaatgatggacaatgtcacctggaaaataatatgtacacaatgagccattattatgattatccttctattgctcaccttgtccagaaactgagtgaaaataatattcagacaatttttgcagttactgaagaatttcagcctgtttacaaggagctgaaaaacttgatccctaagtcagcagtaggaacattatctgcaaattctagcaatgtaattcagttgatcattgatgcatacaattccctttcctcagaagtcattttggaaaacggcaaattgtcagaaggagtaacaataagttacaaatcttactgcaagaacggggtgaatggaacaggggaaaatggaagaaaatgttccaatatttccattggagatgaggttcaatttgaaattagcataacttcaaataagtgtccaaaaaaggattctgacagctttaaaattaggcctctgggctttacggaggaagtagaggttattcttcagtacatctgtgaatgtgaatgccaaagcgaaggcatccctgaaagtcccaagtgtcatgaaggaaatgggacatttgagtgtggcgcgtgcaggtgcaatgaagggcgtgttggtagacattgtgaatgcagcacagatgaagttaacagtgaagacatggatgcttactgcaggaaagaaaacagttcagaaatctgcagtaacaatggagagtgcgtctgcggacagtgtgtttgtaggaagagggataatacaaatgaaatttattctggcaaattctgcgagtgtgataatttcaactgtgatagatccaatggcttaatttgtggaggaaatggtgtttgcaagtgtcgtgtgtgtgagtgcaaccccaactacactggcagtgcatgtgactgttctttggatactagtacttgtgaagccagcaacggacagatctgcaatggccggggcatctgcgagtgtggtgtctgtaagtgtacagatccgaagtttcaagggcaaacgtgtgagatgtgtcagacctgccttggtgtctgtgctgagcataaagaatgtgttcagtgcagagccttcaataaaggagaaaagaaagacacatgcacacaggaatgttcctattttaacattaccaaggtagaaagtcgggacaaattaccccagccggtccaacctgatcctgtgtcccattgtaaggagaaggatgttgacgactgttggttctattttacgtattcagtgaatgggaacaacgaggtcatggttcatgttgtggagaatccagagtgtcccactggtccagacatcattccaattgtagctggtgtggttgctggaattgttcttattggccttgcattactgctgatatggaagcttttaatgataattcatgacagaagggagtttgctaaatttgaaaaggagaaaatgaatgccaaatgggacacggtaagttacaaaacatccaaaaagcaaagtggcttataaagtaaatgtaatactcctaagacttatgtattagctgtcaggctgattattaaagtcctttctaagtattttattcccccaaaagtttcttactcaaggaatttgcatttagtgaaaaacagaaagcatcctaaatatatcccattgaaacaaaacattgattataagcatgtatattctggttcatgtggccgatatttttatttctttaatgattttgatcctaaatctgccttttcatctaatgtgaagtagaatcctaaataatgttatctgtgtagcaagctattcaatgggaaagctgcttctttctttaaaacaaacaaacaaaaaaaaccttcagtggaaagccaaattccaaaaggttatataccaagcttgtccaactcgcagctcgtcggccaggacatgcagcccagaatagctttgaatgtggccccaacacaaatttgtaaactttcttagaaattgtaattattattattatttttttttggtaactttttttaaagctcatcagctatcgttagtgtattttatgtgtggcccaagacagttcttcttcttgccagtgtggcccagggaagccaaaagattggacacccctgctatatactatatgattccatttagaggacattctggaaaagcaaaactgtaggggcaaaaatcagtggttgctaggggctggaatgggggaaagtgttgaccacagaggggcgtaagggatcttccttgggatgacttgattgtgggtggatttatgtatttgaaaactcacagaactatgtactttaaaaagatgtatgttcctctatgaaaattatatctcagtaaactttggcttataaaaatcttaaaagccctaagtgaccgaaaggttatgttagcattgagtgctttgaaatatggagtcagagggtggggtaaccaaatgttggcctttgtgtattcatcttttgatacaagaaagcaatgccaatcttcagtatttttaaattgtaaatgaattttgtagttcccgaattc

SEQ ID NO: 1370 - DNA, 2533 bp, Homo sapiens
gagccagcccagccgcgttccgaacgcgagggtcgccggcctgggcgctgtcacgtcggggctgccggagctgcgggggaccgggcccgaacggcccctgacacctgcggtctcccgccgggctgggcaagcgcagatgaatttacaaccaattttctggattggactgatcagttcagtttgctgtgtgtttgctcaaacagatgaaaatagatgtttaaaagcaaatgccaaatcatgtggagaatgtatacaagcagggccaaattgtgggtggtgcacaaattcaacatttttacaggaaggaatgcctacttctgcacgatgtgatgatttagaagccttaaaaaagaagggttgccctccagatgacatagaaaatcccagaggctccaaagatataaagaaaaataaaaatgtaaccaaccgtagcaaaggaacagcagagaagctcaagccagaggatattactcagatccaaccacagcagttggttttgcgattaagatcaggggagccacagacatttacattaaaattcaagagagctgaagactatcccattgacctctactaccttatggacctgtcttactcaatgaaagacgatttggagaatgtaaaaagtcttggaacagatctgatgaatgaaatgaggaggattacttcggacttcagaattggatttggctcatttgtggaaaagactgtgatgccttacattagcacaacaccagctaagctcaggaacccttgcacaagtgaacagaactgcaccagcccatttagctacaaaaatgtgctcagtcttactaataaaggagaagtatttaatgaacttgttggaaaacagcgcatatctggaaatttggattctccagaaggtggtttcgatgccatcatgcaagttgcagtttgtggatcactgattggctggaggaatgttacacggctgctggtgttttccacagatgccgggtttcactttgctggagatgggaaacttggtggcattgttttaccaaatgatggacaatgtcacctggaaaataatatgtacacaatgagccattattatgattatccttctattgctcaccttgtccagaaactgagtgaaaataatattcagacaatttttgcagttactgaagaatttcagcctgtttacaaggagctgaaaaacttgatccctaagtcagcagtaggaacattatctgcaaattctagcaatgtaattcagttgatcattgatgcatacaattccctttcctcagaagtcattttggaaaacggcaaattgtcagaaggagtaacaataagttacaaatcttactgcaagaacggggtgaatggaacaggggaaaatggaagaaaatgttccaatatttccattggagatgaggttcaatttgaaattagcataacttcaaataagtgtccaaaaaaggattctgacagctttaaaattaggcctctgggctttacggaggaagtagaggttattcttcagtacatctgtgaatgtgaatgccaaagcgaaggcatccctgaaagtcccaagtgtcatgaaggaaatgggacatttgagtgtggcgcgtgcaggtgcaatgaagggcgtgttggtagacattgtgaatgcagcacagatgaagttaacagtgaagacatggatgcttactgcaggaaagaaaacagttcagaaatctgcagtaacaatggagagtgcgtctgcggacagtgtgtttgtaggaagagggataatacaaatgaaatttattctggcaaattctgcgagtgtgataatttcaactgtgatagatccaatggcttaatttgtggaggaaatggtgtttgcaagtgtcgtgtgtgtgagtgcaaccccaactacactggcagtgcatgtgactgttctttggatactagtacttgtgaagccagcaacggacagatctgcaatggccggggcatctgcgagtgtggtgtctgtaagtgtacagatccgaagtttcaagggcaaacgtgtgagatgtgtcagacctgccttggtgtctgtgctgagcataaagaatgtgttcagtgcagagccttcaataaaggagaaaagaaagacacatgcacacaggaatgttcctattttaacattaccaaggtagaaagtcgggacaaattaccccagccggtccaacctgatcctgtgtcccattgtaaggagaaggatgttgacgactgttggttctattttacgtattcagtgaatgggaacaacgaggtcatggttcatgttgtggagaatccagagtgtcccactggtccagacatcattccaattgtagctggtgtggttgctggaattgttcttattggccttgcattactgctgatatggaagcttttaatgataattcatgacagaagggagtttgctaaatttgaaaaggagaaaatgaatgccaaatgggacacgggtgaaaatcctatttataagagtgccgtaacaactgtggtcaatccgaagtatgagggaaaatga

SEQ ID NO: 1371 - DNA, 3733 bp, Homo sapiens
atgaatttacaaccaattttctggattggactgatcagttcagtttgctgtgtgtttgctcaaacagatgaaaatagatgtttaaaagcaaatgccaaatcatgtggagaatgtatacaagcagggccaaattgtgggtggtgcacaaattcaacatttttacaggaaggaatgcctacttctgcacgatgtgatgatttagaagccttaaaaaagaagggttgccctccagatgacatagaaaatcccagaggctccaaagatataaagaaaaataaaaatgtaaccaaccgtagcaaaggaacagcagagaagctcaagccagaggatattactcagatccaaccacagcagttggttttgcgattaagatcaggggagccacagacatttacattaaaattcaagagagctgaagactatcccattgacctctactaccttatggacctgtcttactcaatgaaagacgatttggagaatgtaaaaagtcttggaacagatctgatgaatgaaatgaggaggattacttcggacttcagaattggatttggctcatttgtggaaaagactgtgatgccttacattagcacaacaccagctaagctcaggaacccttgcacaagtgaacagaactgcaccagcccatttagctacaaaaatgtgctcagtcttactaataaaggagaagtatttaatgaacttgttggaaaacagcgcatatctggaaatttggattctccagaaggtggtttcgatgccatcatgcaagttgcagtttgtggatcactgattggctggaggaatgttacacggctgctggtgttttccacagatgccgggtttcactttgctggagatgggaaacttggtggcattgttttaccaaatgatggacaatgtcacctggaaaataatatgtacacaatgagccattattatgattatccttctattgctcaccttgtccagaaactgagtgaaaataatattcagacaatttttgcagttactgaagaatttcagcctgtttacaaggagctgaaaaacttgatccctaagtcagcagtaggaacattatctgcaaattctagcaatgtaattcagttgatcattgatgcatacaattccctttcctcagaagtcattttggaaaacggcaaattgtcagaaggagtaacaataagttacaaatcttactgcaagaacggggtgaatggaacaggggaaaatggaagaaaatgttccaatatttccattggagatgaggttcaatttgaaattagcataacttcaaataagtgtccaaaaaaggattctgacagctttaaaattaggcctctgggctttacggaggaagtagaggttattcttcagtacatctgtgaatgtgaatgccaaagcgaaggcatccctgaaagtcccaagtgtcatgaaggaaatgggacatttgagtgtggcgcgtgcaggtgcaatgaagggcgtgttggtagacattgtgaatgcagcacagatgaagttaacagtgaagacatggatgcttactgcaggaaagaaaacagttcagaaatctgcagtaacaatggagagtgcgtctgcggacagtgtgtttgtaggaagagggataatacaaatgaaatttattctggcaaattctgcgagtgtgataatttcaactgtgatagatccaatggcttaatttgtggaggaaatggtgtttgcaagtgtcgtgtgtgtgagtgcaaccccaactacactggcagtgcatgtgactgttctttggatactagtacttgtgaagccagcaacggacagatctgcaatggccggggcatctgcgagtgtggtgtctgtaagtgtacagatccgaagtttcaagggcaaacgtgtgagatgtgtcagacctgccttggtgtctgtgctgagcataaagaatgtgttcagtgcagagccttcaataaaggagaaaagaaagacacatgcacacaggaatgttcctattttaacattaccaaggtagaaagtcgggacaaattaccccagccggtccaacctgatcctgtgtcccattgtaaggagaaggatgttgacgactgttggttctattttacgtattcagtgaatgggaacaacgaggtcatggttcatgttgtggagaatccagagtgtcccactggtccagacatcattccaattgtagctggtgtggttgctggaattgttcttattggccttgcattactgctgatatggaagcttttaatgataattcatgacagaagggagtttgctaaatttgaaaaggagaaaatgaatgccaaatgggacacgcaagaaaatccgatttacaagagtcctattaataatttcaagaatccaaactacggacgtaaagctggtctctaaattgccggtgaaaatcctatttataagagtgccgtaacaactgtggtcaatccgaagtatgagggaaaatgagtactgcccgtgcaaatcccacaacactgaatgcaaagtagcaatttccatagtcacagttaggtagctttagggcaatattgccatggttttactcatgtgcaggttttgaaaatgtacaatatgtataatttttaaaatgttttattattttgaaaataatgttgtaattcatgccagggactgacaaaagacttgagacaggatggttattcttgtcagctaaggtcacattgtgcctttttgaccttttcttcctggactattgaaatcaagcttattggattaagtgatatttctatagcgattgaaagggcaatagttaaagtaatgagcatgatgagagtttctgttaatcatgtattaaaactgatttttagctttacaaatatgtcagtttgcagttatgcagaatccaaagtaaatgtcctgctagctagttaaggattgttttaaatctgttattttgctatttgcctgttagacatgactgatgacatatctgaaagacaagtatgttgagagttgctggtgtaaaatacgtttgaaatagttgatctacaaaggccatgggaaaaattcagagagttaggaaggaaaaaccaatagctttaaaacctgtgtgccattttaagagttacttaatgtttggtaacttttatgccttcactttacaaattcaagccttagataaaagaaccgagcaattttctgctaaaaagtccttgatttagcactatttacatacaggccatactttacaaagtatttgctgaatggggaccttttgagttgaatttattttattatttttattttgtttaatgtctggtgctttctatcacctcttctaatcttttaatgtatttgtttgcaattttggggtaagactttttttatgagtactttttctttgaagttttagcggtcaatttgcctttttaatgaacatgtgaagttatactgtggctatgcaacagctctcacctacgcgagtcttactttgagttagtgccataacagaccactgtatgtttacttctcaccatttgagttgcccatcttgtttcacactagtcacattcttgttttaagtgcctttagttttaacagttcactttttacagtgctatttactgaagttatttattaaatatgcctaaaatacttaaatcggatgtcttgactctgatgtattttatcaggttgtgtgcatgaaatttttatagattaaagaagttgaggaaaagcattt

SEQ ID NO: 1372 - DNA, 2516 bp, Homo sapiens
atgaatttacaaccaattttctggattggactgatcagttcagtttgctgtgtgtttgctcaaacagatgaaaatagatgtttaaaagcaaatgccaaatcatgtggagaatgtatacaagcagggccaaattgtgggtggtgcacaaattcaacatttttacaggaaggaatgcctacttctgcacgatgtgatgatttagaagccttaaaaaagaagggttgccctccagatgacatagaaaatcccagaggctccaaagatataaagaaaaataaaaatgtaaccaaccgtagcaaaggaacagcagagaagctcaagccagaggatattactcagatccaaccacagcagttggttttgcgattaagatcaggggagccacagacatttacattaaaattcaagagagctgaagactatcccattgacctctactaccttatggacctgtcttactcaatgaaagacgatttggagaatgtaaaaagtcttggaacagatctgatgaatgaaatgaggaggattacttcggacttcagaattggatttggctcatttgtggaaaagactgtgatgccttacattagcacaacaccagctaagctcaggaacccttgcacaagtgaacagaactgcaccagcccatttagctacaaaaatgtgctcagtcttactaataaaggagaagtatttaatgaacttgttggaaaacagcgcatatctggaaatttggattctccagaaggtggtttcgatgccatcatgcaagttgcagtttgtggatcactgattggctggaggaatgttacacggctgctggtgttttccacagatgccgggtttcactttgctggagatgggaaacttggtggcattgttttaccaaatgatggacaatgtcacctggaaaataatatgtacacaatgagccattattatgattatccttctattgctcaccttgtccagaaactgagtgaaaataatattcagacaatttttgcagttactgaagaatttcagcctgtttacaaggagctgaaaaacttgatccctaagtcagcagtaggaacattatctgcaaattctagcaatgtaattcagttgatcattgatgcatacaattccctttcctcagaagtcattttggaaaacggcaaattgtcagaaggagtaacaataagttacaaatcttactgcaagaacggggtgaatggaacaggggaaaatggaagaaaatgttccaatatttccattggagatgaggttcaatttgaaattagcataacttcaaataagtgtccaaaaaaggattctgacagctttaaaattaggcctctgggctttacggaggaagtagaggttattcttcagtacatctgtgaatgtgaatgccaaagcgaaggcatccctgaaagtcccaagtgtcatgaaggaaatgggacatttgagtgtggcgcgtgcaggtgcaatgaagggcgtgttggtagacattgtgaatgcagcacagatgaagttaacagtgaagacatggatgcttactgcaggaaagaaaacagttcagaaatctgcagtaacaatggagagtgcgtctgcggacagtgtgtttgtaggaagagggataatacaaatgaaatttattctggcaaattctgcgagtgtgataatttcaactgtgatagatccaatggcttaatttgtggaggaaatggtgtttgcaagtgtcgtgtgtgtgagtgcaaccccaactacactggcagtgcatgtgactgttctttggatactagtacttgtgaagccagcaacggacagatctgcaatggccggggcatctgcgagtgtggtgtctgtaagtgtacagatccgaagtttcaagggcaaacgtgtgagatgtgtcagacctgccttggtgtctgtgctgagcataaagaatgtgttcagtgcagagccttcaataaaggagaaaagaaagacacatgcacacaggaatgttcctattttaacattaccaaggtagaaagtcgggacaaattaccccagccggtccaacctgatcctgtgtcccattgtaaggagaaggatgttgacgactgttggttctattttacgtattcagtgaatgggaacaacgaggtcatggttcatgttgtggagaatccagagtgtcccactggtccagacatcattccaattgtagctggtgtggttgctggaattgttcttattggccttgcattactgctgatatggaagcttttaatgataattcatgacagaagggagtttgctaaatttgaaaaggagaaaatgaatgccaaatgggacacgtctctctctgtcgcccagcctggagtgcagtggtgtgatatcagctcactgcaacctctgacttccagattccagcaattctcctgcctcagcctcccgagtacctgggattacagggtgaaaatcctatttataagagtgccgtaacaactgtggtcaatccgaagtatgagggaaaatgagta

SEQ ID NO: 1373 - DNA, 3876 bp, Homo sapiens; identical to SEQ ID NO: 1367

SEQ ID NO: 1374 - DNA, 3670 bp, Homo sapiens; identical to SEQ ID NO: 1364

SEQ ID NO: 1375 - DNA, 3670 bp, Homo sapiens; identical to SEQ ID NO: 1364

SEQ ID NO: 1376 - DNA, 3762 bp, Homo sapiens
atgaatttacaaccaattttctggattggactgatcagttcagtttgctgtgtgtttgctcaaacagatgaaaatagatgtttaaaagcaaatgccaaatcatgtggagaatgtatacaagcagggccaaattgtgggtggtgcacaaattcaacatttttacaggaaggaatgcctacttctgcacgatgtgatgatttagaagccttaaaaaagaagggttgccctccagatgacatagaaaatcccagaggctccaaagatataaagaaaaataaaaatgtaaccaaccgtagcaaaggaacagcagagaagctcaagccagaggatattactcagatccaaccacagcagttggttttgcgattaagatcaggggagccacagacatttacattaaaattcaagagagctgaagactatcccattgacctctactaccttatggacctgtcttactcaatgaaagacgatttggagaatgtaaaaagtcttggaacagatctgatgaatgaaatgaggaggattacttcggacttcagaattggatttggctcatttgtggaaaagactgtgatgccttacattagcacaacaccagctaagctcaggaacccttgcacaagtgaacagaactgcaccagcccatttagctacaaaaatgtgctcagtcttactaataaaggagaagtatttaatgaacttgttggaaaacagcgcatatctggaaatttggattctccagaaggtggtttcgatgccatcatgcaagttgcagtttgtggatcactgattggctggaggaatgttacacggctgctggtgttttccacagatgccgggtttcactttgctggagatgggaaacttggtggcattgttttaccaaatgatggacaatgtcacctggaaaataatatgtacacaatgagccattattatgattatccttctattgctcaccttgtccagaaactgagtgaaaataatattcagacaatttttgcagttactgaagaatttcagcctgtttacaaggagctgaaaaacttgatccctaagtcagcagtaggaacattatctgcaaattctagcaatgtaattcagttgatcattgatgcatacaattccctttcctcagaagtcattttggaaaacggcaaattgtcagaaggagtaacaataagttacaaatcttactgcaagaacggggtgaatggaacaggggaaaatggaagaaaatgttccaatatttccattggagatgaggttcaatttgaaattagcataacttcaaataagtgtccaaaaaaggattctgacagctttaaaattaggcctctgggctttacggaggaagtagaggttattcttcagtacatctgtgaatgtgaatgccaaagcgaaggcatccctgaaagtcccaagtgtcatgaaggaaatgggacatttgagtgtggcgcgtgcaggtgcaatgaagggcgtgttggtagacattgtgaatgcagcacagatgaagttaacagtgaagacatggatgcttactgcaggaaagaaaacagttcagaaatctgcagtaacaatggagagtgcgtctgcggacagtgtgtttgtaggaagagggataatacaaatgaaatttattctggcaaattctgcgagtgtgataatttcaactgtgatagatccaatggcttaatttgtggaggaaatggtgtttgcaagtgtcgtgtgtgtgagtgcaaccccaactacactggcagtgcatgtgactgttctttggatactagtacttgtgaagccagcaacggacagatctgcaatggccggggcatctgcgagtgtggtgtctgtaagtgtacagatccgaagtttcaagggcaaacgtgtgagatgtgtcagacctgccttggtgtctgtgctgagcataaagaatgtgttcagtgcagagccttcaataaaggagaaaagaaagacacatgcacacaggaatgttcctattttaacattaccaaggtagaaagtcgggacaaattaccccagccggtccaacctgatcctgtgtcccattgtaaggagaaggatgttgacgactgttggttctattttacgtattcagtgaatgggaacaacgaggtcatggttcatgttgtggagaatccagagtgtcccactggtccagacatcattccaattgtagctggtgtggttgctggaattgttcttattggccttgcattactgctgatatggaagcttttaatgataattcatgacagaagggagtttgctaaatttgaaaaggagaaaatgaatgccaaatgggacacggtaagttacaaaacatccaaaaagcaaagtggcttataaagtaaatgtaatactcctaagacttatgtattagctgtcaggctgattattaaagtcctttctaagtattttattcccccaaaagtttcttactcaaggaatttgcatttagtgaaaaacagaaagcatcctaaatatatcccattgaaacaaaacattgattataagcatgtatattctggttactgtggccagtatttttatttctttaatagttttgatcctaaatctgccttttcatctaatgtgaagtagaatcctaaataatgttatctgtgtagcaagctattcaatggaaagctgcttctttctttaaaacaaacaaacaaaaaaaaccttcagtgaaagccagattcaaaaggttatataccaagcttgtccaactcgcagctcgtcggccaggacatgcagcccagaatagctttgaatgtggccccaacacaaatttgtaaactttcttagaaattgtaattattattattatttttttttggtaacttttttttaaagctcatcagctatcgttagtgtattttatgtgtggcccaagacaattcttcttcttccagtgtggcccagggaagccaaaagattggacacccctgctatatactatatgattccatttagaggacattctggaaaagcaaaactgtaggggcaaaaatcagtggttgctaggggctggaatgggggaaagtgttgaccacagaggggcgtaagggatcttccttgggatgatcttgattgtgggtggatttatgtatttgaaaactcacagaactatgtactttaaaaagatgtatgttcctctatgaaaattatatctcagtaaactttggcttataaaaatcttaaaagccctaagtgaccgaaaggttatgttagcattgagtgctttgaaatatggagtcagagggtggggtaaccaaatgttggcctttgtgtattcatcttttgatacaagaaagcaatgccaatcttcagtatttttaaattgtaaatgaattttgtagttagttgcactttactacaatttgcttgggtttttaaaaattatcaattttttaaattacaaatttcagaagggtagaaataaaaaaaaagacatttatagtgttcaaacactataaagggattttttttttctgatgaaatcattagaaactatttcttttactttagcaagaaaatccgatttacaagagtcctattaataatttcaagaatccaaactacggacgtaaagctggtctctaaattgccgttcgtattttgtttcactttctgcctttgcatgtgaacttctatcttttttactgcactgtgtgtcctttatcactattgctgttctttttttaagtctggctttaaatatcgctattgtggctt

SEQ ID NO: 1377 - DNA, 3733 bp, Homo sapiens; identical to SEQ ID NO: 1371

SEQ ID NO: 1378 - DNA, 3670 bp, Homo sapiens; identical to SEQ ID NO: 1364

SEQ ID NO: 1379 - DNA, 3670 bp, Homo sapiens; identical to SEQ ID NO: 1364

SEQ ID NO: 1380 - DNA, 3894 bp, Homo sapiens; identical to SEQ ID NO: 1366

SEQ ID NO: 1381 - DNA, 3850 bp, Homo sapiens
agccgccgccacccgccgcgcccgacacccgggaggccccgccagcccgcgggagaggcccagcgggagtcgcggaacagcaggcccgagcccaccgcgccgggccccggacgccgcgcggaaaagatgaatttacaaccaattttctggattggactgatcagttcagtttgctgtgtgtttgctcaaacagattttctataagaagcatatgctggttttataatctcagaaaagatacgttggagacagtctgtattagcgcttaccatgtagaaggcatactcttccttagatgaaaatagatgtttaaaagcaaatgccaaatcatgtggagaatgtatacaagcagggccaaattgtgggtggtgcacaaattcaacatttttacaggaaggaatgcctacttctgcacgatgtgatgatttagaagccttaaaaaagaagggttgccctccagatgacatagaaaatcccagaggctccaaagatataaagaaaaataaaaatgtaaccaaccgtagcaaaggaacagcagagaagctcaagccagaggatattactcagatccaaccacagcagttggttttgcgattaagatcaggggagccacagacatttacattaaaattcaagagagctgaagactatcccattgacctctactaccttatggacctgtcttactcaatgaaagacgatttggagaatgtaaaaagtcttggaacagatctgatgaatgaaatgaggaggattacttcggacttcagaattggatttggctcatttgtggaaaagactgtgatgccttacattagcacaacaccagctaagctcaggaacccttgcacaagtgaacagaactgcaccagcccatttagctacaaaaatgtgctcagtcttactaataaaggagaagtatttaatgaacttgttggaaaacagcgcatatctggaaatttggattctccagaaggtggtttcgatgccatcatgcaagttgcagtttgtggatcactgattggctggaggaatgttacacggctgctggtgttttccacagatgccgggtttcactttgctggagatgggaaacttggtggcattgttttaccaaatgatggacaatgtcacctggaaaataatatgtacacaatgagccattattatgattatccttctattgctcaccttgtccagaaactgagtgaaaataatattcagacaatttttgcagttactgaagaatttcagcctgtttacaaggagctgaaaaacttgatccctaagtcagcagtaggaacattatctgcaaattctagcaatgtaattcagttgatcattgatgcatacaattccctttcctcagaagtcattttggaaaacggcaaattgtcagaaggagtaacaataagttacaaatcttactgcaagaacggggtgaatggaacaggggaaaatggaagaaaatgttccaatatttccattggagatgaggttcaatttgaaattagcataacttcaaataagtgtccaaaaaaggattctgacagctttaaaattaggcctctgggctttacggaggaagtagaggttattcttcagtacatctgtgaatgtgaatgccaaagcgaaggcatccctgaaagtcccaagtgtcatgaaggaaatgggacatttgagtgtggcgcgtgcaggtgcaatgaagggcgtgttggtagacattgtgaatgcagcacagatgaagttaacagtgaagacatggatgcttactgcaggaaagaaaacagttcagaaatctgcagtaacaatggagagtgcgtctgcggacagtgtgtttgtaggaagagggataatacaaatgaaatttattctggcaaattctgcgagtgtgataatttcaactgtgatagatccaatggcttaatttgtggaggaaatggtgtttgcaagtgtcgtgtgtgtgagtgcaaccccaactacactggcagtgcatgtgactgttctttggatactagtacttgtgaagccagcaacggacagatctgcaatggccggggcatctgcgagtgtggtgtctgtaagtgtacagatccgaagtttcaagggcaaacgtgtgagatgtgtcagacctgccttggtgtctgtgctgagcataaagaatgtgttcagtgcagagccttcaataaagtagaaagtcgggacaaattaccccagccggtccaacctgatcctgtgtcccattgtaaggagaaggatgttgacgactgttggttctattttacgtattcagtgaatgggaacaacgaggtcatggttcatgttgtggagaatccagtgtcccactggtccagacatcattccaattgtagctggtgtggttgctggaattgttcttattggccttgcattactgctgatatggaagcttttaatgataattcatgacagaagggagtttgctaaatttgaaaaggagaaaatgaatgccaaatgggacacgcaagaaaatccgatttacaagagtcctattaataatttcaagaatccaaactacggacgtaaagctggtctctaaattgccggtgaaaatcctatttataagagtgccgtaacaactgtggtcaatccgaagtatgagggaaaatgagtactgcccgtgcaaatcccacaacactgaatgcaaagtagcaatttccatagtcacagttaggtagctttagggcaatattgccatggttttactcatgtgcaggttttgaaaatgtacaatatgtataatttttaaaatgttttattattttgaaaataatgttgtaattcatgccagggactgacaaaagacttgagacaggatggttattcttgtcagctaaggtcacattgtgcctttttgaccttttcttcctggactattgaaatcaagcttattggattaagtgatatttctatagcgattgaaagggcaatagttaaagtaatgagcatgatgagagtttctgttaatcatgtattaaaactgatttttagctttacaaatatgtcagtttgcagttatgcagaatccaaagtaaatgtcctgctagctagttaaggattgttttaaatctgttattttgctatttgcctgttagacatgactgatgacatatctgaaagacaagtatgttgagagttgctggtgtaaaatacgtttgaaatagttgatctacaaaggccatgggaaaaattcagagagttaggaaggaaaaaccaatagctttaaaacctgtgtgccattttaagagttacttaatgtttggtaacttttatgccttcactttacaaattcaagccttagataaaagaaccgagcaattttctgttgctgaatggggaccttttgagttgaatttattttattatttttattttgtttaatgtctggtgctttctatcacctcttctaatcttttaatgtatttgtttgcaattttggggtaagactttttttatgagtactttttctttgaagttttagcggtcaatttgcctttttaatgaacatgtgaagttatactgtggctatgcaacagctctcacctacgcgagtcttactttgagttagtgccataacagaccactgtatgtttacttctcaccatttgagttgcccatcttgtttcacactagtcacattcttgttttaagtgcctttagttttaacagttcactttttacagtgctatttactgaagttatttattaaatatgcctaaaatacttaaatcggatgtcttgactctgatgtattttatcaggttgtgtgcatgaaatttttatagattaaagaagttgaggaaaagcattt

SEQ ID NO: 1382 - DNA, 1997 bp, Homo sapiens
acgtgaccggtccgggtgcaaacacgcgggtcagctgatccggcccaactgcggcgtcatcccggctataagcgcacggcctcggcgaccctctccgacccggccgccgccgccatgcagccctccagccttctgccgctcgccctctgcctgctggctgcacccgcctccgcgctcgtcaggatcccgctgcacaagttcacgtccatccgccggaccatgtcggaggttgggggctctgtggaggacctgattgccaaaggccccgtctcaaagtactcccaggcggtgccagccgtgaccgaggggcccattcccgaggtgctcaagaactacatggacgcccagtactacggggagattggcatcgggacgcccccccagtgcttcacagtcgtcttcgacacgggctcctccaacctgtgggtcccctccatccactgcaaactgctggacatcgcttgctggatccaccacaagtacaacagcgacaagtccagcacctacgtgaagaatggtacctcgtttgacatccactatggctcgggcagcctctccgggtacctgagccaggacactgtgtcggtgccctgccagtcagcgtcgtcagcctctgccctgggcggtgtcaaagtggagaggcaggtctttggggaggccaccaagcagccaggcatcaccttcatcgcagccaagttcgatggcatcctgggcatggcctacccccgcatctccgtcaacaacgtgctgcccgtcttcgacaacctgatgcagcagaagctggtggaccagaacatcttctccttctacctgagcagggacccagatgcgcagcctgggggtgagctgatgctgggtggcacagactccaagtattacaagggttctctgtcctacctgaatgtcacccgcaaggcctactggcaggtccacctggaccaggtggaggtggccagcgggctgaccctgtgcaaggagggctgtgaggccattgtggacacaggcacttccctcatggtgggcccggtggatgaggtgcgcgagctgcagaaggccatcggggccgtgccgctgattcagggcgagtacatgatcccctgtgagaaggtgtccaccctgcccgcgatcacactgaagctgggaggcaaaggctacaagctgtccccagaggactacacgctcaaggtgtcgcaggccgggaagaccctctgcctgagcggcttcatgggcatggacatcccgccacccagcgggccactctggatcctgggcgacgtcttcatcggccgctactacactgtgtttgaccgtgacaacaacagggtgggcttcgccgaggctgcccgcctctagttcccaaggcgtccgcgcgccagcacagaaacagaggagagtcccagagcaggaggcccctggcccagcggcccctcccacacacacccacacactcgcccgcccactgtcctgggcgccctggaagccggcggcccaagcccgacttgctgttttgttctgtggttttcccctccctgggttcagaaatgctgcctgcctgtctgtctctccatctgtttggtgggggtagagctgatccagagcacagatctgtttcgtgcattggaagaccccacccaagcttggcagccgagctcgtgtatcctggggctcccttcatctccagggagtcccctccccggccctaccagcgcccgctgggctgagcccctaccccacaccaggccgtcctcccgggccctcccttggaaacctgccctgcctgagggcccctctgcccagcttgggcccagctgggctctgccaccctacctgttcagtgtcccgggcccgttgaggatgaggccgctagaggcctgaggatgagctggaaggagtgagagggggattgggggctggtgccagccttcctctgcagctgacctctgttgtcctccccttgggcggctgagagccccagctgacatggaaatacagttgtt

SEQ ID NO: 1383 - DNA, 2038 bp, Homo sapiens
ggctataagcgcacggcctcggcgaccctctccgacccggccgccgccgccatgcagccctccagccttctgccgctcgccctctgcctgctggctgcacccgcctccgcgctcgtcaggatcccgctgcacaagttcacgtccatccgccggaccatgtcggaggttgggggctctgtggaggacctgattgccaaaggccccgtctcaaagtactcccaggcggtgccagccgtgaccgaggggcccattcccgaggtgctcaagaactacatggacgcccagtactacggggagattggcatcgggacgcccccccagtgcttcacagtcgtcttcgacacgggctcctccaacctgtgggtcccctccatccactgcaaactgctggacatcgcttgctggatccaccacaagtacaacagcgacaagtccagcacctacgtgaagaatggtacctcgtttgacatccactatggctcgggcagcctctccgggtacctgagccaggacactgtgtcggtgccctgccagtcagcgtcgtcagcctctgccctgggcggtgtcaaagtggagaggcaggtctttggggaggccaccaagcagccaggcatcaccttcatcgcagccaagttcgatggcatcctgggcatggcctacccccgcatctccgtcaacaacgtgctgcccgtcttcgacaacctgatgcagcagaagctggtggaccagaacatcttctccttctacctgagcagggacccagatgcgcagcctgggggtgagctgatgctgggtggcacagactccaagtattacaagggttctctgtcctacctgaatgtcacccgcaaggcctactggcaggtccacctggaccaggtggaggtggccagcgggctgaccctgtgcaaggagggctgtgaggccattgtggacacaggcacttccctcatggtgggcccggtggatgaggtgcgcgagctgcagaaggccatcggggccgtgccgctgattcagggcgagtacatgatcccctgtgagaaggtgtccaccctgcccgcgatcacactgaagctgggaggcaaaggctacaagctgtccccagaggactacacgctcaaggtgtcgcaggccgggaagaccctctgcctgagcggcttcatgggcatggacatcccgccacccagcgggccactctggatcctgggcgacgtcttcatcggccgctactacactgtgtttgaccgtgacaacaacagggtgggcttcgccgaggctgcccgcctctagttcccaaggcgtccgcgcgccagcacagaaacagaggagagtcccagagcaggaggcccctggcccagcggcccctcccacacacacccacacactcgcccgcccactgtcctgggcgccctggaagccggcggcccaagcccgacttgctgttttgttctgtggttttcccctccctgggttcagaaatgctgcctgcctgtctgtctctccatctgtttggtgggggtagagctgatccagagcacagatctgtttcgtgcattggaagaccccacccaagcttggcagccgagctcgtgtatcctggggctcccttcatctccagggagtcccctccccggccctaccagcgcccgctgggctgagcccctaccccacaccaggccgtcctcccgggccctcccttggaaacctgccctgcctgagggcccctctgcccagcttgggcccagctgggctctgccaccctacctgttcagtgtcccgggcccgttgaggatgaggccgctagaggcctgaggatgagctggaaggagtgagaggggacaaaacccaccttgttggagcctgcagggtggtgctgggactgagccagtcccaggggcatgtattggcctggaggtggggttgggattgggggctggtgccagccttcctctgcagctgacctctgttgtcctccccttgggcggctgagagccccagctgacatggaaatacagttgttggcctccggcctcccctc

SEQ ID NO: 1384 - DNA, 2410 bp, Homo sapiens
caggagcccacggcgcagcgccccgcgcaggcctggacgcggggacggccgcggcggccgggacaggggtcaccccgcggggccctccagggtgggccgccccacgaccccaggccaggccgaaacgggaatcctccagaccccagaagctgggccgggctgaccccgcgggcgcgagcggcgggaactgtaggcgcggcaggcgcaccaccaccccgccccccgcccgggcgctgtgcgcgtgcgccgaggttgccccgcccaggccaggccccgctccgccccgccccgcgcacgccggccgcgcccacgtgaccggtccgggtgcaaacacgcgggtcagctgatccggcccaactgcggcgtcatcccggctataagcgcacggcctcggcgaccctctccgacccggccgccgccgccatgcagccctccagccttctgccgctcgccctctgcctgctggctgcacccgcctccgcgctcgtcaggatcccgctgcacaagttcacgtccatccgccggaccatgtcggaggttgggggctctgtggaggacctgattgccaaaggccccgtctcaaagtactcccaggcggtgccagccgtgaccgaggggcccattcccgaggtgctcaagaactacatggacgcccagtactacggggagattggcatcgggacgcccccccagtgcttcacagtcgtcttcgacacgggctcctccaacctgtgggtcccctccatccactgcaaactgctggacatcgcttgctggatccaccacaagtacaacagcgacaagtccagcacctacgtgaagaatggtacctcgtttgacatccactatggctcgggcagcctctccgggtacctgagccaggacactgtgtcggtgccctgccagtcagcgtcgtcagcctctgccctgggcggtgtcaaagtggagaggcaggtctttggggaggccaccaagcagccaggcatcaccttcatcgcagccaagttcgatggcatcctgggcatggcctacccccgcatctccgtcaacaacgtgctgcccgtcttcgacaacctgatgcagcagaagctggtggaccagaacatcttctccttctacctgagcagggacccagatgcgcagcctgggggtgagctgatgctgggtggcacagactccaagtattacaagggttctctgtcctacctgaatgtcacccgcaaggcctactggcaggtccacctggaccaggtggaggtggccagcgggctgaccctgtgcaaggagggctgtgaggccattgtggacacaggcacttccctcatggtgggcccggtggatgaggtgcgcgagctgcagaaggccatcggggccgtgccgctgattcagggcgagtacatgatcccctgtgagaaggtgtccaccctgcccgcgatcacactgaagctgggaggcaaaggctacaagctgtccccagaggactacacgctcaaggtgtcgcaggccgggaagaccctctgcctgagcggcttcatgggcatggacatcccgccacccagcgggccactctggatcctgggcgacgtcttcatcggccgctactacactgtgtttgaccgtgacaacaacagggtgggcttcgccgaggctgcccgcctctagttcccaaggcgtccgcgcgccagcacagaaacagaggagagtcccagagcaggaggcccctggcccagcggcccctcccacacacacccacacactcgcccgcccactgtcctgggcgccctggaagccggcggcccaagcccgacttgctgttttgttctgtggttttcccctccctgggttcagaaatgctgcctgcctgtctgtctctccatctgtttggtgggggtagagctgatccagagcacagatctgtttcgtgcattggaagaccccacccaagcttggcagccgagctcgtgtatcctggggctcccttcatctccagggagtcccctccccggccctaccagcgcccgctgggctgagcccctaccccacaccaggccgtcctcccgggccctcccttggaaacctgccctgcctgagggcccctctgcccagcttgggcccagctgggctctgccaccctacctgttcagtgtcccgggcccgttgaggatgaggccgctagaggcctgaggatgagctggaaggagtgagaggggacaaaacccaccttgttggagcctgcagggtggtgctgggactgagccagtcccaggggcatgtattggcctggaggtggggttgggattgggggctggtgccagccttcctctgcagctgacctctgttgtcctccccttgggcggctgagagccccagctgacatggaaatacagttgttggcctccggcctcccctc

SEQ ID NO: 1385 - DNA, 1997 bp, Homo sapiens; identical to SEQ ID NO: 1382

SEQ ID NO: 1386 - DNA, 2927 bp, Homo sapiens
tggggagtgcggcgccgcggcccgcgccacctccgccccccgcggcttgcctccagcccgcccctcccggccctcctccccccgcccgccgctccgtgcagcctgagaggaaacaaagtgctgcgagcaggagacggcggcggcgcgaaccctgctgggcctccagtcaccctcgtcttgcattttcccgcgtgcgtgtgtgagtgggtgtgtgtgttttcttacaaagggtatttcgcgatcgatcgattgattcgtagttcccccccgcgcgcctttgccctttgtgctgtaatcgagctcccgccatcccaggtgcttctccgttcctctaaacgccagcgtctggacgtgagcgcaggtcgccggtttgtgccttcggtccccgcttcgccccctgccgtcccctccttatcacggtcccgctcgcggcctcgccgccccgctgtctccgccgcccgccatggcgactgcgacccccgtgccgccgcggatgggcagccgcgctggcggccccaccacgccgctgagccccacgcgcctgtcgcggctccaggagaaggaggagctgcgcgagctcaatgaccggctggcggtgtacatcgacaaggtgcgcagcctggagacggagaacagcgcgctgcagctgcaggtgacggagcgcgaggaggtgcgcggccgtgagctcaccggcctcaaggcgctctacgagaccgagctggccgacgcgcgacgcgcgctcgacgacacggcccgcgagcgcgccaagctgcagatcgagctgggcaagtgcaaggcggaacacgaccagctgctcctcaactatgctaagaaggaatctgatcttaatggcgcccagatcaagcttcgagaatatgaagcagcactgaattcgaaagatgcagctcttgctactgcacttggtgacaaaaaaagtttagagggagatttggaggatctgaaggatcagattgcccagttggaagcctccttagctgcagccaaaaaacagttagcagatgaaactttacttaaagtagatttggagaatcgttgtcagagccttactgaggacttggagtttcgcaaaagcatgtatgaagaggagattaacgagaccagaaggaagcatgaaacgcgcttggtagaggtggattctgggcgtcaaattgagtatgagtacaagctggcgcaagcccttcatgagatgagagagcaacatgatgcccaagtgaggctgtataaggaggagctggagcagacttaccatgccaaacttgagaatgccagactgtcatcagagatgaatacttctactgtcaacagtgccagggaagaactgatggaaagccgcatgagaattgagagcctttcatcccagctttctaatctacagaaagagtctagagcatgtttggaaaggattcaagaattagaggacttgcttgctaaagaaaaagacaactctcgtcgcatgctgacagacaaagagagagagatggcggaaataagggatcaaatgcagcaacagctgaatgactatgaacagcttcttgatgtaaagttagccctggacatggaaatcagtgcttacaggaaactcttagaaggcgaagaagagaggttgaagctgtctccaagcccttcttcccgtgtgacagtatcccgagcatcctcaagtcgtagtgtacgtacaactagaggaaagcggaagagggttgatgtggaagaatcagaggcgagtagtagtgttagcatctctcattccgcctcagccactggaaatgtttgcatcgaagaaattgatgttgatgggaaatttatccgcttgaagaacacttctgaacaggatcaaccaatgggaggctgggagatgatcagaaaaattggagacacatcagtcagttataaatatacctcaagatatgtgctgaaggcaggccagactgttacaatttgggctgcaaacgctggtgtcacagccagccccccaactgacctcatctggaagaaccagaactcgtggggcactggcgaagatgtgaaggttatattgaaaaattctcagggagaggaggttgctcaaagaagtacagtctttaaaacaaccatacctgaagaagaggaggaggaggaagaagcagctggagtggttgttgaggaagaacttttccaccagcagggaaccccaagagcatccaatagaagctgtgcaattatgtaaaattttcaactgtcttcctcaaaataaagaagtatggtaatccttacctgtatacagtgcagagccttctcagaagcacagaatatttttatatttcctttatgtgaatttttaagctgcaaatctgatggccttaatttcctttttgacactgaaagttttgtaaaagaaatcatgtccatacactttgttgcaagatgtgaattattgacactgaacttaataactgtgtactgttcggaaggggttcctcaaattttttgactttttttgtatgtgtgttttttctttttttttaagttcttatgaggaggggagggtaaataaaccactgtgcgtcttggtgtaatttgaagattgccccatctagactagcaatctcttcattattctctgctatatataaaacggtgctgtgagggaggggaaaagcatttttcaatatattgaacttttgtactgaatttttttgtaataagcaatcaaggttataattttttttaaaatagaaattttgtaagaaggcaatattaacctaatcaccatgtaagcactctggatgatggattccacaaaacttggttttatggttacttcttagggaagggtttctctattaaaatgcattcgttgtgttttttaagatagtgtaacttgcttaaatttcttatgtgacattaacaaataaaaaagctcttttaat

SEQ ID NO: 1387 - DNA, 2134 bp, Homo sapiens
gaggtaggaactgcgccagtcctagacgccagacccgctcagaccctcctgccaggtgacagccgccaagatggggtcttgggccctgctgtggcctcccctgctgttcaccgggctgctcgtccgacccccggggaccatggcccaggcccagtactgctctgtgaacaaggacatctttgaagtagaggagaacacaaatgtcaccgagccgctggtggacatccacgtcccggagggccaggaggtgaccctcggagccttgtccaccccctttgcatttcggatccagggaaaccagctgtttctcaacgtgactcctgattacgaggagaagtcactgcttgaggctcagctgctgtgtcagagcggaggcacattggtgacccagctaagggtgttcgtgtcagtgctggacgtcaatgacaatgcccccgaattcccctttaagaccaaggagataagggtggaggaggacacgaaagtgaactccaccgtcatccccgagacgcaactgcaggctgaggaccgcgacaaggacgacattctgttctacaccctccaggaaatgacagcaggtgccagtgactacttctccctggtgagtgtaaaccgtcccgccctgaggctggaccggcccctggacttctacgagcggccgaacatgaccttctggctgctggtgcgggacactccgggggagaatgtggaacccagccacactgccaccgccacactagtgctgaacgtggtgcccgccgacctgcggcccccgtggttcctgccctgcaccttctcagatggctacgtctgcattcaagctcagtaccacggggctgtccccacggggcacatactgccatctcccctcgtcctgcgtcccggacccatctacgctgaggacggagaccgcggcatcaaccagcccatcatctacagcatctttaggggaaacgtgaatggtacattcatcatccacccagactcgggcaacctcaccgtggccaggagtgtccccagccccatgaccttccttctgctggtgaagggccaacaggccgaccttgcccgctactcagtgacccaggtcaccgtggaggctgtggctgcggccgggagcccgccccgcttcccccagagcctgtatcgtggcaccgtggcgcgtggcgctggagcgggcgttgtggtcaaggatgcagctgccccttctcagcctctgaggatccaggctcaggacccggagttctcggacctcaactcggccatcacatatcgaattaccaaccactcacacttccggatggagggagaggttgtgctgaccaccaccacactggcacaggcgggagccttctacgcagaggttgaggcccacaacacggtgacctctggcaccgcaaccacagtcattgagatacaagtttccgaacaggagcccccctccacaggtggcggcccctcggaggacaagcgcttctcggtggtggatatggcggccctgggcggggtgctgggtgcgctgctgctgctggctctccttggcctcgccgtccttgtccacaagcactatggcccccggctcaagtgctgctctggcaaagctccggagccccagccccaaggctttgacaaccaggcgttcctccctgaccacaaggccaactgggcgcccgtccccagccccacgcacgaccccaagcccgcggaggcaccgatgcccgcagagcccgcaccccccggccctgcctccccaggcggtgcccctgagccccccgcagcggcccgagctggcggaagccccacggcggtgaggtccatcctgaccaaggagcggcggccagagggcgggtacaaggctgtctggtttggcgaggacatcgggacggaggcagacgtggtcgttctcaacgcgcccaccctggacgtggatggcgccagtgactccggcagcggcgatgagggcgagggcgcggggaggggtgggggtccctacgatgcgcccggtggtgatgactcctacatctaagtggcccctccaccctctcccccagccgcacgggcactggaggtctcgctcccccagcctccgacccgaggcagaataaagcaaggctcccgaaaaaaaaaaaaaaaa

SEQ ID NO: 1388 - DNA, 1802 bp, Homo sapiens
attctggggctcgggggatcccggacaccctctcagctcctgcccgggggcccatgtgtcccttctgccctgtgcctcggtgcctgtgacctgagccccctggttgacccctgcactcagtccaacttgggccaaacgactgcccctccttctggcagtgggctggaccagccggccagcgggagcccccttggcagaagccggtcgtaaaggatcataaactgggcggcgtctggctggggcgaaggtcgctgaggtaggaactgcgccagtcctagacgccagacccgctcagaccctcctgccaggtgacagccgccaagatggggtcttgggccctgctgtggcctcccctgctgttcaccgggctgctcgtccgacccccggggaccatggcccaggcccagtactgctctgtgaacaaggacatctttgaagtagaggagaacacaaatgtcaccgagccgctggtggacatccacgtcccggagggccaggaggtgaccctcggagccttgtccaccccctttgcatttcggatccagggaaaccagctgtttctcaacgtgactcctgattacgaggagaagtcactgcttgaggctcagctgctgtgtcagagcggaggcacattggtgacccagctaagggtgttcgtgtcagtgctggacgtcaatgacaatgcccccgaattcccctttaagaccaaggagataagggtggaggaggacacgaaagtgaactccaccgtcatccccgagacgcaactgcaggctgaggaccgcgacaaggacgacattctgttctacaccctccaggaaatgacagcaggtgccagtgactacttctccctggtgagtgtaaaccgtcccgccctgaggctggaccggcccctggacttctacgagcggccgaacatgaccttctggctgctggtgcgggacactccgggggagaatgtggaacccagccacactgccaccgccacactagtgctgaacgtggtgcccgccgacctgcggcccccgtggttcctgccctgcaccttctcagatggctacgtctgcattcaagctcagtaccacggggctgtccccacggggcacatactgccatctcccctcgtcctgcgtcccggacccatctacgctgaggacggagaccgcggcatcaaccagcccatcatctacagcatctttaggggaaacgtgaatggtacattcatcatccacccagactcgggcaacctcaccgtggccaggagtgtccccagccccatgaccttccttctgctggtgaagggccaacaggccgaccttgcccgctactcagtgacccaggtcaccgtggaggctgtggctgcggccgggagcccgccccgcttcccccagagcctgtatcgtggcaccgtggcgcgtggcgctggagcgggcgttgtggtcaaggatgcagctgccccttctcagcctctgaggatccaggctcaggacccggagttctcggacctcaactcggccatcacatatcgaattaccaaccactcacacttccggatggagggagaggttgtgctgaccaccaccacactggcacaggcgggagccttctacgcagagcccgaggggggctcccctcccccgacctgcaccggagatctcaggcacccggctcaactcagacctcccgctcccgaccctacacagagattgcctggggaggctgaggagccgatgcaaacccccaaggcgacgcacttgggagccggtggtctcaaacacctgccgggggtcctagtccccttc

SEQ ID NO: 1389 - DNA, 3730 bp, Homo sapiens
tcccttctgccctgtgcctcggtgcctgtgacctgagccccctggttgacccctgcactcagtccaacttgggccaaacgactgcccctccttctggcagtgggctggaccagccggccagcgggagcccccttggcagaagccggtcgtaaaggatcataaactgggcggcgtctggctggggcgaaggtcgctgaggtaggaactgcgccagtcctagacgccagacccgctcagaccctcctgccaggtgacagccgccaagatggggtcttgggccctgctgtggcctcccctgctgttcaccgggctgctcgtccgacccccggggaccatggcccaggcccagtactgctctgtgaacaaggacatctttgaagtagaggagaacacaaatgtcaccgagccgctggtggacatccacgtcccggagggccaggaggtgaccctcggagccttgtccaccccctttgcatttcggatccagggaaaccagctgtttctcaacgtgactcctgattacgagaaggctgggccatttcgggatgaagctgcctgggcccacaccctcagcactgaccactgatgatggggaccctgggccagcgcctgcccacttggcctcagtctccccacctgtggggcaggacggtgactgcagacctgtctacatccacaggagaagtcactgcttgaggctcagctgctgtgtcagagcggaggcacattggtgacccagctaagggtgttcgtgtcagtgctggacgtcaatgacaatgcccccgaattcccctttaagaccaaggagataagggtggaggaggacacgaaagtgaactccaccgtcatccccgagacgcaactgcaggctgaggaccgcgacaaggacgacattctgttctacaccctccaggaaatgacagcaggtgccagtgactacttctccctggtgagtgtaaaccgtcccgccctgaggctggaccggcccctggacttctacgagcggccgaacatgaccttctggctgctggtgcgggacactccgggggagaatgtggaacccagccacactgccaccgccacactagtgctgaacgtggtgcccgccgacctgcggcccccgtggttcctgccctgcaccttctcagatggctacgtctgcattcaagctcagtaccacggggctgtccccacggggcacatactgccatctcccctcgtcctgcgtcccggacccatctacgctgaggacggagaccgcggcatcaaccagcccatcatctacagcatctttaggggaaacgtgaatggtacattcatcatccacccagactcgggcaacctcaccgtggccaggagtgtccccagccccatgaccttccttctgctggtgaagggccaacaggccgaccttgcccgctactcagtgacccaggtcaccgtggaggctgtggctgcggccgggagcccgccccgcttcccccagagcctgtatcgtggcaccgtggcgcgtggcgctggagcgggcgttgtggtcaaggatgcagctgccccttctcagcctctgaggatccaggctcaggacccggagttctcggacctcaactcggccatcacatatcgaattaccaaccactcacacttccggatggagggagaggttgtgctgaccaccaccacactggcacaggcgggagccttctacgcagaggttgaggcccacaacacggtgacctctggcaccgcaaccacagtcattgagatacaagtttccgaacaggagcccccctccacagatgtccccccatccccagaggctggaggaacaactgggccctggaccagcaccacttccgaggtccccagaccccctgagccctcccagggaccctccacgaccagctctgggggaggcacaggccctcatccaccctctggcacaactctgaggccaccaacctcgtccacacccggggggcccccgggtgcagaaaacagcacctcccaccaaccagccactcccggtggggacacagcacagaccccaaagccaggaacctctcagccgatgccccccggtgtgggaaccagcacctcccaccaaccagccacacccagtgggggcacagcacagaccccagagccaggaacctctcagccgatgccccccagtatgggaaccagcacctcccaccaaccagccacacccggtgggggcacagcacagaccccagaggcaggaacctctcagccgatgccccccggtatgggaaccagcacctcccaccaaccaaccacacccggtgggggcacagcacagaccccagagccaggaacctctcagccgatgcccctcagcaagagcaccccatcttcaggtggcggcccctcggaggacaagcgcttctcggtggtggatatggcggccctgggcggggtgctgggtgcgctgctgctgctggctctccttggcctcgccgtccttgtccacaagcactatggcccccggctcaagtgctgctctggcaaagctccggagccccagccccaaggctttgacaaccaggcgttcctccctgaccacaaggccaactgggcgcccgtccccagccccacgcacgaccccaagcccgcggaggcaccgatgcccgcagagcccgcaccccccggccctgcctccccaggcggtgcccctgagccccccgcagcggcccgagctggcggaagccccacggcggtgaggtccatcctgaccaaggagcggcggccggagggcgggtacaaggctgtctggtttggcgaggacatcgggacggaggcagacgtggtcgttctcaacgcgcccaccctggacgtggatggcgccagtgactccggcagcggcgatgagggcgagggcgcggggaggggtgggggtccctacgatgcgcccggtggtgatgactcctacatctaagtggcccctccaccctctcccccagccgcacgggcactggaggtctcgctcccccagcctccgacccgaggcagaataaagcaaggctcccgaaacccaggccatggcgtggggcaggcgcgcgggtccatgggggtcccattcactcagtcccctgtcgtcattagcgcttgagcccaggtgtgcagatgaggcggtgggtctggccacgctgtccccaccccaaggctgcagcacttcccgtaaaccacctgcagtgcccgccgccttcccgaggctctgtgccagctagtctgggaagttcctctcccgctctaaccacagcccgaggggggctcccctcccccgacctgcaccggagatctcaggcacccggctcaactcagacctcccgctcccgaccctacacagagattgcctggggaggctgaggagccgatgcaaacccccaaggcgacgcacttgggagccggtggtctcaaacacctgccgggggtcctagtccccttctgaaatctacatgcttgggttggagcgcagcagtaaacaccctgcccagtgacctggactgaggcgcgctgggggtgggtgcgccgtgtggcctgagcaggagccagaccaggaggcctaggggtgagagacacattcccctcgctgctcccaaagccagagcccaggctgggcgcccatgcccagaaccatcaagggatcccttgcggcttgtcagcactttccctaatggaaatacaccattaattcctttccaaatgtttt

SEQ ID NO: 1390 - DNA, 3635 bp, Homo sapiens
attctggggctcgggggatcccggacaccctctcagctcctgcccgggggcccatgtgtcccttctgccctgtgcctcggtgcctgtgacctgagccccctggttgacccctgcactcagtccaacttgggccaaacgactgcccctccttctggcagtgggctggaccagccggccagcgggagcccccttggcagaagccggtcgtaaaggatcataaactgggcggcgtctggctggggcgaaggtcgctgaggtaggaactgcgccagtcctagacgccagacccgctcagaccctcctgccaggtgacagccgccaagatggggtcttgggccctgctgtggcctcccctgctgttcaccgggctgctcgtccgacccccggggaccatggcccaggcccagtactgctctgtgaacaaggacatctttgaagtagaggagaacacaaatgtcaccgagccgctggtggacatccacgtcccggagggccaggaggtgaccctcggagccttgtccaccccctttgcatttcggatccagggaaaccagctgtttctcaacgtgactcctgattacgaggagaagtcactgcttgaggctcagctgctgtgtcagagcggaggcacattggtgacccagctaagggtgttcgtgtcagtgctggacgtcaatgacaatgcccccgaattcccctttaagaccaaggagataagggtggaggaggacacgaaagtgaactccaccgtcatccccgagacgcaactgcaggctgaggaccgcgacaaggacgacattctgttctacaccctccaggaaatgacagcaggtgccagtgactacttctccctggtgagtgtaaaccgtcccgccctgaggctggaccggcccctggacttctacgagcggccgaacatgaccttctggctgctggtgcgggacactccgggggagaatgtggaacccagccacactgccaccgccacactagtgctgaacgtggtgcccgccgacctgcggcccccgtggttcctgccctgcaccttctcagatggctacgtctgcattcaagctcagtaccacggggctgtccccacggggcacatactgccatctcccctcgtcctgcgtcccggacccatctacgctgaggacggagaccgcggcatcaaccagcccatcatctacagcatctttaggggaaacgtgaatggtacattcatcatccacccagactcgggcaacctcaccgtggccaggagtgtccccagccccatgaccttccttctgctggtgaagggccaacaggccgaccttgcccgctactcagtgacccaggtcaccgtggaggctgtggctgcggccgggagcccgccccgcttcccccagagcctgtatcgtggcaccgtggcgcgtggcgctggagcgggcgttgtggtcaaggatgcagctgccccttctcagcctctgaggatccaggctcaggacccggagttctcggacctcaactcggccatcacatatcgaattaccaaccactcacacttccggatggagggagaggttgtgctgaccaccaccacactggcacaggcgggagccttctacgcagaggttgaggcccacaacacggtgacctctggcaccgcaaccacagtcattgagatacaagtttccgaacaggagcccccctccacagatgtccccccatccccagaggctggaggaacaactgggccctggaccagcaccacttccgaggtccccagaccccctgagccctcccagggaccctccacgaccagctctgggggaggcacaggccctcatccaccctctggcacaactctgaggccaccaacctcgtccacacccggggggcccccgggtgcagaaaacagcacctcccaccaaccagccactcccggtggggacacagcacagaccccaaagccaggaacctctcagccgatgccccccggtgtgggaaccagcacctcccaccaaccagccacacccagtgggggcacagcacagaccccagagccaggaacctctcagccgatgccccccagtatgggaaccagcacctcccaccaaccagccacacccggtgggggcacagcacagaccccagaggcaggaacctctcagccgatgccccccggtatgggaaccagcacctcccaccaaccaaccacacccggtgggggcacagcacagaccccagagccaggaacctctcagccgatgcccctcagcaagagcaccccatcttcaggtggcggcccctcggaggacaagcgcttctcggtggtggatatggcggccctgggcggggtgctgggtgcgctgctgctgctggctctccttggcctcgccgtccttgtccacaagcactatggcccccggctcaagtgctgctctggcaaagctccggagccccagccccaaggctttgacaaccaggcgttcctccctgaccacaaggccaactgggcgcccgtccccagccccacgcacgaccccaagcccgcggaggcaccgatgcccgcagagcccgcaccccccggccctgcctccccaggcggtgcccctgagccccccgcagcggcccgagctggcggaagccccacggcggtgaggtccatcctgaccaaggagcggcggccggagggcgggtacaaggctgtctggtttggcgaggacatcgggacggaggcagacgtggtcgttctcaacgcgcccaccctggacgtggatggcgccagtgactccggcagcggcgatgagggcgagggcgcggggaggggtgggggtccctacgatgcgcccggtggtgatgactcctacatctaagtggcccctccaccctctcccccagccgcacgggcactggaggtctcgctcccccagcctccgacccgaggcagaataaagcaaggctcccgaaacccaggccatggcgtggggcaggcgcgcgggtccatgggggtcccattcactcagtcccctgtcgtcattagcgcttgagcccaggtgtgcagatgaggcggtgggtctggccacgctgtccccaccccaaggctgcagcacttcccgtaaaccacctgcagtgcccgccgccttcccgaggctctgtgccagctagtctgggaagttcctctcccgctctaaccacagcccgaggggggctcccctcccccgacctgcaccggagatctcaggcacccggctcaactcagacctcccgctcccgaccctacacagagattgcctggggaggctgaggagccgatgcaaacccccaaggcgacgcacttgggagccggtggtctcaaacacctgccgggggtcctagtccccttctgaaatctacatgcttgggttggagcgcagcagtaaacaccctgcccagtgacctggactgaggcgcgctgggggtgggtgcgccgtgtggcctgagcaggagccagaccaggaggcctaggggtgagagacacattcccctcgctgctcccaaagccagagcccaggctgggcgcccatgcccagaaccatcaagggatcccttgcggcttgtcagcactttccctaatggaaatacaccattaattcctttccaaatgtttt

SEQ ID NO: 1391 - DNA, 2038 bp, Homo sapiens
attctggggctcgggggatcccggacaccctctcagctcctgcccgggggcccatgtgtcccttctgccctgtgcctcggtgcctgtgacctgagccccctggttgacccctgcactcagtccaacttgggccaaacgactgcccctccttctggcagtgggctggaccagccggccagcgggagcccccttggcagaagccggtcgtaaaggatcataaactgggcggcgtctggctggggcgaaggtcgctgaggtaggaactgcgccagtcctagacgccagacccgctcagaccctcctgccaggtgacagccgccaagatggggtcttgggccctgctgtggcctcccctgctgttcaccgggctgctcgtccgacccccggggaccatggcccaggcccagtactgctctgtgaacaaggacatctttgaagtagaggagaacacaaatgtcaccgagccgctggtggacatccacgtcccggagggccaggaggtgaccctcggagccttgtccaccccctttgcatttcggatccagggaaaccagctgtttctcaacgtgactcctgattacgaggagaagtcactgcttgaggctcagctgctgtgtcagagcggaggcacattggtgacccagctaagggtgttcgtgtcagtgctggacgtcaatgacaatgcccccgaattcccctttaagaccaaggagataagggtggaggaggacacgaaagtgaactccaccgtcatccccgagacgcaactgcaggctgaggaccgcgacaaggacgacattctgttctacaccctccaggaaatgacagcaggtgccagtgactacttctccctggtgagtgtaaaccgtcccgccctgaggctggaccggcccctggacttctacgagcggccgaacatgaccttctggctgctggtgcgggacactccgggggagaatgtggaacccagccacactgccaccgccacactagtgctgaacgtggtgcccgccgacctgcggcccccgtggttcctgccctgcaccttctcagatggctacgtctgcattcaagctcagtaccacggggctgtccccacggggcacatactgccatctcccctcgtcctgcgtcccggacccatctacgctgaggacggagaccgcggcatcaaccagcccatcatctacagcatctttaggggaaacgtgaatggtacattcatcatccacccagactcgggcaacctcaccgtggccaggagtgtccccagccccatgaccttccttctgctggtgaagggccaacaggccgaccttgcccgctactcagtgacccaggtcaccgtggaggctgtggctgcggccgggagcccgccccgcttcccccagagcctgtatcgtggcaccgtggcgcgtggcgctggagcgggcgttgtggtcaaggatgcagctgccccttctcagcctctgaggatccaggctcaggacccggagttctcggacctcaactcggccatcacatatcgaattaccaaccactcacacttccggatggagggagaggttgtgctgaccaccaccacactggcacaggcgggagccttctacgcagagacctgcaccggagatctcaggcacccggctcaactcagacctcccgctcccgaccctacacagagattgcctggggaggctgaggagccgatgcaaacccccaaggcgacgcacttgggagccggtggtctcaaacacctgccgggggtcctagtccccttctgaaatctacatgcttgggttggagcgcagcagtaaacaccctgcccagtgacctggactgaggcgcgctgggggtgggtgcgccgtgtggcctgagcaggagccagaccaggaggcctaggggtgagagacacattcccctcgctgctcccaaagccagagcccaggctgggcgcccatgcccagaaccatcaagggatcccttgcggcttgtcagcactttccctaatggaaatacaccattaattcctttccaaatg

SEQ ID NO: 1392 - DNA, 3720 bp, Homo sapiens
attctggggctcgggggatcccggacaccctctcagctcctgcccgggggcccatgtgtcccttctgccctgtgcctcggtgcctgtgacctgagccccctggttgacccctgcactcagtccaacttgggccaaacgactgcccctccttctggcagtgggctggaccagccggccagcgggagcccccttggcagaagccggtcgtaaaggatcataaactgggcggcgtctggctggggcgaaggtcgctgaggtaggaactgcgccagtcctagacgccagacccgctcagaccctcctgccaggtgacagccgccaagatggggtcttgggccctgctgtggcctcccctgctgttcaccgggctgctcgtccgacccccggggaccatggcccaggcccagtactgctctgtgaacaaggacatctttgaagtagaggagaacacaaatgtcaccgagccgctggtggacatccacgtcccggagggccaggaggtgaccctcggagccttgtccaccccctttgcatttcggatccagggaaaccagctgtttctcaacgtgactcctgattacgagaaggctgggccatttcgggatgaagctgcctgggcccacaccctcagcactgaccactgatgatggggaccctgggccagcgcctgcccacttggcctcagtctccccacctgtggggcaggacggtgactgcagacctgtctacatccacaggagaagtcactgcttgaggctcagctgctgtgtcagagcggaggcacattggtgacccagctaagggtgttcgtgtcagtgctggacgtcaatgacaatgcccccgaattcccctttaagaccaaggagataagggtggaggaggacacgaaagtgaactccaccgtcatccccgagacgcaactgcaggctgaggaccgcgacaaggacgacattctgttctacaccctccaggaaatgacagcaggtgccagtgactacttctccctggtgagtgtaaaccgtcccgccctgaggctggaccggcccctggacttctacgagcggccgaacatgaccttctggctgctggtgcgggacactccgggggagaatgtggaacccagccacactgccaccgccacactagtgctgaacgtggtgcccgccgacctgcggcccccgtggttcctgccctgcaccttctcagatggctacgtctgcattcaagctcagtaccacggggctgtccccacggggcacatactgccatctcccctcgtcctgcgtcccggacccatctacgctgaggacggagaccgcggcatcaaccagcccatcatctacagcatctttaggggaaacgtgaatggtacattcatcatccacccagactcgggcaacctcaccgtggccaggagtgtccccagccccatgaccttccttctgctggtgaagggccaacaggccgaccttgcccgctactcagtgacccaggtcaccgtggaggctgtggctgcggccgggagcccgccccgcttcccccagagcctgtatcgtggcaccgtggcgcgtggcgctggagcgggcgttgtggtcaaggatgcagctgccccttctcagcctctgaggatccaggctcaggacccggagttctcggacctcaactcggccatcacatatcgaattaccaaccactcacacttccggatggagggagaggttgtgctgaccaccaccacactggcacaggcgggagccttctacgcagaggttgaggcccacaacacggtgacctctggcaccgcaaccacagtcattgagatacaagtttccgaacaggagcccccctccacagatgtccccccatccccagaggctggaggaacaactgggccctggaccagcaccacttccgaggtccccagaccccctgagccctcccagggaccctccacgaccagctctgggggaggcacaggccctcatccaccctctggcacaactctgaggccaccaacctcgtccacacccggggggcccccgggtgcagaaaacagcacctcccaccaaccagccactcccggtggggacacagcacagaccccaaagccaggaacctctcagccgatgccccccggtgtgggaaccagcacctcccaccaaccagccacacccagtgggggcacagcacagaccccagagccaggaacctctcagccgatgccccccagtatgggaaccagcacctcccaccaaccagccacacccggtgggggcacagcacagaccccagaggcaggaacctctcagccgatgccccccggtatgggaaccagcacctcccaccaaccaaccacacccggtgggggcacagcacagaccccagagccaggaacctctcagccgatgcccctcagcaagagcaccccatcttcaggtggcggcccctcggaggacaagcgcttctcggtggtggatatggcggccctgggcggggtgctgggtgcgctgctgctgctggctctccttggcctcgccgtccttgtccacaagcactatggcccccggctcaagtgctgctctggcaaagctccggagccccagccccaaggctttgacaaccaggcgttcctccctgaccacaaggccaactgggcgcccgtccccagccccacgcggtgcccctgagccccccgcagcggcccgagctggcggaagccccacggcggtgaggtccatcctgaccaaggagcggcggccggagggcgggtacaaggctgtctggtttggcgaggacatcgggacggaggcagacgtggtcgttctcaacgcgcccaccctggacgtggatggcgccagtgactccggcagcggcgatgagggcgagggcgcggggaggggtgggggtccctacgatgcgcccggtggtgatgactcctacatctaagtggcccctccaccctctcccccagccgcacgggcactggaggtctcgctcccccagcctccgacccgaggcagaataaagcaaggctcccgaaacccaggccatggcgtggggcaggcgcgcgggtccatgggggtcccattcactcagtcccctgtcgtcattagcgcttgagcccaggtgtgcagatgaggcggtgggtctggccacgctgtccccaccccaaggctgcagcacttcccgtaaaccacctgcagtgcccgccgccttcccgaggctctgtgccagctagtctgggaagttcctctcccgctctaaccacagcccgaggggggctcccctcccccgacctgcaccggagatctcaggcacccggctcaactcagacctcccgctcccgaccctacacagagattgcctggggaggctgaggagccgatgcaaacccccaaggcgacgcacttgggagccggtggtctcaaacacctgccgggggtcctagtccccttctgaaatctacatgcttgggttggagcgcagcagtaaacaccctgcccagtgacctggactgaggcgcgctgggggtgggtgcgccgtgtggcctgagcaggagccagaccaggaggcctaggggtgagagacacattcccctcgctgctcccaaagccagagcccaggctgggcgcccatgcccagaaccatcaagggatcccttgcggcttgtcagcactttccctaatggaaatacaccattaattcctttccaaatgtttt

SEQ ID NO: 1393 - DNA, 2951 bp, Homo sapiens
attctggggctcgggggatcccggacaccctctcagctcctgcccgggggcccatgtagtcccttctgccctgtgcctcggtgcctgtgacctgagccccttggttgaccctgcactcgtccaacttgggccaaacgactgcccctccttctggcagtgggctggaccagccggccagcgggagcccccttggcagaagccggtcgtaaaggatcataaactggcggcgtctggctggggcgaaggtcgctgaggtaggaactgcgccagtcctagacgccagacccgctcagaccctcctgccaggtgacagccgccaagatggggtcttgggccctgctgtggcctcccctgctgttcaccgggctgctcgtccgacccccggggaccatggcccaggcccagtactgctctgtgaacaaggacatctttgaagtagaggagaacacaaatgtcaccgagccgctggtggacatccacgtcccggagggccaggaggtgaccctcggagccttgtccaccccctttgcatttcggatccagggaaaccagctgtttctcaacgtgactcctgattacgaggagaagtcactgcttgaggctcagctgctgtgtcagagcggaggcacattggtgacccagctaagggtgttcgtgtcagtgctggacgtcaatgacaatgcccccgaattcccctttaagaccaaggagataagggtggaggaggacacgaaagtgaactccaccgtcatccctgagacgcaactgcaggctgaggaccgcgacaaggacgacattctgttctacaccctccaggaaatgacagcaggtgccagtgactacttctccctggtgagtgtaaaccgtcccgccctgaggctggaccggcccctggacttctacgagcggccgaacatgaccttctggctgctggtgcgggacactccgggggagaatgtggaacccagccacactgccaccgccacactagtgctgaacgtggtgcccgccgacctgcggcccccgtggttcctgccctgcaccttctcagatggctacgtctgcattcaagctcagtaccacggggctgtccccacggggcacatactgccatctcccctcgtcctgcgtcccggacccatctacgctgaggacggagaccgcggcatcaaccagcccatcatctacagcatctttaggggaaacgtgaatggtacattcatcatccacccagactcgggcaacctcaccgtggccaggagtgtccccagccccatgaccttccttctgctggtgaagggccaacaggccgaccttgcccgctactcagtgacccaggtcaccgtggaggctgtggctgcggccgggagcccgccccgcttcccccagagcctgtatcgtggcaccgtggcgcgtggcgctggagcgggcgttgtggtcaaggatgcagctgccccttctcagcctctgaggatccaggctcaggacccggagttctcggacctcaactcggccatcacatatcgaattaccaaccactcacacttccggatggagggagaggttgtgctgaccaccaccacactggcacaggcgggagccttctacgcagaggttgaggcccacaacacggtgacctctggcaccgcaaccacagtcattgagatacaagtttccgaacaggagcccccctccacagatgtccccccatccccagaggctggaggaacaactgggccctggaccagcaccacttccgaggtccccagaccccctgagccctcccagggaccctccacgaccagctctgggggaggcacaggccctcatccaccctctggcacaactctgaggccaccaacctcgtccacacccggggggtccccgggtgcagaaaacagcacctcccaccaaccagccactcccggtggggacacagcacagaccccaaagccaggaacctctcagccgatgccccccggtgtgggaaccagcacctcccaccaaccagccacacccagtgggggcacagtacagaccccagagccaggaacctctcagccgatgccccccagtatgggaaccagcacctcccaccaaccagccacacccggtgggggcacagcacagaccccagaggcaggaacctctcagccgatgccccccggtatgggaaccagcacctcccaccaaccaaccacacccggtgggggcacagcacagaccccagagccaggaacctctcagccgatgcccctcagcaagagcaccccatcttcaggtggcggcccctcggaggacaagcgcttctcggtggtggatatggcggccctgggcggggtgctgggtgcgctgctgctgctggctctccttggcctcgccgtccttgtccacaagcactatggcccccggctcaagtgctgctctggcaaagctccggagccccagccccaaggctttgacaaccaggcgttcctccctgaccacaaggccaactgggcgcccgtccccagccccacgcacgaccccaagcccgcggaggcaccgatgcccgcagagcccgcaccccccggccctgcctccccaggcggtgcccctgagccccccgcagcggcccgagctggcggaagccccacggcggtgaggtccatcctgaccaaggagcggcggccagagggcgggtacaaggctgtctggtttggcgaggacatcgggacggaggcagacgtggtcgttctcaacgcgcccaccctggacgtggatggcgccagtgactccggcagcggcgatgagggcgagggcgcggggaggggtgggggtccctacgatgcgcccggtggtgatgactcctacatctaagtggcccctccaccctctcccccagccgcacgggcactggaggtctcgctcccccagcctccgacccgaggcagaataaagcaaggctcccg

SEQ ID NO: 1394 - DNA, 3053 bp, Homo sapiens
attctggggctcgggggatcccggacaccctctcagctcctgcccgggggcccatgtgtcccttctgccctgtgcctcggtgcctgtgacctgagccccctggttgacccctgcactcagtccaacttgggccaaacgactgcccctccttctggcagtgggctggaccagccggccagcgggagcccccttggcagaagccggtcgtaaaggatcataaactgggcggcgtctggctggggcgaaggtcgctgaggtaggaactgcgccagtcctagacgccagacccgctcagaccctcctgccaggtgacagccgccaagatggggtcttgggccctgctgtggcctcccctgctgttcaccgggctgctcgtccgacccccggggaccatggcccaggcccagtactgctctgtgaacaaggacatctttgaagtagaggagaacacaaatgtcaccgagccgctggtggacatccacgtcccggagggccaggaggtgaccctcggagccttgtccaccccctttgcatttcggatccagggaaaccagctgtttctcaacgtgactcctgattacgaggagaagtcactgcttgaggctcagctgctgtgtcagagcggaggcacattggtgacccagctaagggtgttcgtgtcagtgctggacgtcaatgacaatgcccccgaattcccctttaagaccaaggagataagggtggaggaggacacgaaagtgaactccaccgtcatccccgagacgcaactgcaggctgaggaccgcgacaaggacgacattctgttctacaccctccaggaaatgacagcaggtgccagtgactacttctccctggtgagtgtaaaccgtcccgccctgaggctggaccggcccctggacttctacgagcggccgaacatgaccttctggctgctggtgcgggacactccgggggagaatgtggaacccagccacactgccaccgccacactagtgctgaacgtggtgcccgccgacctgcggcccccgtggttcctgccctgcaccttctcagatggctacgtctgcattcaagctcagtaccacggggctgtccccacggggcacatactgccatctcccctcgtcctgcgtcccggacccatctacgctgaggacggagaccgcggcatcaaccagcccatcatctacagcatctttaggggaaacgtgaatggtacattcatcatccacccagactcgggcaacctcaccgtggccaggagtgtccccagccccatgaccttccttctgctggtgaagggccaacaggccgaccttgcccgctactcagtgacccaggtcaccgtggaggctgtggctgcggccgggagcccgccccgcttcccccagagcctgtatcgtggcaccgtggcgcgtggcgctggagcgggcgttgtggtcaaggatgcagctgccccttctcagcctctgaggatccaggctcaggacccggagttctcggacctcaactcggccatcacatatcgaattaccaaccactcacacttccggatggagggagaggttgtgctgaccaccaccacactggcacaggcgggagccttctacgcagaggttgaggcccacaacacggtgacctctggcaccgcaaccacagtcattgagatacaagtttccgaacaggagcccccctccacaggtggcggcccctcggaggacaagcgcttctcggtggtggatatggcggccctgggcggggtgctgggtgcgctgctgctgctggctctccttggcctcgccgtccttgtccacaagcactatggcccccggctcaagtgctgctctggcaaagctccggagccccagccccaaggctttgacaaccaggcgttcctccctgaccacaaggccaactgggcgcccgtccccagccccacgcacgaccccaagcccgcggaggcaccgatgcccgcagagcccgcaccccccggccctgcctccccaggcggtgcccctgagccccccgcagcggcccgagctggcggaagccccacggcggtgaggtccatcctgaccaaggagcggcggccggagggcgggtacaaggctgtctggtttggcgaggacatcgggacggaggcagacgtggtcgttctcaacgcgcccaccctggacgtggatggcgccagtgactccggcagcggcgatgagggcgagggcgcggggaggggtgggggtccctacgatgcgcccggtggtgatgactcctacatctaagtggcccctccaccctctcccccagccgcacgggcactggaggtctcgctcccccagcctccgacccgaggcagaataaagcaaggctcccgaaacccaggccatggcgtggggcaggcgcgcgggtccatgggggtcccattcactcagtcccctgtcgtcattagcgcttgagcccaggtgtgcagatgaggcggtgggtctggccacgctgtccccaccccaaggctgcagcacttcccgtaaaccacctgcagtgcccgccgccttcccgaggctctgtgccagctagtctgggaagttcctctcccgctctaaccacagcccgaggggggctcccctcccccgacctgcaccggagatctcaggcacccggctcaactcagacctcccgctcccgaccctacacagagattgcctggggaggctgaggagccgatgcaaacccccaaggcgacgcacttgggagccggtggtctcaaacacctgccgggggtcctagtccccttctgaaatctacatgcttgggttggagcgcagcagtaaacaccctgcccagtgacctggactgaggcgcgctgggggtgggtgcgccgtgtggcctgagcaggagccagaccaggaggcctaggggtgagagacacattcccctcgctgctcccaaagccagagcccaggctgggcgcccatgcccagaaccatcaagggatcccttgcggcttgtcagcactttccctaatggaaatacaccattaattcctttccaaatgtttt

SEQ ID NO: 1395 - DNA, 2674 bp, Homo sapiens
cgccgcgcttcctcctgaaggtgactgcgcccgcggggacgcagggggcggggcccgggtcgcccggagccgggattgggcagagggcggggcggcggagggattgcggcggcccgcagcgggataaccttgaggctgaggcagtggctccttgcacagcagctgcacgcgccgtggctccggatctcttcgtctttgcagcgtagcccgagtcggtcagcgccggaggtgagcggtgcaggaggctacgccatcagtccccaccaagggccagtcgcccggctagtgcggaatcccggcgcgccggccggccccgggcacgcaggcagggcggcgcaggatccagggcgtctgggatgcagtggagctcagagagaggagaacggctcctcacgcctggggcctgctcttcagaagtccccagcgccgttccttccagatcaggacctcagcagccatgtcgaagccccatagtgaagccgggactgccttcattcagacccagcagctgcacgcagccatggctgacacattcctggagcacatgtgccgcctggacattgattcaccacccatcacagcccggaacactggcatcatctgtaccattggcccagcttcccgatcagtggagacgttgaaggagatgattaagtctggaatgaatgtggctcgtctgaacttctctcatggaactcatgagtaccatgcggagaccatcaagaatgtgcgcacagccacggaaagctttgcttctgaccccatcctctaccggcccgttgctgtggctctagacactaaaggacctgagatccgaactgggctcatcaagggcagcggcactgcagaggtggagctgaagaagggagccactctcaaaatcacgctggataacgcctacatggaaaagtgtgacgagaacatcctgtggctggactacaagaacatctgcaaggtggtggaagtgggcagcaagatctacgtggatgatgggcttatttctctccaggtgaagcagaaaggtgccgacttcctggtgacggaggtggaaaatggtggctccttgggcagcaagaagggtgtgaaccttcctggggctgctgtggacttgcctgctgtgtcggagaaggacatccaggatctgaagtttggggtcgagcaggatgttgatatggtgtttgcgtcattcatccgcaaggcatctgatgtccatgaagttaggaaggtcctgggagagaagggaaagaacatcaagattatcagcaaaatcgagaatcatgagggggttcggaggtttgatgaaatcctggaggccagtgatgggatcatggtggctcgtggtgatctaggcattgagattcctgcagagaaggtcttccttgctcagaagatgatgattggacggtgcaaccgagctgggaagcctgtcatctgtgctactcagatgctggagagcatgatcaagaagccccgccccactcgggctgaaggcagtgatgtggccaatgcagtcctggatggagccgactgcatcatgctgtctggagaaacagccaaaggggactatcctctggaggctgtgcgcatgcagcacctgatagctcgtgaggctgaggcagccatgttccaccgcaagctgtttgaagaacttgtgcgagcctcaagtcactccacagacctcatggaagccatggccatgggcagcgtggaggcttcttataagtgtttagcagcagctttgatagttctgacggagtctggcaggtctgctcaccaggtggccagataccgcccacgtgcccccatcattgctgtgacccggaatccccagacagctcgtcaggcccacctgtaccgtggcatcttccctgtgctgtgcaaggacccagtccaggaggcctgggctgaggacgtggacctccgggtgaactttgccatgaatgttggcaaggcccgaggcttcttcaagaagggagatgtggtcattgtgctgaccggatggcgccctggctccggcttcaccaacaccatgcgtgttgttcctgtgccgtgatggaccccagagcccctcctccagcccctgtcccacccccttcccccagcccatccattaggccagcaacgcttgtagaactcactctgggctgtaacgtggcactggtaggttgggacaccagggaagaagatcaacgcctcactgaaacatggctgtgtttgcagcctgctctagtgggacagcccagagcctggctgcccatcatgtggccccacccaatcaagggaagaaggaggaatgctggactggaggcccctggagccagatggcaagagggtgacagcttcctttcctgtgtgtactctgtccagttcctttagaaaaaatggatgcccagaggactcccaaccctggcttggggtcaagaaacagccagcaagagttaggggccttagggcactgggctgttgttccattgaagccgactctggccctggcccttacttgcttctctagctctctaggcctctccagtttgcacctgtccccaccctccactcagctgtcctgcagcaaacactccaccctccaccttccattttcccccactactgcagcacctccaggcctgttgctatagagcctacctgtatgtcaataaacaacagctgaagcacc

SEQ ID NO: 1396 - DNA, 2392 bp, Homo sapiens
agcgggataaccttgaggctgaggcagtggctccttgcacagcagctgcacgcgccgtggctccggatctcttcgtctttgcagcgtagcccgagtcggtcagcgccggagatgactcaacctttcaattattctgcttttgagagaattatcttcgctgggacctcagcagccatgtcgaagccccatagtgaagccgggactgccttcattcagacccagcagctgcacgcagccatggctgacacattcctggagcacatgtgccgcctggacattgattcaccacccatcacagcccggaacactggcatcatctgtaccattggcccagcttcccgatcagtggagacgttgaaggagatgattaagtctggaatgaatgtggctcgtctgaacttctctcatggaactcatgagtaccatgcggagaccatcaagaatgtgcgcacagccacggaaagctttgcttctgaccccatcctctaccggcccgttgctgtggctctagacactaaaggacctgagatccgaactgggctcatcaagggcagcggcactgcagaggtggagctgaagaagggagccactctcaaaatcacgctggataacgcctacatggaaaagtgtgacgagaacatcctgtggctggactacaagaacatctgcaaggtggtggaagtgggcagcaagatctacgtggatgatgggcttatttctctccaggtgaagcagaaaggtgccgacttcctggtgacggaggtggaaaatggtggctccttgggcagcaagaagggtgtgaaccttcctggggctgctgtggacttgcctgctgtgtcggagaaggacatccaggatctgaagtttggggtcgagcaggatgttgatatggtgtttgcgtcattcatccgcaaggcatctgatgtccatgaagttaggaaggtcctgggagagaagggaaagaacatcaagattatcagcaaaatcgagaatcatgagggggttcggaggtttgatgaaatcctggaggccagtgatgggatcatggtggctcgtggtgatctaggcattgagattcctgcagagaaggtcttccttgctcagaagatgatgattggacggtgcaaccgagctgggaagcctgtcatctgtgctactcagatgctggagagcatgatcaagaagccccgccccactcgggctgaaggcagtgatgtggccaatgcagtcctggatggagccgactgcatcatgctgtctggagaaacagccaaaggggactatcctctggaggctgtgcgcatgcagcacctgattgcccgtgaggcagaggctgccatctaccacttgcaattatttgaggaactccgccgcctggcgcccattaccagcgaccccacagaagccaccgccgtgggtgccgtggaggcctccttcaagtgctgcagtggggccataatcgtcctcaccaagtctggcaggtctgctcaccaggtggccagataccgcccacgtgcccccatcattgctgtgacccggaatccccagacagctcgtcaggcccacctgtaccgtggcatcttccctgtgctgtgcaaggacccagtccaggaggcctgggctgaggacgtggacctccgggtgaactttgccatgaatgttggcaaggcccgaggcttcttcaagaagggagatgtggtcattgtgctgaccggatggcgccctggctccggcttcaccaacaccatgcgtgttgttcctgtgccgtgatggaccccagagcccctcctccagcccctgtcccacccccttcccccagcccatccattaggccagcaacgcttgtagaactcactctgggctgtaacgtggcactggtaggttgggacaccagggaagaagatcaacgcctcactgaaacatggctgtgtttgcagcctgctctagtgggacagcccagagcctggctgcccatcatgtggccccacccaatcaagggaagaaggaggaatgctggactggaggcccctggagccagatggcaagagggtgacagcttcctttcctgtgtgtactctgtccagttcctttagaaaaaatggatgcccagaggactcccaaccctggcttggggtcaagaaacagccagcaagagttaggggccttagggcactgggctgttgttccattgaagccgactctggccctggcccttacttgcttctctagctctctaggcctctccagtttgcacctgtccccaccctccactcagctgtcctgcagcaaacactccaccctccaccttccattttcccccactactgcagcacctccaggcctgttgctatagagcctacctgtatgtcaataaacaacagctgaagcacct

SEQ ID NO: 1397 - DNA, 2490 bp, Homo sapiens
tcgtctttgcagcgtagcccgagtcggtcagcgccggaggtgagcggtgcaggaggctacgccatcagtccccaccaagggccagtcgcccggctagtgcggaatcccggcgcgccggccggccccgggcacgcaggcagggcggcgcaggatccagggcgtctgggatgcagtggagctcagagagaggagaacggctcctcacgcctggggcctgctcttcagaagtccccagcgccgttccttccagatcaggcgggacctcagcagccatgtcgaagccccatagtgaagccgggactgccttcattcagacccagcagctgcacgcagccatggctgacacattcctggagcacatgtgccgcctggacattgattcaccacccatcacagcccggaacactggcatcatctgtaccattggcccagcttcccgatcagtggagacgttgaaggagatgattaagtctggaatgaatgtggctcgtctgaacttctctcatggaactcatgagtaccatgcggagaccatcaagaatgtgcgcacagccacggaaagctttgcttctgaccccatcctctaccggcccgttgctgtggctctagacactaaaggacctgagatccgaactgggctcatcaagggcagcggcactgcagaggtggagctgaagaagggagccactctcaaaatcacgctggataacgcctacatggaaaagtgtgacgagaacatcctgtggctggactacaagaacatctgcaaggtggtggaagtgggcagcaagatctacgtggatgatgggcttatttctctccaggtgaagcagaaaggtgccgacttcctggtgacggaggtggaaaatggtggctccttgggcagcaagaagggtgtgaaccttcctggggctgctgtggacttgcctgctgtgtcggagaaggacatccaggatctgaagtttggggtcgagcaggatgttgatatggtgtttgcgtcattcatccgcaaggcatctgatgtccatgaagttaggaaggtcctgggagagaagggaaagaacatcaagattatcagcaaaatcgagaatcatgagggggttcggaggtttgatgaaatcctggaggccagtgatgggatcatggtggctcgtggtgatctaggcattgagattcctgcagagaaggtcttccttgctcagaagatgatgattggacggtgcaaccgagctgggaagcctgtcatctgtgctactcagatgctggagagcatgatcaagaagccccgccccactcgggctgaaggcagtgatgtggccaatgcagtcctggatggagccgactgcatcatgctgtctggagaaacagccaaaggggactatcctctggaggctgtgcgcatgcagcacctgatagctcgtgaggctgaggcagccatgttccaccgcaagctgtttgaagaacttgtgcgagcctcaagtcactccacagacctcatggaagccatggccatgggcagcgtggaggcttcttataagtgtttagcagcagctttgatagttctgacggagtctggcaggtctgctcaccaggtggccagataccgcccacgtgcccccatcattgctgtgacccggaatccccagacagctcgtcaggcccacctgtaccgtggcatcttccctgtgctgtgcaaggacccagtccaggaggcctgggctgaggacgtggacctccgggtgaactttgccatgaatgttggcaaggcccgaggcttcttcaagaagggagatgtggtcattgtgctgaccggatggcgccctggctccggcttcaccaacaccatgcgtgttgttcctgtgccgtgatggaccccagagcccctcctccagcccctgtcccacccccttcccccagcccatccattaggccagcaacgcttgtagaactcactctgggctgtaacgtggcactggtaggttgggacaccagggaagaagatcaacgcctcactgaaacatggctgtgtttgcagcctgctctagtgggacagcccagagcctggctgcccatcatgtggccccacccaatcaagggaagaaggaggaatgctggactggaggcccctggagccagatggcaagagggtgacagcttcctttcctgtgtgtactctgtccagttcctttagaaaaaatggatgcccagaggactcccaaccctggcttggggtcaagaaacagccagcaagagttaggggccttagggcactgggctgttgttccattgaagccgactctggccctggcccttacttgcttctctagctctctaggcctctccagtttgcacctgtccccaccctccactcagctgtcctgcagcaaacactccaccctccaccttccattttcccccactactgcagcacctccaggcctgttgctatagagcctacctgtatgtcaataaacaacagctgaagcacct

SEQ ID NO: 1398 - DNA, 2490 bp, Homo sapiens; identical to SEQ ID NO: 1397

SEQ ID NO: 1399 - DNA, 2392 bp, Homo sapiens; identical to SEQ ID NO: 1396

SEQ ID NO: 1400 - DNA, 2490 bp, Homo sapiens; identical to SEQ ID NO: 1397

SEQ ID NO: 1401 - DNA, 941 bp, Homo sapiens
gacgcaaccacggcggaagaacaactgccagtctaactgtgcgtgaaggctggcagtgatggggccgagactgggaaccgccccttctccctgagactgttcatagtgctgtgggtcacaggagtcaccttcaacgttaccaccattgacaccaagagacagactgagagatgcacacagacaccaacaagatggtggaatttctggaggcagtactgtgccctccgagataccccaagctggcagctctgaaccctgagtccaacacagctgggctggacatatttgccaaattttctgcctacatcaagaattcaaacccagcactcaatgataatctgcagaagggactcctggaagccctgaaggttttagacaattacttaacatcccccctcccaaaagaagtagatgaaaccagtgctgaagatgagggcatctcgcagaggaagtttctgaatggcaatgagctcaccctggctgactgcaacctgttgccaaagctacacatagtacaggtggtgtgtaagaagtaccggggatttaacatccctgaggccttcccgggaacgcccgcctccaccacgccgccaaagttcaaccccaatgagatcaaagtcgtatacctgaggtgcaccggaggtgaagtcggtgccacttctgcactggcccccaagatcggcccccggggtctgtctccaaaaaaggttggtgatgacattgccaaggcaacaggtgactggaagggcctgagtattacagtgaaactgaccattcagaacagacaagcccagattgaggtggtgccttctgcctctgccctgatcatcaaagctctcaaggaaccaccaagagtcagaaagaaacagaaaaacattaaacacagtgggagtatcacttttgatgagattgtcaacattgcttcacagatgcagtactga

SEQ ID NO: 1402 - DNA, 3273 bp, Homo sapiens
tgcctctggcacctggggcagccgcgcccgcggagttttccgcccggcgctgacggctgctgcgcccgcggctccccagtgccccgagtgccccgcgggccccgcgagcgggagtgggacccagcccctaggcagaacccaggcgccgcgcccgggacgcccgcggagagagccactcccgcccacgtcccatttcgcccctcgcgtccggagtccccgtggccagatctaaccatgagctaccctggctatcccccgcccccaggtggctacccaccagctgcaccaggtggtggtccctggggaggtgctgcctaccctcctccgcccagcatgccccccatcgggctggataacgtggccacctatgcggggcagttcaaccaggactatctctcgggaatggcggccaacatgtctgggacatttggaggagccaacatgcccaacctgtaccctggggcccctggggctggctacccaccagtgccccctggcggctttgggcagcccccctctgcccagcagcctgttcctccctatgggatgtatccacccccaggaggaaacccaccctccaggatgccctcatatccgccatacccaggggcccctgtgccgggccagcccatgccaccccccggacagcagcccccaggggcctaccctgggcagccaccagtgacctaccctggtcagcctccagtgccactccctgggcagcagcagccagtgccgagctacccaggatacccggggtctgggactgtcacccccgctgtgcccccaacccagtttggaagccgaggcaccatcactgatgctcccggctttgaccccctgcgagatgccgaggtcctgcggaaggccatgaaaggcttcgggacggatgagcaggccatcattgactgcctggggagtcgctccaacaagcagcggcagcagatcctactttccttcaagacggcttacggcaaggatttgatcaaagatctgaaatctgaactgtcaggaaactttgagaagacaatcttggctctgatgaagaccccagtcctctttgacatttatgagataaaggaagccatcaagggggttggcactgatgaagcctgcctgattgagatcctcgcttcccgcagcaatgagcacatccgagaattaaacagagcctacaaagcagaattcaaaaagaccctggaagaggccattcgaagcgacacatcagggcacttccagcggctcctcatctctctctctcagggaaaccgtgatgaaagcacaaacgtggacatgtcactcgcccagagagatgcccaggagctgtatgcggccggggagaaccgcctgggaacagacgagtccaagttcaatgcggttctgtgctcccggagccgggcccacctggtagcagttttcaatgagtaccagagaatgacaggccgggacattgagaagagcatctgccgggagatgtccggggacctggaggagggcatgctggccgtggtgaaatgtctcaagaataccccagccttctttgcggagaggctcaacaaggccatgaggggggcaggaacaaaggaccggaccctgattcgcatcatggtgtctcgcagcgagaccgacctcctggacatcagatcagagtataagcggatgtacggcaagtcgctgtaccacgacatctcgggagatacttcaggggattaccggaagattctgctgaagatctgtggtggcaatgactgaacagtgactggtggctcacttctgcccacctgccggcaacaccagtgccaggaaaaggccaaaagaatgtctgtttctaacaaatccacaaatagccccgagattcaccgtcctagagcttaggcctgtcttccacccctcctgacccgtatagtgtgccacaggacctgggtcggtctagaactctctcaggatgccttttctaccccatccctcacagcctcttgctgctaaaatagatgtttcatttttctgactcatgcaatcattcccctttgcctgtggctaagacttggcttcatttcgtcatgtaattgtatatttttatttggaggcatattttcttttcttacagtcattgccagacagaggcatacaagtctgtttgctgcatacacatttctggtgagggcgactgggtgggtgaagcaccgtgtcctcgctgaggagagaaagggaggcgtgcctgagaaggtagcctgtgcatctggtgagtgtgtcacgagctttgttactgccaaactcactcctttttagaaaaaacaaaaaaaaagggccagaaagtcattccttccatcttccttgcagaaaccacgagaacaaagccagttccctgtcagtgacagggcttcttgtaatttgtggtatgtgccttaaacctgaatgtctgtagccaaaacttgtttccacattaagagtcagccagctctggaatggtctggaaatgtcttcctggtaccaacttgttttcttctgcttgattctgccctgtggctcagaggtctggccttatcagccagtgaaagttcatgtaaccttacgtagagatttgtgtgcaggaaaccctgagcatacactagtttgcagggactcgtaaggacatgggaagggaggttcccgaaatccaggcaggaggcccagacacctgaaaggcaaagggatcttggttggttgcaggtgcagtgaagtccactgaaggtgtggtgcgaagaatgcagtccttcacccaggtcccaggagggaagaagggtgtgtgctaattcctggtgcccctcggcgggggccagagagaaggatggggacaacccagagagtcacaagaccagtgcctcccctcagggtgcctccaggctgaaaggggctcctggctctggtctctggggaccctgtgcccgttggttggtggtgtgagggaagagaatccataagagagtttctgagaattatggtgtcatgtccagaagctagagcttaccttgcatcaggggtctccacccactccttttccaacctcctgcgttgaggtttagaaaagagagaatcgactaggcactatggctcacgcctgtaatccaaggactttgggaagctgaggtgagaggatcacttgagctcaggagttcaagactagcctagccaacagcgagacccctgtctctactaaaaaatttggccaggcgtggtggctcacggctgtaatcccagcactttgggaggtgaggcgggcagatcacctgaggt

SEQ ID NO: 1403 - DNA, 3273 bp, Homo sapiens; identical to SEQ ID NO: 1402

SEQ ID NO: 1404 - DNA, 3273 bp, Homo sapiens; identical to SEQ ID NO: 1402

SEQ ID NO: 1405 - DNA, 1958 bp, Homo sapiens
gctgctgcgcccgcggctccccagtgccccgagtgccccgcgggccccgcgagcgggagtgggacccagccctaggcagaacccaggcgccgcgcccgggacgcccgcggagagagccactcccgcccacgtcccatttcgcccctcgcgtccggagtccccgtggccagatctaaccatgagctaccctggctatcccccgcccccaggtggctacccaccagctgcaccaggtggtggtccctggggaggtgctgcctaccctcctccgcccagcatgccccccatcgggctggataacgtggccacctatgcggggcagttcaaccaggactatctctcgggaatggcggccaacatgtctgggacatttggaggagccaacatgcccaacctgtaccctggggcccctggggctggctacccaccagtgccccctggcggctttgggcagcccccctctgcccagcagcctgttcctccctatgggatgtatccacccccaggaggaaacccaccctccaggatgccctcatatccgccatacccaggggcccctgtgccgggccagcccatgccaccccccggacagcagcccccaggggcctaccctgggcagccaccagtgacctaccctggtcagcctccagtgccactccctgggcagcagcagccagtgccgagctacccaggatacccggggtctgggactgtcacccccgctgtgcccccaacccagtttggaagccgaggcaccatcactgatgctcccggctttgaccccctgcgagatgccgaggtcctgcggaaggccatgaaaggcttcgggacggatgagcaggccatcattgactgcctggggagtcgctccaacaagcagcggcagcagatcctactttccttcaagacggcttacggcaaggatttgatcaaagatctgaaatctgaactgtcaggaaactttgagaagacaatcttggctctgatgaagaccccagtcctctttgacatttatgagataaaggaagccatcaagggggttggcactgatgaagcctgcctgattgagatcctcgcttcccgcagcaatgagcacatccgagaattaaacagagcctacaaagcagaattcaaaaagaccctggaagaggccattcgaagcgacacatcagggcacttccagcggctcctcatctctctctctcagggaaaccgtgatgaaagcacaaacgtggacatgtcactcgcccagagagatgcccaggagctgtatgcggccggggagaaccgcctgggaacagacgagtccaagttcaatgcggttctgtgctcccggagccgggcccacctggtagcagttttcaatgagtaccagagaatgacaggccgggacattgagaagagcatctgccgggagatgtccggggacctggaggagggcatgctggccgtggtgaaatgtctcaagaataccccagccttctttgcggagaggctcaacaaggccatgaggggggcaggaacaaaggaccggaccctgattcgcatcatggtgtctcgcagcgagaccgacctcctggacatcagatcagagtataagcggatgtacggcaagtcgctgtaccacgacatctcgggagatacttcaggggattaccggaagattctgctgaagatctgtggtggcaatgactgaacagtgactggtggctcacttctgcccacctgccggcaacaccagtgccaggaaaaggccaaaagaatgtctgtttctaacaaatccacaaatagccccgagattcaccgtcctagagcttaggcctgtcttccacccctcctgacccgtatagtgtgccacaggacctgggtcggtctagaactctctcaggatgccttttctaccccatccctcacagcctcttgctgctaaaatagatgtttcatttttctgaaaaaaa

SEQ ID NO: 1406 - DNA, 1448 bp, Homo sapiens
gtatccagatttgcttttacattttcttgcctgagtctgaggtgaacagtgaacatatttacatttgatttaacagtgaaccttaattctttctggcttcacagtgaaacaagtttatgcaatcgatcaaatattttcatccctgaggttaacaattaccatcaaaatgttttgtggagactatgtgcaaggaaccatcttcccagctcccaatttcaatcccataatggatgcccaaatgctaggaggagcactccaaggatttgactgtgacaaagacatgctgatcaacattctgactcagcgctgcaatgcacaaaggatgatgattgcagaggcataccagagcatgtatggccgggacctgattggggatatgagggagcagctttcggatcacttcaaagatgtgatggctggcctcatgtacccaccaccactgtatgatgctcatgagctctggcatgccatgaagggagtaggcactgatgagaattgcctcattgaaatactagcttcaagaacaaatggagaaattttccagatgcgagaagcctactgcttgcaatacagcaataacctccaagaggacatttattcagagacctcaggacacttcagagatactctcatgaacttggtccaggggaccagagaggaaggatatacagaccctgcgatggctgctcaggatgcaatggtcctatgggaagcctgtcagcagaagacgggggagcacaaaaccatgctgcaaatgatcctgtgcaacaagagctaccagcagctgcggctggttttccaggaatttcaaaatatttctgggcaagatatggtagatgccattaatgaatgttatgatggatactttcaggagctgctggttgcaattgttctctgtgttcgagacaaaccagcctattttgcttatagattatatagtgcaattcatgactttggtttccataataaaactgtaatcaggattctcattgccagaagtgaaatagacctgctgaccataaggaaacgatacaaagagcgatatggaaaatccctatttcatgatatcagaaattttgcttcagggcattataagaaagcactgcttgccatctgtgctggtgatgctgaggactactaaaatgaagaggacttggagtactgtgcactcctctttctagacacttccaaatagagattttctcacaaatttgtactgttcatggcactattaacaaaactatacaatcatattttctcttctatctttgaaattattctaagccaaagaaaactatgaatgaaagtatatgatactgaatttgcctactatcctgaatttgcctactatctaatcagcaattaaataaattgtgcatgatggaataatagaaaaattgcattggaatagattttatttaaatgtgaaccatcaacaacctacaaca

SEQ ID NO: 1407 - DNA, 3273 bp, Homo sapiens; identical to SEQ ID NO: 1402

SEQ ID NO: 1408 - DNA, 3273 bp, Homo sapiens; identical to SEQ ID NO: 1402

SEQ ID NO: 1409 - DNA, 1428 bp, Homo sapiens
ttttcttgcctgagtctgaggtgaacagtgaacatatttacatttgatttaacagtgaaccttaattctttctggcttcacagtgaaacaagtttatgcaatcgatcaaatattttcatccctgaggttaacaattaccatcaaaatgttttgtggagactatgtgcaaggaaccatcttcccagctcccaatttcaatcccataatggatgcccaaatgctaggaggagcactccaaggatttgactgtgacaaagacatgctgatcaacattctgactcagcgctgcaatgcacaaaggatgatgattgcagaggcataccagagcatgtatggccgggacctgattggggatatgagggagcagctttcggatcacttcaaagatgtgatggctggcctcatgtacccaccaccactgtatgatgctcatgagctctggcatgccatgaagggagtaggcactgatgagaattgcctcattgaaatactagcttcaagaacaaatggagaaattttccagatgcgagaagcctactgcttgcaatacagcaataacctccaagaggacatttattcagagacctcaggacacttcagagatactctcatgaacttggtccaggggaccagagaggaaggatatacagaccctgcgatggctgctcaggatgcaatggtcctatgggaagcctgtcagcagaagacgggggagcacaaaaccatgctgcaaatgatcctgtgcaacaagagctaccagcagctgcggctggttttccaggaatttcaaaatatttctgggcaagatatggtagatgccattaatgaatgttatgatggatactttcaggagctgctggttgcaattgttctctgtgttcgagacaaaccagcctattttgcttatagattatatagtgcaattcatgactttggtttccataataaaactgtaatcaggattctcattgccagaagtgaaatagacctgctgaccataaggaaacgatacaaagagcgatatggaaaatccctatttcatgatatcagaaattttgcttcagggcattataagaaagcactgcttgccatctgtgctggtgatgctgaggactactaaaatgaagaggacttggagtactgtgcactcctctttctagacacttccaaatagagattttctcacaaatttgtactgttcatggcactattaacaaaactatacaatcatattttctcttctatctttgaaattattctaagccaaagaaaactatgaatgaaagtatatgatactgaatttgcctactatcctgaatttgcctactatctaatcagcaattaaataaattgtgcatgatggaataatagaaaaattgcattggaatagattttatttaaatgtgaaccatcaacaacctacaacaa

SEQ ID NO: 1410 - DNA, 3273 bp, Homo sapiens; identical to SEQ ID NO: 1402

SEQ ID NO: 1411 - DNA, 3273 bp, Homo sapiens; identical to SEQ ID NO: 1402

SEQ ID NO: 1412 - DNA, 3117 bp, Homo sapiens
cctgcttgttgcagctgtgggtgaggacggctctagctaggtgagcggctccggccaggtgagcggggcgcataggtgacggagggccgagggcacgggtatgagtttctgccgggggcgagttcccttttagactatggcgacatacctggagttcatccagcagaatgaagaacgggatggtgtgcgttttagttggaacgtgtggccttccagccggctggaggctacaagaatggttgtacccctggcttgtctccttactcctttgaaagaacgtccagacctacctcctgtacaatatgaacctgtgctttgcagcaggccaacttgtaaagctgttctcaacccactttgtcaggttgattatcgagcaaaactttgggcctgtaatttctgttttcaaagaaatcagtttcctccagcttatggaggcatatctgaggtgaatcaacctgccgaattgatgccccagttttctacaattgagtacgtgatacagcgaggtgctcagtcccctctgatctttctctatgtggttgacacatgcctggaggaagatgaccttcaagcactcaaagagtccctgcagatgtccctgagtcttcttcctccagatgctctggtgggtctgatcacatttggaaggatggtgcaggttcatgagctaagctgtgaaggaatctccaaaagttatgtcttccgagggaccaaggatttaactgcaaagcaaatacaggatatgttgggcctgaccaagccagccatgcccatgcagcaagcacgacctgcacaaccacaggagcacccttttgcttcaagcagatttctgcagcctgttcacaagattgatatgaacctcactgatcttcttggggagctacagagggacccatggccagtaactcaggggaagagacctttgcgatccactggtgtggctttgtccattgctgttggcttgctggagggcacttttccaaacacaggagccaggatcatgctgtttactggaggtccccctacccaagggcctggcatggtggttggagatgaattaaagattcctattcgttcttggcatgatattgagaaagataatgcacgattcatgaaaaaggcaaccaagcactatgagatgcttgctaatcgaacagctgcaaatggtcactgcattgatatttatgcttgtgcccttgatcaaactggacttttggagatgaagtgttgtgcaaatcttactggaggctacatggtaatgggagattctttcaacacttctctcttcaagcagacattccaaagaatctttactaaagattttaatggagatttccgaatggcatttggtgctactttggacgtaaagacctctcgggaactgaagattgcaggagccattggtccatgcgtatctctgaatgtgaaaggaccgtgtgtgtcagaaaatgagcttggtgttggtggcacgagtcagtggaaaatctgtggcctagatcctacatctacacttggcatctattttgaagttgtcaatcagcacaacaccccgatcccccaaggaggcagaggagccatccagtttgtcacgcattatcagcactccagcacccagagacgcatccgcgtgaccaccatcgcccgaaattgggcagatgtacagagtcagctcaggcacatagaagcagcatttgaccaggaggctgcggcagtgttgatggcacggcttggggtgttccgagcggagtcagaggaggggcccgatgtgctccggtggctggaccgacaactcatccgactgtgtcaaaagtttggacagtataacaaagaagaccccacttcttttaggttatcagattccttttctctatatcctcagtttatgttccatctgagaagatctccatttcttcaagtgtttaacaacagtcctgatgagtcgtcatattacagacatcattttgcccggcaggacctgacccagtccctcatcatgatccagcccattctctactcttactcctttcatgggccaccagagccagtactcttggatagcagcagcattctagctgacagaattttgctgatggatactttctttcaaattgtcatttatcttggtgagaccatagcccagtggcgtaaagctggctaccaggacatgcccgagtatgaaaacttcaagcaccttctgcaggcaccactggatgatgctcaagaaattctgcaagcacgcttcccgatgccacgttacatcaacacggagcatggaggcagtcaggctcgattccttttgtccaaagtgaacccatctcagacacacaataacctgtatgcttggggacaggaaactggagcacccatcctaactgatgatgttagcctgcaggtgttcatggaccatttgaagaagctggctgtctccagtgcctgttaagctgaggatacaaccaggaaatgcaacggtgtcagattgtgttcaaaatgtctagaaaggcttgataacattcctgttacttttctagcagattttaacaaataatcaaggacattttatatgtaactctttagattataatttatttgtattcctgtctttgtcctttttcttgcactataaaattataaggtcataaatgttttggtacttgtagatgtttatgtgctttttgtatcctaacttttagaatctaaataaaatcagaggtaatgtattttggcagcttgtttaggtgagaatcttaatgatcataaaaggaaataaatctagatgcagaaagtactggctaaaatattgctaatacaaatgtgatttcctgaggtctctgtgtgagtgtgtatgtgttttaagtgacttccttaagaggtgtttcctgaacctaattctcataattaaagtaatgtatatgcaggatcaaaatgaaacaaatataccttatcctaaagagctcataacaaataagttacctccactctataaactcagacctactttttgaagataactgcttttaacctctccttacaagatttttgttgttgatgtatttaattttagcccatgtctcaattctcattttcaaagaatcaatatattaatatacctttggtcat

SEQ ID NO: 1413 - DNA, 2457 bp, Homo sapiens
ggttcccagagtggggcacagcgaggcgctagggggaacgctggcctctgaaactagctctgggaccggggtctgcggccggcccctagctggccccgtctcccatccccagaagggtattcactggggattctgagctttggctactccagtttcccacgacacgtgagtgatgttccctttctacagctgctggaggactggactgctactactactcctggctgtggcagtgagagaatcctggcagacagaagaaaaaacttgcgacttggtaggagaaaagggtaaagagtcagagaaagagttggctctagtgaagaggctgaaaccactgtttaataaaagctttgagagcactgtgggccagggttcagacacatacatctacatcttcagggtgtgccgggaagctggcaaccacacttctggggcaggcctggtgcaaatcaacaaaagtaatgggaaggagacagtggtagggagactcaacgagactcacatcttcaacggaagtaattggatcatgctgatctataaagggggtgatgaatatgacaaccactgtggcaaggagcagcgtcgtgcagtggtgatgatctcctgcaatcgacacaccctagcggacaattttaaccctgtgtctgaggagcgtggcaaagtccaagattgtttctacctctttgagatggatagcagcctggcctgttcaccagagatctcccacctcagtgtgggttccatcttacttgtcacgtttgcatcactggttgctgtttatgttgttggggggttcctataccagcgactggtagtgggagccaaaggaatggagcagtttccccacttagccttctggcaggatcttggcaacctggtagcagatggctgtgactttgtctgccgttctaaacctcgaaatgtgcctgcagcatatcgtggtgtgggggatgaccagctgggggaggagtcagaagaaagggatgaccatttattaccaatgtagattgcactttatatgtccagcctcttcctcagtcccccaaaccaaagctacacagccagatttctcaagcagtctcaactccagtccctcatctcacccttactattgctcttgctttccagtttgcttttgatttgcatcttctcactagtaaaactgccttccctttgttccttattttctgttttttctctagagaggtacagttgtaagtcagagttaatataatagggcctgtgaaaacagaggcttttgcattgtctcttgacatcagaagttacaataggcatatgggcaaaatggtgtagcaggctcactggccgtttgttttttaaacacattttcacaagtttttgagacactggatttctttaattaaaaaaaaaatgccaagaaacattatttatacagggttgattgctttcatgttgttattctgtaccctatagtagcctccatgagaatctggtatttcttgctgcttggaactactttgcagtgattacttggttgcagtccaagtactctcgtttagtctgagcctggagatgttctagacttgcttctcccacctctgagattaggacaggaaaaatgtgaaatttcccaattacaggattatacggtaccatcacatcatttgtggaaattggggtgactgtatagctgggattgggctaaggactgtggtcttatctgtccacatacagccaaaatgcctatccagaaatccagttcgttggaaaggaaaattggtactcctgtgccacaggggttccagaaaagggaagtcactttaccttgcggtggtgggatcctgatgtctttcatccatttgtagtaaaagctggtaaagcttttcttactcctggttccctaccagtatttctaaacatgtcgcactttctccacaggcatgtggttttgacctttttttcaatcttctagaaagggaacggaagcagaagtgggacatcgagggctctgctgtcctctgcgctgggtgtggaatgctgctgcacctgtcccttctgctggctcagggaagtgtcttcttgcccacatttctgtggggaaaggtttttaatcctctgatgcttccatcttcctgtttaggccatgtgcccagaaacctggactgatctttctttaatagtgaacccctgggccactgaagagtaacatggctccactggacacaaaagagggatggaatcaacaggcagggggccttttataagccttaggaaaagaaaatgaaactatttcatctttggacttttcaatactattggagtgattttttttctttctaaacagggaaaataatgttacaaaagcatcttttttgttatttgtttgcatccctcccccacaccctggtgttttaaaatgaagaaaaaaaaccatcactttttgtacaaaaactcttaatgattaaaaaacaaaca

SEQ ID NO: 1414 - DNA, 2457 bp, Homo sapiens; identical to SEQ ID NO: 1413

SEQ ID NO: 1415 - DNA, 2428 bp, Homo sapiens
cgaggcgctagggggaacgctggcctctgaaactagctctgggaccggggtctgcggccggcccctagctggccccgtctcccatccccagaagggtattcactggggattctgagctttggctactccagtttcccacgacacgatgttccctttctacagctgctggaggactggactgctactactactcctggctgtggcagtgagagaatcctggcagacagaagaaaaaacttgcgacttggtaggagaaaagggtaaagagtcagagaaagagttggctctagtgaagaggctgaaaccactgtttaataaaagctttgagagcactgtgggccagggttcagacacatacatctacatcttcagggtgtgccgggaagctggcaaccacacttctggggcaggcctggtgcaaatcaacaaaagtaatgggaaggagacagtggtagggagactcaacgagactcacatcttcaacggaagtaattggatcatgctgatctataaagggggtgatgaatatgacaaccactgtggcaaggagcagcgtcgtgcagtggtgatgatctcctgcaatcgacacaccctagcggacaattttaaccctgtgtctgaggagcgtggcaaagtccaagattgtttctacctctttgagatggatagcagcctggcctgttcaccagagatctcccacctcagtgtgggttccatcttacttgtcacgtttgcatcactggttgctgtttatgttgttggggggttcctataccagcgactggtagtgggagccaaaggaatggagcagtttccccacttagccttctggcaggatcttggcaacctggtagcagatggctgtgactttgtctgccgttctaaacctcgaaatgtgcctgcagcatatcgtggtgtgggggatgaccagctgggggaggagtcagaagaaagggatgaccatttattaccaatgtagattgcactttatatgtccagcctcttcctcagtcccccaaaccaaagctacacagccagatttctcaagcagtctcaactccagtccctcatctcacccttactattgctcttgctttccagtttgcttttgatttgcatcttctcactagtaaaactgccttccctttgttccttattttctgttttttctctagagaggtacagttgtaagtcagagttaatataatagggcctgtgaaaacagaggcttttgcattgtctcttgacatcagaagttacaataggcatatgggcaaaatggtgtagcaggctcactggccgtttgttttttaaacacattttcacaagtttttgagacactggatttctttaattaaaaaaaaaatgccaagaaacattatttatacagggttgattgctttcatgttgttattctgtaccctatagtagcctccatgagaatctggtatttcttgctgcttggaactactttgcagtgattacttggttgcagtccaagtactctcgtttagtctgagcctggagatgttctagacttgcttctcccacctctgagattaggacaggaaaaatgtgaaatttcccaattacaggattatacggtaccatcacatcatttgtggaaattggggtgactgtatagctgggattgggctaaggactgtggtcttatctgtccacatacagccaaaatgcctatccagaaatccagttcgttggaaaggaaaattggtactcctgtgccacaggggttccagaaaagggaagtcactttaccttgcggtggtgggatcctgatgtctttcatccatttgtagtaaaagctggtaaagcttttcttactcctggttccctaccagtatttctaaacatgtcgcactttctccacaggcatgtggttttgacctttttttcaatcttctagaaagggaacggaagcagaagtgggacatcgagggctctgctgtcctctgcgctgggtgtggaatgctgctgcacctgtcccttctgctggctcagggaagtgtcttcttgcccacatttctgtggggaaaggtttttaatcctctgatgcttccatcttcctgtttaggccatgtgcccagaaacctggactgatctttctttaatagtgaacccctgggccactgaagagtaacatggctccactggacacaaaagagggatggaatcaacaggcagggggccttttataagccttaggaaaagaaaatgaaactatttcatctttggacttttcaatactattggagtgatttttttctttctaaacagggaaaataatgttacaaaagcatcttttttgttatttgtttgcatccctcccccacaccctggtgttttaaaatgaagaaaaaaaaccatcaccttttgtacaaaaactcttaatgattaaaaaacaaac

SEQ ID NO: 1416 - DNA, 2457 bp, Homo sapiens; identical to SEQ ID NO: 1413

SEQ ID NO: 1417 - DNA, 2457 bp, Homo sapiens; identical to SEQ ID NO: 1413

SEQ ID NO: 1418 - DNA, 2856 bp, Homo sapiens
tagtcgcgggtccccgagtgagcacgccagggagcaggagaccaaacgacgggggtcggagtcagagtcgcagtgggagtccccggaccggagcacgagcctgagcgggagagcgccgctcgcacgcccgtcgccacccgcgtacccggcgcagccagagccaccagcgcagcgctgccatggagcccagcagcaagaagctgacgggtcgcctcatgctggctgtgggaggagcagtgcttggctccctgcagtttggctacaacactggagtcatcaatgccccccagaaggtgatcgaggagttctacaaccagacatgggtccaccgctatggggagagcatcctgcccaccacgctcaccacgctctggtccctctcagtggccatcttttctgttgggggcatgattggctccttctctgtgggccttttcgttaaccgctttggccggcggaattcaatgctgatgatgaacctgctggccttcgtgtccgccgtgctcatgggcttctcgaaactgggcaagtcctttgagatgctgatcctgggccgcttcatcatcggtgtgtactgcggcctgaccacaggcttcgtgcccatgtatgtgggtgaagtgtcacccacagcctttcgtggggccctgggcaccctgcaccagctgggcatcgtcgtcggcatcctcatcgcccaggtgttcggcctggactccatcatgggcaacaaggacctgtggcccctgctgctgagcatcatcttcatcccggccctgctgcagtgcatcgtgctgcccttctgccccgagagtccccgcttcctgctcatcaaccgcaacgaggagaaccgggccaagagtgtgctaaagaagctgcgcgggacagctgacgtgacccatgacctgcaggagatgaaggaagagagtcggcagatgatgcgggagaagaaggtcaccatcctggagctgttccgctcccccgcctaccgccagcccatcctcatcgctgtggtgctgcagctgtcccagcagctgtctggcatcaacgctgtcttctattactccacgagcatcttcgagaaggcgggggtgcagcagcctgtgtatgccaccattggctccggtatcgtcaacacggccttcactgtcgtgtcgctgtttgtggtggagcgagcaggccggcggaccctgcacctcataggcctcgctggcatggcgggttgtgccatactcatgaccatcgcgctagcactgctggagcagctaccctggatgtcctatctgagcatcgtggccatctttggctttgtggccttctttgaagtgggtcctggccccatcccatggttcatcgtggctgaactcttcagccagggtccacgtccagctgccattgccgttgcaggcttctccaactggacctcaaatttcattgtgggcatgtgcttccagtatgtggagcaactgtgtggtccctacgtcttcatcatcttcactgtgctcctggttctgttcttcatcttcacctacttcaaagttcctgagactaaaggccggaccttcgatgagatcgcttccggcttccggcaggggggagccagccaaagtgataagacacccgaggagctgttccatcccctgggggctgattcccaagtgtgagtcgccccagatcaccagcccggcctgctcccagcagccctaaggatctctcaggagcacaggcagctggatgagacttccaaacctgacagatgtcagccgagccgggcctggggctcctttctccagccagcaatgatgtccagaagaatattcaggacttaacggctccaggattttaacaaaagcaagactgttgctcaaatctattcagacaagcaacaggttttataatttttttattactgattttgttatttttatatcagcctgagtctcctgtgcccacatcccaggcttcaccctgaatggttccatgcctgagggtggagactaagccctgtcgagacacttgccttcttcacccagctaatctgtagggctggacctatgtcctaaggacacactaatcgaactatgaactacaaagcttctatcccaggaggtggctatggccacccgttctgctggcctggatctccccactctaggggtcaggctccattaggatttgccccttcccatctcttcctacccaaccactcaaattaatctttctttacctgagaccagttgggagcactggagtgcagggaggagaggggaagggccagtctgggctgccgggttctagtctcctttgcactgagggccacactattaccatgagaagagggcctgtgggagcctgcaaactcactgctcaagaagacatggagactcctgccctgttgtgtatagatgcaagatatttatatatatttttggttgtcaatattaaatacagacactaagttatagtatatctggacaagccaacttgtaaatacaccacctcactcctgttacttacctaaacagatataaatggctggtttttagaaacatggttttgaaatgcttgtggattgagggtaggaggtttggatgggagtgagacagaagtaagtggggttgcaaccactgcaacggcttagacttcgactcaggatccagtcccttacacgtacctctcatcagtgtcctcttgctcaaaaatctgtttgatccctgttacccagagaatatatacattctttatcttgacattcaaggcatttctatcacatatttgatagttggtgttcaaaaaaacactagttttgtgccagccgtgatgctcaggcttgaaatcgcattattttgaatgtgaagggaa

SEQ ID NO: 1419 - DNA, 3028 bp, Homo sapiens
gcaaccgcgagcgtgccggtcgctagtcgcgggggtcggagtcagagtcgcagtgggagtccccggaccggagcacgagcctgagcgggagagcgccgctcgcacgcccgtcgccacccgcgtacccggcgcagccagagccaccagcgcagcgctgccatggagcccagcagcaagaagctgacgggtcgcctcatgctggccgtgggaggagcagtgcttggctccctgcagtttggctacaacactggagtcatcaatgccccccagaaggtgatcgaggagttctacaaccagacatgggtccaccgctatggggagagcatcctgcccaccacgctcaccacgctctggtccctctcagtggccatcttttctgttgggggcatgattggctccttctctgtgggccttttcgttaaccgctttggccggcggaattcaatgctgatgatgaacctgctggccttcgtgtccgccgtgctcatgggcttctcgaaactgggcaagtcctttgagatgctgatcctgggccgcttcatcatcggtgtgtactgcggcctgaccacaggcttcgtgcccatgtatgtgggtgaagtgtcacccacagcccttcgtggggccctgggcaccctgcaccagctgggcatcgtcgtcggcatcctcatcgcccaggtgttcggcctggactccatcatgggcaacaaggacctgtggcccctgctgctgagcatcatcttcatcccggccctgctgcagtgcatcgtgctgcccttctgccccgagagtccccgcttcctgctcatcaaccgcaacgaggagaaccgggccaagagtgtgctaaagaagctgcgcgggacagctgacgtgacccatgacctgcaggagatgaaggaagagagtcggcagatgatgcgggagaagaaggtcaccatcctggagctgttccgctcccccgcctaccgccagcccatcctcatcgctgtggtgctgcagctgtcccagcagctgtctggcatcaacgctgtcttctattactccacgagcatcttcgagaaggcgggggtgcagcagcctgtgtatgccaccattggctccggtatcgtcaacacggccttcactgtcgtgtcgctgtttgtggtggagcgagcaggccggcggaccctgcacctcataggcctcgctggcatggcgggttgtgccatactcatgaccatcgcgctagcactgctggagcagctaccctggatgtcctatctgagcatcgtggccatctttggctttgtggccttctttgaagtgggtcctggccccatcccatggttcatcgtggctgaactcttcagccagggtccacgtccagctgccattgccgttgcaggcttctccaactggacctcaaatttcattgtgggcatgtgcttccagtatgtggagcaactgtgtggtccctacgtcttcatcatcttcactgtgctcctggttctgttcttcatcttcacctacttcaaagttcctgagactaaaggccggaccttcgatgagatcgcttccggcttccggcaggggggagccagccaaagtgacaagacacccgaggagctgttccatcccctgggggctgattcccaagtgtgagtcgccccagatcaccagcccggcctgctcccagcagccctaaggatctctcaggagcacaggcagctggatgagacttccaaacctgacagatgtcagccgagccgggcctggggctcctttctccagccagcaatgatgtccagaagaatattcaggacttaacggctccaggattttaacaaaagcaagactgttgctcaaatctattcagacaagcaacaggttttataatttttttattactgattttgttatttttatatcagcctgagtctcctgtgcccacatcccaggcttcaccctgaatggttccatgcctgagggtggagactaagccctgtcgagacacttgccttcttcacccagctaatctgtagggctggacctatgtcctaaggacacactaatcgaactatgaactacaaagcttctatcccaggaggtggctatggccacccgttctgctggcctggatctccccactctaggggtcaggctccattaggatttgccccttcccatctcttcctacccaaccactcaaattaatctttctttacctgagaccagttgggagcactggagtgcagggaggagaggggaagggccagtctgggctgccgggttctagtctcctttgcactgagggccacactattaccatgagaagagggcctgtgggagcctgcaaactcactgctcaagaagacatggagactcctgccctgttgtgtatagatgcaagatatttatatatatttttggttgtcaatattaaatacagacactaagttatagtatatctggacaagccaacttgtaaatacaccacctcactcctgttacttacctaaacagatataaatggctggtttttagaaacatggttttgaaatgcttgtggattgagggtaggaggtttggatgggagtgagacagaagtaagtggggttgcaaccactgcaacggcttagacttcgactcaggatccagtcccttacacgtacctctcatcagtgtcctcttgctcaaaaatctgtttgatccctgttacccagagaatatatacattctttatcttgacattcaaggcatttctatcacatatttgatagttggtgttcaaaaaaacactagttttgtgccagccgtgatgctcaggcttgaaatgcattattttgaatgtgaagtaaatactgtacctttattggacaggctcaaagaggttatgtgcctgaagtcgcacagtgaataagctaaaacacctgcttttaacaatggtaccatacaaccactactccattaactccacccacctcctgcacccctccccacacacacaaaatgaaccacgttctttgtatgggcccaatgagctgtcaagctg

SEQ ID NO: 1420 - DNA, 3028 bp, Homo sapiens; identical to SEQ ID NO: 1419

SEQ ID NO: 1421 - DNA, 4673 bp, Homo sapiens
ctacctcttcctctccacgcggttgagaagaccggtcggcctgggcaacctgcgctgaagatgccgggaaaactccgtagtgacgctggtttggaatcagacaccgcaatgaaaaaaggggagacactgcgaaagcaaaccgaggagaaagagaaaaaagagaagccaaaatctgataagactgaagagatagcagaagaggaagaaactgttttccccaaagctaaacaagttaaaaagaaagcagagccttctgaagttgacatgaattctcctaaatccaaaaaggcaaaaaagaaagaggagccatctcaaaatgacatttctcctaaaaccaaaagtttgagaaagaaaaaggagcccattgaaaagaaagtggtttcttctaaaaccaaaaaagtgacaaaaaatgaggagccttctgaggaagaaatagatgctcctaagcccaagaagatgaagaaagaaaaggaaatgaatggagaaactagagagaaaagccccaaactgaagaatggatttcctcatcctgaaccggactgtaaccccagtgaagctgccagtgaagaaagtaacagtgagatagagcaggaaatacctgtggaacaaaaagaaggcgctttctctaattttcccatatctgaagaaactattaaacttctcaaaggccgaggagtgaccttcctatttcctatacaagcaaagacattccatcatgtttacagcgggaaggacttaattgcacaggcacggacaggaactgggaagacattctcctttgccatccctttgattgagaaacttcatggggaactgcaagacaggaagagaggccgtgcccctcaggtactggttcttgcacctacaagagagttggcaaatcaagtaagcaaagacttcagtgacatcacaaaaaagctgtcagtggcttgtttttatggtggaactccctatggaggtcaatttgaacgcatgaggaatgggattgatatcctggttggaacaccaggtcgtatcaaagaccacatacagaatggcaaactagatctcaccaaacttaagcatgttgtcctggatgaagtggaccagatgttggatatgggatttgctgatcaagtggaagagattttaagtgtggcatacaagaaagattctgaagacaatccccaaacattgcttttttctgcaacttgccctcattgggtatttaatgttgccaagaaatacatgaaatctacatatgaacaggtggacctgattggtaaaaagactcagaaaacggcaataactgtggagcatctggctattaagtgccactggactcagagggcagcagttattggggatgtcatccgagtatatagtggtcatcaaggacgcactatcatcttttgtgaaaccaagaaagaagcccaggagctgtcccagaattcagctataaagcaggatgctcagtccttgcatggagacattccacagaagcaaagggaaatcaccctgaaaggttttagaaatggtagttttggagttttggtggcaaccaatgttgctgcacgtgggttagacatccctgaggttgatttggttatacaaagctctccaccaaaggatgtagagtcctacattcatcgatccgggcggacaggcagagctggaaggacgggggtgtgcatctgcttttatcagcacaaggaagaatatcagttagtacaagtggagcaaaaagcgggaattaagttcaaacgaataggtgttccttctgcaacagaaataataaaagcttccagcaaagatgccatcaggcttttggattccgtgcctcccactgccattagtcacttcaaacaatcagctgagaagctgatagaggagaagggagctgtggaagctctggcagcagcactggcccatatttcaggtgccacgtccgtagaccagcgctccttgatcaactcaaatgtgggttttgtgaccatgatcttgcagtgctcaattgaaatgccaaatattagttatgcttggaaagaacttaaagagcagctgggcgaggagattgattccaaagtgaagggaatggtttttctcaaaggaaagctgggtgtttgctttgatgtacctaccgcatcagtaacagaaatacaggagaaatggcatgattcacgacgctggcagctctctgtggccacagagcaaccagaactggaaggaccacgggaaggatatggaggcttcaggggacagcgggaaggcagtcgaggcttcaggggacagcgggacggaaacagaagattcagaggacagcgggaaggcagtagaggcccgagaggacagcgatcaggaggtggcaacaaaagtaacagatcccaaaacaaaggccagaagcggagtttcagtaaagcatttggtcaataattagaaatagaagatttatatagcaaaaagagaatgatgtttggcaatatagaactgaacattatttttcatgcaaagttaaaagcacattgtgcctccttttgaccacttgccaagtccctgtctctttcagacacagacaagcttcatttaaattatttcatctgatcattatcatttataactttattgttacttcttcatcagtttttccttttgaaaggtgtatgaattcattacatttttattctaatgtattatctgtagattagaagataaaatcaagcatgtatctgcctatactttgtgagttcacctgtctttatactcaaaagtgtcccttaatagtgtccttccctgaaataaatacctaagggagtgtaacagtctctggaggaccactttgagcctttggaagttaaggtttcctcagccacctgccgaacagtttctcatgtggtcctattatttgtctactgagacttaatactgagcaatgttttgaaacaagatttcaaactaatctgggttgtaatacagtttataccagtgtatgctctagacttggaagatgtagtatgtttgatgtggattacctatacttatgttcgttttgatacatttttagcttctcattataaggtgattcatgctttagtgaattcttcatagatagtatatataaaagtacattttaatagaaagccagggttttaaggaatttcacatgtataaggtggctccatagctttatttgtaagtaggctggataaatggtgcttaaatggtaatgtactccacttcttcctattggaagattaacattatttaccaagaaggacttaagggagtaaggggcgcagattagcattgctcaagagtatgtaaaaaaaaaaaaaaaaaaaaagaaccaaaccactggaaataatcaaatgcaaaaaggtaacaaattcataactggaaagcaaagagaagaacaagtatgatttggatgataaagcattgttttaatggtgaaaacttcacagatcactaatgtttctagaggttaacttcaagtgggcaagctggggtttttaggtagtcagtggcctagttcctaaagccacagtataggatctgttaaactgaatgtctgttgaaagtttgttttagctgcttggaggcttccttttaagacaaactgtatgtgattaagttgttttgagggaactgaagaacctgatgtagcccctggccagataactgcctgatttctcagatattatttctctgggaaacattctacatagcacaggagcttaagagtggcattatcttctcgccttaatttccagagattatttctgtactgagaatcctggaactactatgctaggaaatttaaagctgcatggtctgtcttgttttcatttaattattgtgaatacctagaatctttcttggtcctgatttctcttgcttaatccagtctttatctctaactgccccttatttgatcaccatgtactaggagctctgatagccagctcagctcctaatccttgaggcaacattctttttctatttgaacttcagttctgtccttgaatcccgactagatatttcttgccctctggtctcagaattctcttggcttttattccttgatccacttgccagttttatcactttacccttgttcctcatggcttcccatcaagccatgggtattaggtgacagtgtaatttattagattctggttttgcccaaatactgggcatgctttaataataactgaaccatttcattatttggataggcatgggtaccttatcaagcagattaaaaggatatggtacccgtcctttagaaaagaacagctaaaaccttgttgtggattatggatttagcctaaagaaaaataatctggcataaattaagagtaagagagaagattaatagaaatttcacttcacataacttaaaacatggctatttcaataaaggactaaagtttctcctggatcccagaattcaacctgtatttataaatgtataatgtatttagctactttttggtttaaatgaacttgttgggttagcttggtaaatgttataatttttactattttctacaaagaaaatattttctaatttaagttggagctatctgtgcagcagtttctctacagttgtgcataaatgtttttactataaaatgagctaatgtataaaatactgctgtataccataataaagatagtaatacttgatttta

SEQ ID NO: 1422 - DNA, 4673 bp, Homo sapiens; identical to SEQ ID NO: 1421

SEQ ID NO: 1423 - DNA, 3191 bp, Homo sapiens
gctcgggccacgcccacctgtcctgcagcactggatgctttgtgagttggggattgttgcgtcccatatctggacccagaagggacttccctgctcggctggctctcggtttctctgctttcctccggagaaataacagcgtcttccgcgccgcgcatggagcctcccggccgccgcgagtgtccctttccttcctggcgctttcctgggttgcttctggcggccatggtgttgctgctgtactccttctccgatgcctgtgaggagccaccaacatttgaagctatggagctcattggtaaaccaaaaccctactatgagattggtgaacgagtagattataagtgtaaaaaaggatacttctatatacctcctcttgccacccatactatttgtgatcggaatcatacatggctacctgtctcagatgacgcctgttatagagaaacatgtccatatatacgggatcctttaaatggccaagcagtccctgcaaatgggacttacgagtttggttatcagatgcactttatttgtaatgagggttattacttaattggtgaagaaattctatattgtgaacttaaaggatcagtagcaatttggagcggtaagcccccaatatgtgaaaaggttttgtgtacaccacctccaaaaataaaaaatggaaaacacacctttagtgaagtagaagtatttgagtatcttgatgcagtaacttatagttgtgatcctgcacctggaccagatccattttcacttattggagagagcacgatttattgtggtgacaattcagtgtggagtcgtgctgctccagagtgtaaagtggtcaaatgtcgatttccagtagtcgaaaatggaaaacagatatcaggatttggaaaaaaattttactacaaagcaacagttatgtttgaatgcgataagggtttttacctcgatggcagcgacacaattgtctgtgacagtaacagtacttgggatcccccagttccaaagtgtcttaaagtgtcgacttcttccactacaaaatctccagcgtccagtgcctcaggatatcctaaacctgaggaaggaatacttgacagtttggatgtttgggtcattgctgtgattgttattgccatagttgttggagttgcagtaatttgtgttgtcccgtacagatatcttcaaaggaggaagaagaaagggaaagcagatggtggagctgaatatgccacttaccagactaaatcaaccactccagcagagcagagaggctgaatagattccacaacctggtttgccagttcatcttttgactctattaaaatcttcaatagttgttattctgtagtttcactctcatgagtgcaactgtggcttagctaatattgcaatgtggcttgaatgtaggtagcatcctttgatgcttctttgaaacttgtatgaatttgggtatgaacagattgcctgctttcccttaaataacacttagatttattggaccagtcagcacagcatgcctggttgtattaaagcagggatatgctgtattttataaaattggcaaaattagagaaatatagttcacaatgaaattatattttctttgtaaagaaagtggcttgaaatcttttttgttcaaagattaatgccaactcttaagattattctttcaccaactatagaatgtattttatatatcgttcattgtaaaaagcccttaaaaatatgtgtatactactttggctcttgtgcataaaaacaagaacactgaaaattgggaatatgcacaaacttggcttctttaaccaagaatattattggaaaattctctaaaagttaatagggtaaattctctattttttgtaatgtgttcggtgatttcagaaagctagaaagtgtatgtgtggcatttgttttcactttttaaaacatccctaactgatcgaatatatcagtaatttcagaatcagatgcatcctttcataagaagtgagaggactctgacagccataacaggagtgccacttcatggtgcgaagtgaacactgtagtcttgttgttttcccaaagagaactccgtatgttctcttaggttgagtaacccactctgaattctggttacatgtgtttttctctccctccttaaataaagagaggggttaaacatgccctctaaaagtaggtggttttgaagagaataaattcatcagataacctcaagtcacatgagaatcttagtccatttacattgccttggctagtaaaagccatctatgtatatgtcttacctcatctcctaaaaggcagagtacaaagtaagccatgtatctcaggaaggtaacttcattttgtctatttgctgttgattgtaccaagggatggaagaagtaaatatagctcaggtagcactttatactcaggcagatctcagccctctactgagtcccttagccaagcagtttctttcaaagaagccagcaggcgaaaagcagggactgccactgcatttcatatcacactgttaaaagttgtgttttgaaattttatgtttagttgcacaaattgggccaaagaaacattgccttgaggaagatatgattggaaaatcaagagtgtagaagaataaatactgttttactgtccaaagacatgtttatagtgctctgtaaatgttcctttcctttgtagtctctggcaagatgctttaggaagataaaagtttgaggagaacaaacaggaattctgaattaagcacagagttgaagtttatacccgtttcacatgcttttcaagaatgtcgcaattactaagaagcagataatggtgttttttagaaacctaattgaagtatattcaaccaaatactttaatgtataaaataaatattatacaatatacttgtatagcagtttctgcttcacatttgattttttcaaatttaatatttatattagagatctatatatgtataaatatgtattttgtcaaatttgttacttaaatatatagagaccagttttctctggaagtttgtttaaatgacagaagcgtatatgaattcaagaaaatttaagctgcaaaaatgtatttgctataaaatgagaagtctcactgatagaggttctttattgctcattttttaaaaaatggactcttgaaatctgttaaaataaaattgtacatttggagatgtttca

SEQ ID NO: 1424 - DNA, 3328 bp, Homo sapiens
cggctcgggccacgcccacctgtcctgcagcactggatgctttgtgagttggggattgttgcgtcccatatctggacccagaagggacttccctgctcggctggctctcggtttctctgctttcctccggagaaataacagcgtcttccgcgccgcgcatggagcctcccggccgccgcgagtgtccctttccttcctggcgctttcctgggttgcttctggcggccatggtgttgctgctgtactccttctccgatgcctgtgaggagccaccaacatttgaagctatggagctcattggtaaaccaaaaccctactatgagattggtgaacgagtagattataagtgtaaaaaaggatacttctatatacctcctcttgccacccatactatttgtgatcggaatcatacatggctacctgtctcagatgacgcctgttatagagaaacatgtccatatatacgggatcctttaaatggccaagcagtccctgcaaatgggacttacgagtttggttatcagatgcactttatttgtaatgagggttattacttaattggtgaagaaattctatattgtgaacttaaaggatcagtagcaatttggagcggtaagcccccaatatgtgaaaaggttttgtgtacaccacctccaaaaataaaaaatggaaaacacacctttagtgaagtagaagtatttgagtatcttgatgcagtaacttatagttgtgatcctgcacctggaccagatccattttcacttattggagagagcacgatttattgtggtgacaattcagtgtggagtcgtgctgctccagagtgtaaagtggtcaaatgtcgatttccagtagtcgaaaatggaaaacagatatcaggatttggaaaaaaattttactacaaagcaacagttatgtttgaatgcgataagggtttttacctcgatggcagcgacacaattgtctgtgacagtaacagtacttgggatcccccagttccaaagtgtcttaaagtgtcgacttcttccactacaaaatctccagcgtccagtgcctcaggtcctaggcctacttacaagcctccagtctcaaattatccaggatatcctaaacctgaggaaggaatacttgacagtttggatgtttgggtcattgctgtgattgttattgccatagttgttggagttgcagtaatttgtgttgtcccgtacagatatcttcaaaggaggaagaagaaaggcacatacctaactgatgagacccacagagaagtaaaatttacttctctctgagaaggagagatgagagaaaggtttgcttttatcattaaaaggaaagcagatggtggagctgaatatgccacttaccagactaaatcaaccactccagcagagcagagaggctgaatagattccacaacctggtttgccagttcatcttttgactctattaaaatcttcaatagttgttattctgtagtttcactctcatgagtgcaactgtggcttagctaatattgcaatgtggcttgaatgtaggtagcatcctttgatgcttctttgaaacttgtatgaatttgggtatgaacagattgcctgctttcccttaaataacacttagatttattggaccagtcagcacagcatgcctggttgtattaaagcagggatatgctgtattttataaaattggcaaaattagagaaatatagttcacaatgaaattatattttctttgtaaagaaagtggcttgaaatcttttttgttcaaagattaatgccaactcttaagattattctttcaccaactatagaatgtattttatatatcgttcattgtaaaaagcccttaaaaatatgtgtatactactttggctcttgtgcataaaaacaagaacactgaaaattgggaatatgcacaaacttggcttctttaaccaagaatattattggaaaattctctaaaagttaatagggtaaattctctattttttgtaatgtgttcggtgatttcagaaagctagaaagtgtatgtgtggcatttgttttcactttttaaaacatccctaactgatcgaatatatcagtaatttcagaatcagatgcatcctttcataagaagtgagaggactctgacagccataacaggagtgccacttcatggtgcgaagtgaacactgtagtcttgttgttttcccaaagagaactccgtatgttctcttaggttgagtaacccactctgaattctggttacatgtgtttttctctccctccttaaataaagagaggggttaaacatgccctctaaaagtaggtggttttgaagagaataaattcatcagataacctcaagtcacatgagaatcttagtccatttacattgccttggctagtaaaagccatctatgtatatgtcttacctcatctcctaaaaggcagagtacaaagtaagccatgtatctcaggaaggtaacttcattttgtctatttgctgttgattgtaccaagggatggaagaagtaaatatagctcaggtagcactttatactcaggcagatctcagccctctactgagtcccttagccaagcagtttctttcaaagaagccagcaggcgaaaagcagggactgccactgcatttcatatcacactgttaaaagttgtgttttgaaattttatgtttagttgcacaaattgggccaaagaaacattgccttgaggaagatatgattggaaaatcaagagtgtagaagaataaatactgttttactgtccaaagacatgtttatagtgctctgtaaatgttcctttcctttgtagtctctggcaagatgctttaggaagataaaagtttgaggagaacaaacaggaattctgaattaagcacagagttgaagtttatacccgtttcacatgcttttcaagaatgtcgcaattactaagaagcagataatggtgttttttagaaacctaattgaagtatattcaaccaaatactttaatgtataaaataaatattatacaatatacttgtatagcagtttctgcttcacatttgattttttcaaatttaatatttatattagagatctatatatgtataaatatgtattttgtcaaatttgttacttaaatatatagagaccagttttctctggaagtttgtttaaatgacagaagcgtatatgaattcaagaaaatttaagctgcaaaaatgtatttgctataaaatgagaagtctcactgatagaggttctttattgctcattttttaaaaaatggactcttgaaatctgttaaaataaaattgtacatttggagatgtttca

SEQ ID NO: 1425 - DNA, 3328 bp, Homo sapiens; identical to SEQ ID NO: 1424

SEQ ID NO: 1426 - DNA, 3126 bp, Homo sapiens
cggctcgggccacgcccacctgtcctgcagcactggatgctttgtgagttggggattgttgcgtcccatatctggacccagaagggacttccctgctcggctggctctcggtttctctgctttcctccggagaaataacagcgtcttccgcgccgcgcatggagcctcccggccgccgcgagtgtccctttccttcctggcgctttcctgggttgcttctggcggccatggtgttgctgctgtactccttctccgatgcctgtgaggagccaccaacatttgaagctatggagctcattggtaaaccaaaaccctactatgagattggtgaacgagtagattataagtgtaaaaaaggatacttctatatacctcctcttgccacccatactatttgtgatcggaatcatacatggctacctgtctcagatgacgcctgttatagagaaacatgtccatatatacgggatcctttaaatggccaagcagtccctgcaaatgggacttacgagtttggttatcagatgcactttatttgtaatgagggttattacttaattggtgaagaaattctatattgtgaacttaaaggatcagtagcaatttggagcggtaagcccccaatatgtgaaaaggttttgtgtacaccacctccaaaaataaaaaatggaaaacacacctttagtgaagtagaagtatttgagtatcttgatgcagtaacttatagttgtgatcctgcacctggaccagatccattttcacttattggagagagcacgatttattgtggtgacaattcagtgtggagtcgtgctgctccagagtgtaaagtggtcaaatgtcgatttccagtagtcgaaaatggaaaacagatatcaggatttggaaaaaaattttactacaaagcaacagttatgtttgaatgcgataagggtttttacctcgatggcagcgacacaattgtctgtgacagtaacagtacttgggatcccccagttccaaagtgtcttaaaggtcctaggcctacttacaagcctccagtctcaaattatccaggatatcctaaacctgaggaaggaatacttgacagtttggatgtttgggtcattgctgtgattgttattgccataggaaagcagatggtggagctgaatatgccacttaccagactaaatcaaccactccagcagagcagagaggctgaatagattccacaacctggtttgccagttcatcttttgactctattaaaatcttcaatagttgttattctgtagtttcactctcatgagtgcaactgtggcttagctaatattgcaatgtggcttgaatgtaggtagcatcctttgatgcttctttgaaacttgtatgaatttgggtatgaacagattgcctgctttcccttaaataacacttagatttattggaccagtcagcacagcatgcctggttgtattaaagcagggatatgctgtattttataaaattggcaaaattagagaaatatagttcacaatgaaattatattttctttgtaaagaaagtggcttgaaatcttttttgttcaaagattaatgccaactcttaagattattctttcaccaactatagaatgtattttatatatcgttcattgtaaaaagcccttaaaaatatgtgtatactactttggctcttgtgcataaaaacaagaacactgaaaattgggaatatgcacaaacttggcttctttaaccaagaatattattggaaaattctctaaaagttaatagggtaaattctctattttttgtaatgtgttcggtgatttcagaaagctagaaagtgtatgtgtggcatttgttttcactttttaaaacatccctaactgatcgaatatatcagtaatttcagaatcagatgcatcctttcataagaagtgagaggactctgacagccataacaggagtgccacttcatggtgcgaagtgaacactgtagtcttgttgttttcccaaagagaactccgtatgttctcttaggttgagtaacccactctgaattctggttacatgtgtttttctctccctccttaaataaagagaggggttaaacatgccctctaaaagtaggtggttttgaagagaataaattcatcagataacctcaagtcacatgagaatcttagtccatttacattgccttggctagtaaaagccatctatgtatatgtcttacctcatctcctaaaaggcagagtacaaagtaagccatgtatctcaggaaggtaacttcattttgtctatttgctgttgattgtaccaagggatggaagaagtaaatatagctcaggtagcactttatactcaggcagatctcagccctctactgagtcccttagccaagcagtttctttcaaagaagccagcaggcgaaaagcagggactgccactgcatttcatatcacactgttaaaagttgtgttttgaaattttatgtttagttgcacaaattgggccaaagaaacattgccttgaggaagatatgattggaaaatcaagagtgtagaagaataaatactgttttactgtccaaagacatgtttatagtgctctgtaaatgttcctttcctttgtagtctctggcaagatgctttaggaagataaaagtttgaggagaacaaacaggaattctgaattaagcacagagttgaagtttatacccgtttcacatgcttttcaagaatgtcgcaattactaagaagcagataatggtgttttttagaaacctaattgaagtatattcaaccaaatactttaatgtataaaataaatattatacaatatacttgtatagcagtttctgcttcacatttgattttttcaaatttaatatttatattagagatctatatatgtataaatatgtattttgtcaaatttgttacttaaatatatagagaccagttttctctggaagtttgtttaaatgacagaagcgtatatgaattcaagaaaatttaagctgcaaaaatgtatttgctataaaatgagaagtctcactgatagaggttctttattgctcattttttaaaaaatggactcttgaaatctgttaaaataaaattgtacatttggagatgtttca

SEQ ID NO: 1427 - DNA, 3278 bp, Homo sapiens
gctcgggccacgcccacctgtcctgcagcactggatgctttgtgagttggggattgttgcgtcccatatctggacccagaagggacttccctgctcggctggctctcggtttctctgctttcctccggagaaataacagcgtcttccgcgccgcgcatggagcctcccggccgccgcgagtgtccctttccttcctggcgctttcctgggttgcttctggcggccatggtgttgctgctgtactccttctccgatgcctgtgaggagccaccaacatttgaagctatggagctcattggtaaaccaaaaccctactatgagattggtgaacgagtagattataagtgtaaaaaaggatacttctatatacctcctcttgccacccatactatttgtgatcggaatcatacatggctacctgtctcagatgacgcctgttatagagaaacatgtccatatatacgggatcctttaaatggccaagcagtccctgcaaatgggacttacgagtttggttatcagatgcactttatttgtaatgagggttattacttaattggtgaagaaattctatattgtgaacttaaaggatcagtagcaatttggagcggtaagcccccaatatgtgaaaaggttttgtgtacaccacctccaaaaataaaaaatggaaaacacacctttagtgaagtagaagtatttgagtatcttgatgcagtaacttatagttgtgatcctgcacctggaccagatccattttcacttattggagagagcacgatttattgtggtgacaattcagtgtggagtcgtgctgctccagagtgtaaagtggtcaaatgtcgatttccagtagtcgaaaatggaaaacagatatcaggatttggaaaaaaattttactacaaagcaacagttatgtttgaatgcgataagggtttttacctcgatggcagcgacacaattgtctgtgacagtaacagtacttgggatcccccagttccaaagtgtcttaaagtgctgcctccatctagtacaaaacctccagctttgagtcattcagtgtcgacttcttccactacaaaatctccagcgtccagtgcctcaggtcctaggcctacttacaagcctccagtctcaaattatccaggatatcctaaacctgaggaaggaatacttgacagtttggatgtttgggtcattgctgtgattgttattgccatagttgttggagttgcagtaatttgtgttgtcccgtacagatatcttcaaaggaggaagaagaaagggaaagcagatggtggagctgaatatgccacttaccagactaaatcaaccactccagcagagcagagaggctgaatagattccacaacctggtttgccagttcatcttttgactctattaaaatcttcaatagttgttattctgtagtttcactctcatgagtgcaactgtggcttagctaatattgcaatgtggcttgaatgtaggtagcatcctttgatgcttctttgaaacttgtatgaatttgggtatgaacagattgcctgctttcccttaaataacacttagatttattggaccagtcagcacagcatgcctggttgtattaaagcagggatatgctgtattttataaaattggcaaaattagagaaatatagttcacaatgaaattatattttctttgtaaagaaagtggcttgaaatcttttttgttcaaagattaatgccaactcttaagattattctttcaccaactatagaatgtattttatatatcgttcattgtaaaaagcccttaaaaatatgtgtatactactttggctcttgtgcataaaaacaagaacactgaaaattgggaatatgcacaaacttggcttctttaaccaagaatattattggaaaattctctaaaagttaatagggtaaattctctattttttgtaatgtgttcggtgatttcagaaagctagaaagtgtatgtgtggcatttgttttcactttttaaaacatccctaactgatcgaatatatcagtaatttcagaatcagatgcatcctttcataagaagtgagaggactctgacagccataacaggagtgccacttcatggtgcgaagtgaacactgtagtcttgttgttttcccaaagagaactccgtatgttctcttaggttgagtaacccactctgaattctggttacatgtgtttttctctccctccttaaataaagagaggggttaaacatgccctctaaaagtaggtggttttgaagagaataaattcatcagataacctcaagtcacatgagaatcttagtccatttacattgccttggctagtaaaagccatctatgtatatgtcttacctcatctcctaaaaggcagagtacaaagtaagccatgtatctcaggaaggtaacttcattttgtctatttgctgttgattgtaccaagggatggaagaagtaaatatagctcaggtagcactttatactcaggcagatctcagccctctactgagtcccttagccaagcagtttctttcaaagaagccagcaggcgaaaagcagggactgccactgcatttcatatcacactgttaaaagttgtgttttgaaattttatgtttagttgcacaaattgggccaaagaaacattgccttgaggaagatatgattggaaaatcaagagtgtagaagaataaatactgttttactgtccaaagacatgtttatagtgctctgtaaatgttcctttcctttgtagtctctggcaagatgctttaggaagataaaagtttgaggagaacaaacaggaattctgaattaagcacagagttgaagtttatacccgtttcacatgcttttcaagaatgtcgcaattactaagaagcagataatggtgttttttagaaacctaattgaagtatattcaaccaaatactttaatgtataaaataaatattatacaatatacttgtatagcagtttctgcttcacatttgattttttcaaatttaatatttatattagagatctatatatgtataaatatgtattttgtcaaatttgttacttaaatatatagagaccagttttctctggaagtttgtttaaatgacagaagcgtatatgaattcaagaaaatttaagctgcaaaaatgtatttgctataaaatgagaagtctcactgatagaggttctttattgctcattttttaaaaaatggactcttgaaatctgttaaaataaaattgtacatttggagatgtttca

SEQ ID NO: 1428 - DNA, 3199 bp, Homo sapiens
cggctcgggccacgcccacctgtcctgcagcactggatgctttgtgagttggggattgttgcgtcccatatctggacccagaagggacttccctgctcggctggctctcggtttctctgctttcctccggagaaataacagcgtcttccgcgccgcgcatggagcctcccggccgccgcgagtgtccctttccttcctggcgctttcctgggttgcttctggcggccatggtgttgctgctgtactccttctccgatgcctgtgaggagccaccaacatttgaagctatggagctcattggtaaaccaaaaccctactatgagattggtgaacgagtagattataagtgtaaaaaaggatacttctatatacctcctcttgccacccatactatttgtgatcggaatcatacatggctacctgtctcagatgacgcctgttatagagaaacatgtccatatatacgggatcctttaaatggccaagcagtccctgcaaatgggacttacgagtttggttatcagatgcactttatttgtaatgagggttattacttaattggtgaagaaattctatattgtgaacttaaaggatcagtagcaatttggagcggtaagcccccaatatgtgaaaaggttttgtgtacaccacctccaaaaataaaaaatggaaaacacacctttagtgaagtagaagtatttgagtatcttgatgcagtaacttatagttgtgatcctgcacctggaccagatccattttcacttattggagagagcacgatttattgtggtgacaattcagtgtggagtcgtgctgctccagagtgtaaagtggtcaaatgtcgatttccagtagtcgaaaatggaaaacagatatcaggatttggaaaaaaattttactacaaagcaacagttatgtttgaatgcgataagggtttttacctcgatggcagcgacacaattgtctgtgacagtaacagtacttgggatcccccagttccaaagtgtcttaaaggtcctaggcctacttacaagcctccagtctcaaattatccaggatatcctaaacctgaggaaggaatacttgacagtttggatgtttgggtcattgctgtgattgttattgccatagttgttggagttgcagtaatttgtgttgtcccgtacagatatcttcaaaggaggaagaagaaagggaaagcagatggtggagctgaatatgccacttaccagactaaatcaaccactccagcagagcagagaggctgaatagattccacaacctggtttgccagttcatcttttgactctattaaaatcttcaatagttgttattctgtagtttcactctcatgagtgcaactgtggcttagctaatattgcaatgtggcttgaatgtaggtagcatcctttgatgcttctttgaaacttgtatgaatttgggtatgaacagattgcctgctttcccttaaataacacttagatttattggaccagtcagcacagcatgcctggttgtattaaagcagggatatgctgtattttataaaattggcaaaattagagaaatatagttcacaatgaaattatattttctttgtaaagaaagtggcttgaaatcttttttgttcaaagattaatgccaactcttaagattattctttcaccaactatagaatgtattttatatatcgttcattgtaaaaagcccttaaaaatatgtgtatactactttggctcttgtgcataaaaacaagaacactgaaaattgggaatatgcacaaacttggcttctttaaccaagaatattattggaaaattctctaaaagttaatagggtaaattctctattttttgtaatgtgttcggtgatttcagaaagctagaaagtgtatgtgtggcatttgttttcactttttaaaacatccctaactgatcgaatatatcagtaatttcagaatcagatgcatcctttcataagaagtgagaggactctgacagccataacaggagtgccacttcatggtgcgaagtgaacactgtagtcttgttgttttcccaaagagaactccgtatgttctcttaggttgagtaacccactctgaattctggttacatgtgtttttctctccctccttaaataaagagaggggttaaacatgccctctaaaagtaggtggttttgaagagaataaattcatcagataacctcaagtcacatgagaatcttagtccatttacattgccttggctagtaaaagccatctatgtatatgtcttacctcatctcctaaaaggcagagtacaaagtaagccatgtatctcaggaaggtaacttcattttgtctatttgctgttgattgtaccaagggatggaagaagtaaatatagctcaggtagcactttatactcaggcagatctcagccctctactgagtcccttagccaagcagtttctttcaaagaagccagcaggcgaaaagcagggactgccactgcatttcatatcacactgttaaaagttgtgttttgaaattttatgtttagttgcacaaattgggccaaagaaacattgccttgaggaagatatgattggaaaatcaagagtgtagaagaataaatactgttttactgtccaaagacatgtttatagtgctctgtaaatgttcctttcctttgtagtctctggcaagatgctttaggaagataaaagtttgaggagaacaaacaggaattctgaattaagcacagagttgaagtttatacccgtttcacatgcttttcaagaatgtcgcaattactaagaagcagataatggtgttttttagaaacctaattgaagtatattcaaccaaatactttaatgtataaaataaatattatacaatatacttgtatagcagtttctgcttcacatttgattttttcaaatttaatatttatattagagatctatatatgtataaatatgtattttgtcaaatttgttacttaaatatatagagaccagttttctctggaagtttgtttaaatgacagaagcgtatatgaattcaagaaaatttaagctgcaaaaatgtatttgctataaaatgagaagtctcactgatagaggttctttattgctcattttttaaaaaatggactcttgaaatctgttaaaataaaattgtacatttggagatgtttcatgatgatgt

SEQ ID NO: 1429 - DNA, 3239 bp, Homo sapiens
gctcgggccacgcccacctgtcctgcagcactggatgctttgtgagttggggattgttgcgtcccatatctggacccagaagggacttccctgctcggctggctctcggtttctctgctttcctccggagaaataacagcgtcttccgcgccgcgcatggagcctcccggccgccgcgagtgtccctttccttcctggcgctttcctgggttgcttctggcggccatggtgttgctgctgtactccttctccgatgcctgtgaggagccaccaacatttgaagctatggagctcattggtaaaccaaaaccctactatgagattggtgaacgagtagattataagtgtaaaaaaggatacttctatatacctcctcttgccacccatactatttgtgatcggaatcatacatggctacctgtctcagatgacgcctgttatagagaaacatgtccatatatacgggatcctttaaatggccaagcagtccctgcaaatgggacttacgagtttggttatcagatgcactttatttgtaatgagggttattacttaattggtgaagaaattctatattgtgaacttaaaggatcagtagcaatttggagcggtaagcccccaatatgtgaaaaggttttgtgtacaccacctccaaaaataaaaaatggaaaacacacctttagtgaagtagaagtatttgagtatcttgatgcagtaacttatagttgtgatcctgcacctggaccagatccattttcacttattggagagagcacgatttattgtggtgacaattcagtgtggagtcgtgctgctccagagtgtaaagtggtcaaatgtcgatttccagtagtcgaaaatggaaaacagatatcaggatttggaaaaaaattttactacaaagcaacagttatgtttgaatgcgataagggtttttacctcgatggcagcgacacaattgtctgtgacagtaacagtacttgggatcccccagttccaaagtgtcttaaaggatatcctaaacctgaggaaggaatacttgacagtttggatgtttgggtcattgctgtgattgttattgccatagttgttggagttgcagtaatttgtgttgtcccgtacagatatcttcaaaggaggaagaagaaaggcacatacctaactgatgagacccacagagaagtaaaatttacttctctctgagaaggagagatgagagaaaggtttgcttttatcattaaaaggaaagcagatggtggagctgaatatgccacttaccagactaaatcaaccactccagcagagcagagaggctgaatagattccacaacctggtttgccagttcatcttttgactctattaaaatcttcaatagttgttattctgtagtttcactctcatgagtgcaactgtggcttagctaatattgcaatgtggcttgaatgtaggtagcatcctttgatgcttctttgaaacttgtatgaatttgggtatgaacagattgcctgctttcccttaaataacacttagatttattggaccagtcagcacagcatgcctggttgtattaaagcagggatatgctgtattttataaaattggcaaaattagagaaatatagttcacaatgaaattatattttctttgtaaagaaagtggcttgaaatcttttttgttcaaagattaatgccaactcttaagattattctttcaccaactatagaatgtattttatatatcgttcattgtaaaaagcccttaaaaatatgtgtatactactttggctcttgtgcataaaaacaagaacactgaaaattgggaatatgcacaaacttggcttctttaaccaagaatattattggaaaattctctaaaagttaatagggtaaattctctattttttgtaatgtgttcggtgatttcagaaagctagaaagtgtatgtgtggcatttgttttcactttttaaaacatccctaactgatcgaatatatcagtaatttcagaatcagatgcatcctttcataagaagtgagaggactctgacagccataacaggagtgccacttcatggtgcgaagtgaacactgtagtcttgttgttttcccaaagagaactccgtatgttctcttaggttgagtaacccactctgaattctggttacatgtgtttttctctccctccttaaataaagagaggggttaaacatgccctctaaaagtaggtggttttgaagagaataaattcatcagataacctcaagtcacatgagaatcttagtccatttacattgccttggctagtaaaagccatctatgtatatgtcttacctcatctcctaaaaggcagagtacaaagtaagccatgtatctcaggaaggtaacttcattttgtctatttgctgttgattgtaccaagggatggaagaagtaaatatagctcaggtagcactttatactcaggcagatctcagccctctactgagtcccttagccaagcagtttctttcaaagaagccagcaggcgaaaagcagggactgccactgcatttcatatcacactgttaaaagttgtgttttgaaattttatgtttagttgcacaaattgggccaaagaaacattgccttgaggaagatatgattggaaaatcaagagtgtagaagaataaatactgttttactgtccaaagacatgtttatagtgctctgtaaatgttcctttcctttgtagtctctggcaagatgctttaggaagataaaagtttgaggagaacaaacaggaattctgaattaagcacagagttgaagtttatacccgtttcacatgcttttcaagaatgtcgcaattactaagaagcagataatggtgttttttagaaacctaattgaagtatattcaaccaaatactttaatgtataaaataaatattatacaatatacttgtatagcagtttctgcttcacatttgattttttcaaatttaatatttatattagagatctatatatgtataaatatgtattttgtcaaatttgttacttaaatatatagagaccagttttctctggaagtttgtttaaatgacagaagcgtatatgaattcaagaaaatttaagctgcaaaaatgtatttgctataaaatgagaagtctcactgatagaggttctttattgctcattttttaaaaaatggactcttgaaatctgttaaaataaaattgtacatttggagatgtttca

SEQ ID NO: 1430 - DNA, 3328 bp, Homo sapiens; identical to SEQ ID NO: 1424

SEQ ID NO: 1431 - DNA, 3235 bp, Homo sapiens
cggctcgggccacgcccacctgtcctgcagcactggatgctttgtgagttggggattgttgcgtcccatatctggacccagaagggacttccctgctcggctggctctcggtttctctgctttcctccggagaaataacagcgtcttccgcgccgcgcatggagcctcccggccgccgcgagtgtccctttccttcctggcgctttcctgggttgcttctggcggccatggtgttgctgctgtactccttctccgatgcctgtgaggagccaccaacatttgaagctatggagctcattggtaaaccaaaaccctactatgagattggtgaacgagtagattataagtgtaaaaaaggatacttctatatacctcctcttgccacccatactatttgtgatcggaatcatacatggctacctgtctcagatgacgcctgttatagagaaacatgtccatatatacgggatcctttaaatggccaagcagtccctgcaaatgggacttacgagtttggttatcagatgcactttatttgtaatgagggttattacttaattggtgaagaaattctatattgtgaacttaaaggatcagtagcaatttggagcggtaagcccccaatatgtgaaaaggttttgtgtacaccacctccaaaaataaaaaatggaaaacacacctttagtgaagtagaagtatttgagtatcttgatgcagtaacttatagttgtgatcctgcacctggaccagatccattttcacttattggagagagcacgatttattgtggtgacaattcagtgtggagtcgtgctgctccagagtgtaaagtggtcaaatgtcgatttccagtagtcgaaaatggaaaacagatatcaggatttggaaaaaaattttactacaaagcaacagttatgtttgaatgcgataagggtttttacctcgatggcagcgacacaattgtctgtgacagtaacagtacttgggatcccccagttccaaagtgtcttaaagtgtcgacttcttccactacaaaatctccagcgtccagtgcctcaggtcctaggcctacttacaagcctccagtctcaaattatccaggatatcctaaacctgaggaaggaatacttgacagtttggatgtttgggtcattgctgtgattgttattgccatagttgttggagttgcagtaatttgtgttgtcccgtacagatatcttcaaaggaggaagaagaaagggaaagcagatggtggagctgaatatgccacttaccagactaaatcaaccactccagcagagcagagaggctgaatagattccacaacctggtttgccagttcatcttttgactctattaaaatcttcaatagttgttattctgtagtttcactctcatgagtgcaactgtggcttagctaatattgcaatgtggcttgaatgtaggtagcatcctttgatgcttctttgaaacttgtatgaatttgggtatgaacagattgcctgctttcccttaaataacacttagatttattggaccagtcagcacagcatgcctggttgtattaaagcagggatatgctgtattttataaaattggcaaaattagagaaatatagttcacaatgaaattatattttctttgtaaagaaagtggcttgaaatcttttttgttcaaagattaatgccaactcttaagattattctttcaccaactatagaatgtattttatatatcgttcattgtaaaaagcccttaaaaatatgtgtatactactttggctcttgtgcataaaaacaagaacactgaaaattgggaatatgcacaaacttggcttctttaaccaagaatattattggaaaattctctaaaagttaatagggtaaattctctattttttgtaatgtgttcggtgatttcagaaagctagaaagtgtatgtgtggcatttgttttcactttttaaaacatccctaactgatcgaatatatcagtaatttcagaatcagatgcatcctttcataagaagtgagaggactctgacagccataacaggagtgccacttcatggtgcgaagtgaacactgtagtcttgttgttttcccaaagagaactccgtatgttctcttaggttgagtaacccactctgaattctggttacatgtgtttttctctccctccttaaataaagagaggggttaaacatgccctctaaaagtaggtggttttgaagagaataaattcatcagataacctcaagtcacatgagaatcttagtccatttacattgccttggctagtaaaagccatctatgtatatgtcttacctcatctcctaaaaggcagagtacaaagtaagccatgtatctcaggaaggtaacttcattttgtctatttgctgttgattgtaccaagggatggaagaagtaaatatagctcaggtagcactttatactcaggcagatctcagccctctactgagtcccttagccaagcagtttctttcaaagaagccagcaggcgaaaagcagggactgccactgcatttcatatcacactgttaaaagttgtgttttgaaattttatgtttagttgcacaaattgggccaaagaaacattgccttgaggaagatatgattggaaaatcaagagtgtagaagaataaatactgttttactgtccaaagacatgtttatagtgctctgtaaatgttcctttcctttgtagtctctggcaagatgctttaggaagataaaagtttgaggagaacaaacaggaattctgaattaagcacagagttgaagtttatacccgtttcacatgcttttcaagaatgtcgcaattactaagaagcagataatggtgttttttagaaacctaattgaagtatattcaaccaaatactttaatgtataaaataaatattatacaatatacttgtatagcagtttctgcttcacatttgattttttcaaatttaatatttatattagagatctatatatgtataaatatgtattttgtcaaatttgttacttaaatatatagagaccagttttctctggaagtttgtttaaatgacagaagcgtatatgaattcaagaaaatttaagctgcaaaaatgtatttgctataaaatgagaagtctcactgatagaggttctttattgctcattttttaaaaaatggactcttgaaatctgttaaaataaaattgtacatttggagatgtttca

SEQ ID NO: 1432 - DNA, 3328 bp, Homo sapiens; identical to SEQ ID NO: 1424

SEQ ID NO: 1433 - DNA, 3235 bp, Homo sapiens; identical to SEQ ID NO: 1431

SEQ ID NO: 1434 - DNA, 3284 bp, Homo sapiens
gctcgggccacgcccacctgtcctgcagcactggatgctttgtgagttggggattgttgcgtcccatatctggacccagaagggacttccctgctcggctggctctcggtttctctgctttcctccggagaaataacagcgtcttccgcgccgcgcatggagcctcccggccgccgcgagtgtccctttccttcctggcgctttcctgggttgcttctggcggccatggtgttgctgctgtactccttctccgatgcctgtgaggagccaccaacatttgaagctatggagctcattggtaaaccaaaaccctactatgagattggtgaacgagtagattataagtgtaaaaaaggatacttctatatacctcctcttgccacccatactatttgtgatcggaatcatacatggctacctgtctcagatgacgcctgttatagagaaacatgtccatatatacgggatcctttaaatggccaagcagtccctgcaaatgggacttacgagtttggttatcagatgcactttatttgtaatgagggttattacttaattggtgaagaaattctatattgtgaacttaaaggatcagtagcaatttggagcggtaagcccccaatatgtgaaaaggttttgtgtacaccacctccaaaaataaaaaatggaaaacacacctttagtgaagtagaagtatttgagtatcttgatgcagtaacttatagttgtgatcctgcacctggaccagatccattttcacttattggagagagcacgatttattgtggtgacaattcagtgtggagtcgtgctgctccagagtgtaaagtggtcaaatgtcgatttccagtagtcgaaaatggaaaacagatatcaggatttggaaaaaaattttactacaaagcaacagttatgtttgaatgcgataagggtttttacctcgatggcagcgacacaattgtctgtgacagtaacagtacttgggatcccccagttccaaagtgtcttaaagtgtcgacttcttccactacaaaatctccagcgtccagtgcctcaggatatcctaaacctgaggaaggaatacttgacagtttggatgtttgggtcattgctgtgattgttattgccatagttgttggagttgcagtaatttgtgttgtcccgtacagatatcttcaaaggaggaagaagaaaggcacatacctaactgatgagacccacagagaagtaaaatttacttctctctgagaaggagagatgagagaaaggtttgcttttatcattaaaaggaaagcagatggtggagctgaatatgccacttaccagactaaatcaaccactccagcagagcagagaggctgaatagattccacaacctggtttgccagttcatcttttgactctattaaaatcttcaatagttgttattctgtagtttcactctcatgagtgcaactgtggcttagctaatattgcaatgtggcttgaatgtaggtagcatcctttgatgcttctttgaaacttgtatgaatttgggtatgaacagattgcctgctttcccttaaataacacttagatttattggaccagtcagcacagcatgcctggttgtattaaagcagggatatgctgtattttataaaattggcaaaattagagaaatatagttcacaatgaaattatattttctttgtaaagaaagtggcttgaaatcttttttgttcaaagattaatgccaactcttaagattattctttcaccaactatagaatgtattttatatatcgttcattgtaaaaagcccttaaaaatatgtgtatactactttggctcttgtgcataaaaacaagaacactgaaaattgggaatatgcacaaacttggcttctttaaccaagaatattattggaaaattctctaaaagttaatagggtaaattctctattttttgtaatgtgttcggtgatttcagaaagctagaaagtgtatgtgtggcatttgttttcactttttaaaacatccctaactgatcgaatatatcagtaatttcagaatcagatgcatcctttcataagaagtgagaggactctgacagccataacaggagtgccacttcatggtgcgaagtgaacactgtagtcttgttgttttcccaaagagaactccgtatgttctcttaggttgagtaacccactctgaattctggttacatgtgtttttctctccctccttaaataaagagaggggttaaacatgccctctaaaagtaggtggttttgaagagaataaattcatcagataacctcaagtcacatgagaatcttagtccatttacattgccttggctagtaaaagccatctatgtatatgtcttacctcatctcctaaaaggcagagtacaaagtaagccatgtatctcaggaaggtaacttcattttgtctatttgctgttgattgtaccaagggatggaagaagtaaatatagctcaggtagcactttatactcaggcagatctcagccctctactgagtcccttagccaagcagtttctttcaaagaagccagcaggcgaaaagcagggactgccactgcatttcatatcacactgttaaaagttgtgttttgaaattttatgtttagttgcacaaattgggccaaagaaacattgccttgaggaagatatgattggaaaatcaagagtgtagaagaataaatactgttttactgtccaaagacatgtttatagtgctctgtaaatgttcctttcctttgtagtctctggcaagatgctttaggaagataaaagtttgaggagaacaaacaggaattctgaattaagcacagagttgaagtttatacccgtttcacatgcttttcaagaatgtcgcaattactaagaagcagataatggtgttttttagaaacctaattgaagtatattcaaccaaatactttaatgtataaaataaatattatacaatatacttgtatagcagtttctgcttcacatttgattttttcaaatttaatatttatattagagatctatatatgtataaatatgtattttgtcaaatttgttacttaaatatatagagaccagttttctctggaagtttgtttaaatgacagaagcgtatatgaattcaagaaaatttaagctgcaaaaatgtatttgctataaaatgagaagtctcactgatagaggttctttattgctcattttttaaaaaatggactcttgaaatctgttaaaataaaattgtacatttggagatgtttca

SEQ ID NO: 1435 - DNA, 3199 bp, Homo sapiens; identical to SEQ ID NO: 1428

SEQ ID NO: 1436 - DNA, 3329 bp, Homo sapiens
gctcgggccacgcccacctgtcctgcagcactggatgctttgtgagttggggattgttgcgtcccatatctggacccagaagggacttccctgctcggctggctctcggtttctctgctttcctccggagaaataacagcgtcttccgcgccgcgcatggagcctcccggccgccgcgagtgtccctttccttcctggcgctttcctgggttgcttctggcggccatggtgttgctgctgtactccttctccgatgcctgtgaggagccaccaacatttgaagctatggagctcattggtaaaccaaaaccctactatgagattggtgaacgagtagattataagtgtaaaaaaggatacttctatatacctcctcttgccacccatactatttgtgatcggaatcatacatggctacctgtctcagatgacgcctgttatagagaaacatgtccatatatacgggatcctttaaatggccaagcagtccctgcaaatgggacttacgagtttggttatcagatgcactttatttgtaatgagggttattacttaattggtgaagaaattctatattgtgaacttaaaggatcagtagcaatttggagcggtaagcccccaatatgtgaaaaggttttgtgtacaccacctccaaaaataaaaaatggaaaacacacctttagtgaagtagaagtatttgagtatcttgatgcagtaacttatagttgtgatcctgcacctggaccagatccattttcacttattggagagagcacgatttattgtggtgacaattcagtgtggagtcgtgctgctccagagtgtaaagtggtcaaatgtcgatttccagtagtcgaaaatggaaaacagatatcaggatttggaaaaaaattttactacaaagcaacagttatgtttgaatgcgataagggtttttacctcgatggcagcgacacaattgtctgtgacagtaacagtacttgggatcccccagttccaaagtgtcttaaagtgctgcctccatctagtacaaaacctccagctttgagtcattcagtgtcgacttcttccactacaaaatctccagcgtccagtgcctcaggatatcctaaacctgaggaaggaatacttgacagtttggatgtttgggtcattgctgtgattgttattgccatagttgttggagttgcagtaatttgtgttgtcccgtacagatatcttcaaaggaggaagaagaaaggcacatacctaactgatgagacccacagagaagtaaaatttacttctctctgagaaggagagatgagagaaaggtttgcttttatcattaaaaggaaagcagatggtggagctgaatatgccacttaccagactaaatcaaccactccagcagagcagagaggctgaatagattccacaacctggtttgccagttcatcttttgactctattaaaatcttcaatagttgttattctgtagtttcactctcatgagtgcaactgtggcttagctaatattgcaatgtggcttgaatgtaggtagcatcctttgatgcttctttgaaacttgtatgaatttgggtatgaacagattgcctgctttcccttaaataacacttagatttattggaccagtcagcacagcatgcctggttgtattaaagcagggatatgctgtattttataaaattggcaaaattagagaaatatagttcacaatgaaattatattttctttgtaaagaaagtggcttgaaatcttttttgttcaaagattaatgccaactcttaagattattctttcaccaactatagaatgtattttatatatcgttcattgtaaaaagcccttaaaaatatgtgtatactactttggctcttgtgcataaaaacaagaacactgaaaattgggaatatgcacaaacttggcttctttaaccaagaatattattggaaaattctctaaaagttaatagggtaaattctctattttttgtaatgtgttcggtgatttcagaaagctagaaagtgtatgtgtggcatttgttttcactttttaaaacatccctaactgatcgaatatatcagtaatttcagaatcagatgcatcctttcataagaagtgagaggactctgacagccataacaggagtgccacttcatggtgcgaagtgaacactgtagtcttgttgttttcccaaagagaactccgtatgttctcttaggttgagtaacccactctgaattctggttacatgtgtttttctctccctccttaaataaagagaggggttaaacatgccctctaaaagtaggtggttttgaagagaataaattcatcagataacctcaagtcacatgagaatcttagtccatttacattgccttggctagtaaaagccatctatgtatatgtcttacctcatctcctaaaaggcagagtacaaagtaagccatgtatctcaggaaggtaacttcattttgtctatttgctgttgattgtaccaagggatggaagaagtaaatatagctcaggtagcactttatactcaggcagatctcagccctctactgagtcccttagccaagcagtttctttcaaagaagccagcaggcgaaaagcagggactgccactgcatttcatatcacactgttaaaagttgtgttttgaaattttatgtttagttgcacaaattgggccaaagaaacattgccttgaggaagatatgattggaaaatcaagagtgtagaagaataaatactgttttactgtccaaagacatgtttatagtgctctgtaaatgttcctttcctttgtagtctctggcaagatgctttaggaagataaaagtttgaggagaacaaacaggaattctgaattaagcacagagttgaagtttatacccgtttcacatgcttttcaagaatgtcgcaattactaagaagcagataatggtgttttttagaaacctaattgaagtatattcaaccaaatactttaatgtataaaataaatattatacaatatacttgtatagcagtttctgcttcacatttgattttttcaaatttaatatttatattagagatctatatatgtataaatatgtattttgtcaaatttgttacttaaatatatagagaccagttttctctggaagtttgtttaaatgacagaagcgtatatgaattcaagaaaatttaagctgcaaaaatgtatttgctataaaatgagaagtctcactgatagaggttctttattgctcattttttaaaaaatggactcttgaaatctgttaaaataaaattgtacatttggagatgtttca

SEQ ID NO: 1437 - DNA, 2124 bp, Homo sapiens
gaattcggggataacagcgtcttccgcgccgcgcatggagcctcccggccgccgcgagtgtccctttccttcctggcgctttcctgggttgcttctggcggccatggtgttgctgctgtactccttctccgatgcctgtgaggagccaccaacatttgaagctatggagctcattggtaaaccaaaaccctactatgagattggtgaacgagtagattataagtgtaaaaaaggatacttctatatacctcctcttgccacccatactatttgtgatcggaatcatacatggctacctgtctcagatgacgcctgttatagagaaacatgtccatatatacgggatcctttaaatggccaagcagtccctgcaaatgggacttacgagtttggttatcagatgcactttatttgtaatgagggttattacttaattggtgaagaaattctatattgtgaacttaaaggatcagtagcaatttggagcggtaagcccccaatatgtgaaaaggttttgtgtacaccacctccaaaaataaaaaatggaaaacacacctttagtgaagtagaagtatttgagtatcttgatgcagtaacttatagttgtgatcctgcacctggaccagatccattttcacttattggagagagcacgatttattgtggtgacaattcagtgtggagtcgtgctgctccagagtgtaaagtggtcaaatgtcgatttccagtagtcgaaaatggaaaacagatatcaggatttggaaaaaaattttactacaaagcaacagttatgtttgaatgcgataagggtttttacctcgatggcagcgacacaattgtctgtgacagtaacagtacttgggatcccccagttccaaagtgtcttaaagtgtcgacttcttccactacaaaatctccagcgtccagtgcctcaggtcctaggcctacttacaagcctccagtctcaaattatccaggatatcctaaacctgaggaaggaatacttgacagtttggatgtttgggtcattgctgtgattgttattgccatagttgttggagttgcagtaatttgtgttgtcccgtacagatatcttcaaaggaggaagaagaaaggcacatacctaactgatgagacccacagagaagtaaaatttacttctctctgagaaggagagatgagagaaaggtttgcttttatcattaaaaggaaagcagatggtggagctgaatatgccacttaccagactaaatcaaccactccagcagagcagagaggctgaatagattccacaacctggtttgccagttcatcttttgactctattaaaatcttcaatagttgttattctgtagtttcactctcatgagtgcaactgtggcttagctaatattgcaatgtggcttgaatgtaggtagcatcctttgatgcttctttgaaacttgtatgaatttgggtatgaacagattgcctgctttcccttaaataacacttagatttattggaccagtcagcacagcatgcctggttgtattaaagcagggatatgctgtattttataaaattggcaaaattagagaaatatagttcacaatgaaattatattttctttgtaaagaaagtggcttgaaatcttttttgttcaaagattaatgccaactcttaagattattctttcaccaactatagaatgtattttatatatcgttcattgtaaaaagcccttaaaaatatgtgtatactactttggctcttgtgcataaaaacaagaacactgaaaattgggaatatgcacaaacttggcttctttaaccaagaatattattggaaaattctctaaaagtaaagggtaaattctctattttttgtaatgtgttcggtgatttcagaaagctagaaagtgtatgtgtggcatttgttttcactttttaaaacatccctaactgatcgaatatatcagtaatttcagaatcagatgcatcctttcataagaagtgagaggactctgacagccataacaggagtgccacttcatggtgcgaagtgaacactgtagtcttgttgttttcccaaagagaactccgtatgttctcttaggttgagtaacccactctgcccgaattc

SEQ ID NO: 1438 - DNA, 3328 bp, Homo sapiens; identical to SEQ ID NO: 1424

SEQ ID NO: 1439 - DNA, 3196 bp, Homo sapiens
gctcgggccacgcccacctgtcctgcagcactggatgctttgtgagttggggattgttgcgtcccatatctggacccagaagggacttccctgctcggctggctctcggtttctctgctttcctccggagaaataacagcgtcttccgcgccgcgcatggagcctcccggccgccgcgagtgtccctttccttcctggcgctttcctgggttgcttctggcggccatggtgttgctgctgtactccttctccgatgcctgtgaggagccaccaacatttgaagctatggagctcattggtaaaccaaaaccctactatgagattggtgaacgagtagattataagtgtaaaaaaggatacttctatatacctcctcttgccacccatactatttgtgatcggaatcatacatggctacctgtctcagatgacgcctgttatagagaaacatgtccatatatacgggatcctttaaatggccaagcagtccctgcaaatgggacttacgagtttggttatcagatgcactttatttgtaatgagggttattacttaattggtgaagaaattctatattgtgaacttaaaggatcagtagcaatttggagcggtaagcccccaatatgtgaaaaggttttgtgtacaccacctccaaaaataaaaaatggaaaacacacctttagtgaagtagaagtatttgagtatcttgatgcagtaacttatagttgtgatcctgcacctggaccagatccattttcacttattggagagagcacgatttattgtggtgacaattcagtgtggagtcgtgctgctccagagtgtaaagtggtcaaatgtcgatttccagtagtcgaaaatggaaaacagatatcaggatttggaaaaaaattttactacaaagcaacagttatgtttgaatgcgataagggtttttacctcgatggcagcgacacaattgtctgtgacagtaacagtacttgggatcccccagttccaaagtgtcttaaagtgtcgacttcttccactacaaaatctccagcgtccagtgcctcaggtcctaggcctacttacaagcctccagtctcaaattatccaggatatcctaaacctgaggaaggaatacttgacagtttggatgtttgggtcattgctgtgattgttattgccatagatatcttcaaaggaggaagaagaaagggaaagcagatggtggagctgaatatgccacttaccagactaaatcaaccactccagcagagcagagaggctgaatagattccacaacctggtttgccagttcatcttttgactctattaaaatcttcaatagttgttattctgtagtttcactctcatgagtgcaactgtggcttagctaatattgcaatgtggcttgaatgtaggtagcatcctttgatgcttctttgaaacttgtatgaatttgggtatgaacagattgcctgctttcccttaaataacacttagatttattggaccagtcagcacagcatgcctggttgtattaaagcagggatatgctgtattttataaaattggcaaaattagagaaatatagttcacaatgaaattatattttctttgtaaagaaagtggcttgaaatcttttttgttcaaagattaatgccaactcttaagattattctttcaccaactatagaatgtattttatatatcgttcattgtaaaaagcccttaaaaatatgtgtatactactttggctcttgtgcataaaaacaagaacactgaaaattgggaatatgcacaaacttggcttctttaaccaagaatattattggaaaattctctaaaagttaatagggtaaattctctattttttgtaatgtgttcggtgatttcagaaagctagaaagtgtatgtgtggcatttgttttcactttttaaaacatccctaactgatcgaatatatcagtaatttcagaatcagatgcatcctttcataagaagtgagaggactctgacagccataacaggagtgccacttcatggtgcgaagtgaacactgtagtcttgttgttttcccaaagagaactccgtatgttctcttaggttgagtaacccactctgaattctggttacatgtgtttttctctccctccttaaataaagagaggggttaaacatgccctctaaaagtaggtggttttgaagagaataaattcatcagataacctcaagtcacatgagaatcttagtccatttacattgccttggctagtaaaagccatctatgtatatgtcttacctcatctcctaaaaggcagagtacaaagtaagccatgtatctcaggaaggtaacttcattttgtctatttgctgttgattgtaccaagggatggaagaagtaaatatagctcaggtagcactttatactcaggcagatctcagccctctactgagtcccttagccaagcagtttctttcaaagaagccagcaggcgaaaagcagggactgccactgcatttcatatcacactgttaaaagttgtgttttgaaattttatgtttagttgcacaaattgggccaaagaaacattgccttgaggaagatatgattggaaaatcaagagtgtagaagaataaatactgttttactgtccaaagacatgtttatagtgctctgtaaatgttcctttcctttgtagtctctggcaagatgctttaggaagataaaagtttgaggagaacaaacaggaattctgaattaagcacagagttgaagtttatacccgtttcacatgcttttcaagaatgtcgcaattactaagaagcagataatggtgttttttagaaacctaattgaagtatattcaaccaaatactttaatgtataaaataaatattatacaatatacttgtatagcagtttctgcttcacatttgattttttcaaatttaatatttatattagagatctatatatgtataaatatgtattttgtcaaatttgttacttaaatatatagagaccagttttctctggaagtttgtttaaatgacagaagcgtatatgaattcaagaaaatttaagctgcaaaaatgtatttgctataaaatgagaagtctcactgatagaggttctttattgctcattttttaaaaaatggactcttgaaatctgttaaaataaaattgtacatttggagatgtttca

SEQ ID NO: 1440 - DNA, 3235 bp, Homo sapiens; identical to SEQ ID NO: 1431

SEQ ID NO: 1441 - DNA, 3146 bp, Homo sapiens
gctcgggccacgcccacctgtcctgcagcactggatgctttgtgagttggggattgttgcgtcccatatctggacccagaagggacttccctgctcggctggctctcggtttctctgctttcctccggagaaataacagcgtcttccgcgccgcgcatggagcctcccggccgccgcgagtgtccctttccttcctggcgctttcctgggttgcttctggcggccatggtgttgctgctgtactccttctccgatgcctgtgaggagccaccaacatttgaagctatggagctcattggtaaaccaaaaccctactatgagattggtgaacgagtagattataagtgtaaaaaaggatacttctatatacctcctcttgccacccatactatttgtgatcggaatcatacatggctacctgtctcagatgacgcctgttatagagaaacatgtccatatatacgggatcctttaaatggccaagcagtccctgcaaatgggacttacgagtttggttatcagatgcactttatttgtaatgagggttattacttaattggtgaagaaattctatattgtgaacttaaaggatcagtagcaatttggagcggtaagcccccaatatgtgaaaaggttttgtgtacaccacctccaaaaataaaaaatggaaaacacacctttagtgaagtagaagtatttgagtatcttgatgcagtaacttatagttgtgatcctgcacctggaccagatccattttcacttattggagagagcacgatttattgtggtgacaattcagtgtggagtcgtgctgctccagagtgtaaagtggtcaaatgtcgatttccagtagtcgaaaatggaaaacagatatcaggatttggaaaaaaattttactacaaagcaacagttatgtttgaatgcgataagggtttttacctcgatggcagcgacacaattgtctgtgacagtaacagtacttgggatcccccagttccaaagtgtcttaaaggatatcctaaacctgaggaaggaatacttgacagtttggatgtttgggtcattgctgtgattgttattgccatagttgttggagttgcagtaatttgtgttgtcccgtacagatatcttcaaaggaggaagaagaaagggaaagcagatggtggagctgaatatgccacttaccagactaaatcaaccactccagcagagcagagaggctgaatagattccacaacctggtttgccagttcatcttttgactctattaaaatcttcaatagttgttattctgtagtttcactctcatgagtgcaactgtggcttagctaatattgcaatgtggcttgaatgtaggtagcatcctttgatgcttctttgaaacttgtatgaatttgggtatgaacagattgcctgctttcccttaaataacacttagatttattggaccagtcagcacagcatgcctggttgtattaaagcagggatatgctgtattttataaaattggcaaaattagagaaatatagttcacaatgaaattatattttctttgtaaagaaagtggcttgaaatcttttttgttcaaagattaatgccaactcttaagattattctttcaccaactatagaatgtattttatatatcgttcattgtaaaaagcccttaaaaatatgtgtatactactttggctcttgtgcataaaaacaagaacactgaaaattgggaatatgcacaaacttggcttctttaaccaagaatattattggaaaattctctaaaagttaatagggtaaattctctattttttgtaatgtgttcggtgatttcagaaagctagaaagtgtatgtgtggcatttgttttcactttttaaaacatccctaactgatcgaatatatcagtaatttcagaatcagatgcatcctttcataagaagtgagaggactctgacagccataacaggagtgccacttcatggtgcgaagtgaacactgtagtcttgttgttttcccaaagagaactccgtatgttctcttaggttgagtaacccactctgaattctggttacatgtgtttttctctccctccttaaataaagagaggggttaaacatgccctctaaaagtaggtggttttgaagagaataaattcatcagataacctcaagtcacatgagaatcttagtccatttacattgccttggctagtaaaagccatctatgtatatgtcttacctcatctcctaaaaggcagagtacaaagtaagccatgtatctcaggaaggtaacttcattttgtctatttgctgttgattgtaccaagggatggaagaagtaaatatagctcaggtagcactttatactcaggcagatctcagccctctactgagtcccttagccaagcagtttctttcaaagaagccagcaggcgaaaagcagggactgccactgcatttcatatcacactgttaaaagttgtgttttgaaattttatgtttagttgcacaaattgggccaaagaaacattgccttgaggaagatatgattggaaaatcaagagtgtagaagaataaatactgttttactgtccaaagacatgtttatagtgctctgtaaatgttcctttcctttgtagtctctggcaagatgctttaggaagataaaagtttgaggagaacaaacaggaattctgaattaagcacagagttgaagtttatacccgtttcacatgcttttcaagaatgtcgcaattactaagaagcagataatggtgttttttagaaacctaattgaagtatattcaaccaaatactttaatgtataaaataaatattatacaatatacttgtatagcagtttctgcttcacatttgattttttcaaatttaatatttatattagagatctatatatgtataaatatgtattttgtcaaatttgttacttaaatatatagagaccagttttctctggaagtttgtttaaatgacagaagcgtatatgaattcaagaaaatttaagctgcaaaaatgtatttgctataaaatgagaagtctcactgatagaggttctttattgctcattttttaaaaaatggactcttgaaatctgttaaaataaaattgtacatttggagatgtttca

SEQ ID NO: 1442 - DNA, 3236 bp, Homo sapiens
gctcgggccacgcccacctgtcctgcagcactggatgctttgtgagttggggattgttgcgtcccatatctggacccagaagggacttccctgctcggctggctctcggtttctctgctttcctccggagaaataacagcgtcttccgcgccgcgcatggagcctcccggccgccgcgagtgtccctttccttcctggcgctttcctgggttgcttctggcggccatggtgttgctgctgtactccttctccgatgcctgtgaggagccaccaacatttgaagctatggagctcattggtaaaccaaaaccctactatgagattggtgaacgagtagattataagtgtaaaaaaggatacttctatatacctcctcttgccacccatactatttgtgatcggaatcatacatggctacctgtctcagatgacgcctgttatagagaaacatgtccatatatacgggatcctttaaatggccaagcagtccctgcaaatgggacttacgagtttggttatcagatgcactttatttgtaatgagggttattacttaattggtgaagaaattctatattgtgaacttaaaggatcagtagcaatttggagcggtaagcccccaatatgtgaaaaggttttgtgtacaccacctccaaaaataaaaaatggaaaacacacctttagtgaagtagaagtatttgagtatcttgatgcagtaacttatagttgtgatcctgcacctggaccagatccattttcacttattggagagagcacgatttattgtggtgacaattcagtgtggagtcgtgctgctccagagtgtaaagtggtcaaatgtcgatttccagtagtcgaaaatggaaaacagatatcaggatttggaaaaaaattttactacaaagcaacagttatgtttgaatgcgataagggtttttacctcgatggcagcgacacaattgtctgtgacagtaacagtacttgggatcccccagttccaaagtgtcttaaagtgctgcctccatctagtacaaaacctccagctttgagtcattcagtgtcgacttcttccactacaaaatctccagcgtccagtgcctcaggatatcctaaacctgaggaaggaatacttgacagtttggatgtttgggtcattgctgtgattgttattgccatagttgttggagttgcagtaatttgtgttgtcccgtacagatatcttcaaaggaggaagaagaaagggaaagcagatggtggagctgaatatgccacttaccagactaaatcaaccactccagcagagcagagaggctgaatagattccacaacctggtttgccagttcatcttttgactctattaaaatcttcaatagttgttattctgtagtttcactctcatgagtgcaactgtggcttagctaatattgcaatgtggcttgaatgtaggtagcatcctttgatgcttctttgaaacttgtatgaatttgggtatgaacagattgcctgctttcccttaaataacacttagatttattggaccagtcagcacagcatgcctggttgtattaaagcagggatatgctgtattttataaaattggcaaaattagagaaatatagttcacaatgaaattatattttctttgtaaagaaagtggcttgaaatcttttttgttcaaagattaatgccaactcttaagattattctttcaccaactatagaatgtattttatatatcgttcattgtaaaaagcccttaaaaatatgtgtatactactttggctcttgtgcataaaaacaagaacactgaaaattgggaatatgcacaaacttggcttctttaaccaagaatattattggaaaattctctaaaagttaatagggtaaattctctattttttgtaatgtgttcggtgatttcagaaagctagaaagtgtatgtgtggcatttgttttcactttttaaaacatccctaactgatcgaatatatcagtaatttcagaatcagatgcatcctttcataagaagtgagaggactctgacagccataacaggagtgccacttcatggtgcgaagtgaacactgtagtcttgttgttttcccaaagagaactccgtatgttctcttaggttgagtaacccactctgaattctggttacatgtgtttttctctccctccttaaataaagagaggggttaaacatgccctctaaaagtaggtggttttgaagagaataaattcatcagataacctcaagtcacatgagaatcttagtccatttacattgccttggctagtaaaagccatctatgtatatgtcttacctcatctcctaaaaggcagagtacaaagtaagccatgtatctcaggaaggtaacttcattttgtctatttgctgttgattgtaccaagggatggaagaagtaaatatagctcaggtagcactttatactcaggcagatctcagccctctactgagtcccttagccaagcagtttctttcaaagaagccagcaggcgaaaagcagggactgccactgcatttcatatcacactgttaaaagttgtgttttgaaattttatgtttagttgcacaaattgggccaaagaaacattgccttgaggaagatatgattggaaaatcaagagtgtagaagaataaatactgttttactgtccaaagacatgtttatagtgctctgtaaatgttcctttcctttgtagtctctggcaagatgctttaggaagataaaagtttgaggagaacaaacaggaattctgaattaagcacagagttgaagtttatacccgtttcacatgcttttcaagaatgtcgcaattactaagaagcagataatggtgttttttagaaacctaattgaagtatattcaaccaaatactttaatgtataaaataaatattatacaatatacttgtatagcagtttctgcttcacatttgattttttcaaatttaatatttatattagagatctatatatgtataaatatgtattttgtcaaatttgttacttaaatatatagagaccagttttctctggaagtttgtttaaatgacagaagcgtatatgaattcaagaaaatttaagctgcaaaaatgtatttgctataaaatgagaagtctcactgatagaggttctttattgctcattttttaaaaaatggactcttgaaatctgttaaaataaaattgtacatttggagatgtttca

SEQ ID NO: 1443 - DNA, 3328 bp, Homo sapiens; identical to SEQ ID NO: 1424

SEQ ID NO: 1444 - DNA, 3235 bp, Homo sapiens; identical to SEQ ID NO: 1431

SEQ ID NO: 1445 - DNA, 2877 bp, Homo sapiens
gggcaatagcagaataggagcaagccagcactagtcagctaactaagtgactcaaccaaggccttttttccttgttatctttgcagatacttcattttcttagcgtttctggagattacaacatcctgcggttccgtttctgggaactttactgatttatctcccccctcacacaaataagcattgattcctgcatttctgaagatctcaagatctggactactgttgaaaaaatttccagtgaggctcacttatgtctgtaaagatgggaaaaaaatacaagaacattgttctactaaaaggattagaggtcatcaatgattatcattttagaatggttaagtccttactgagcaacgatttaaaacttaatttaaaaatgagagaagagtatgacaaaattcagattgctgacttgatggaagaaaagttccgaggtgatgctggtttgggcaaactaataaaaattttcgaagatataccaacgcttgaagacctggctgaaactcttaaaaaagaaaagttaaaagtaaaaggaccagccctatcaagaaagaggaagaaggaagtggatgctacttcacctgcaccctccacaagcagcactgtcaaaactgaaggagcagaggcaactcctggagctcagaaaagaaaaaaatcaaccaaagaaaaggctggacccaaagggagtaaggtgtccgaggaacagactcagcctccctctcctgcaggagccggcatgtccacagccatgggccgttccccatctcccaagacctcattgtcagctccacccaacagttcttcaactgagaacccgaaaacagtggccaaatgtcaggtaactcccagaagaaatgttctccaaaaacgcccagtgatagtgaaggtactgagtacaacaaagccatttgaatatgagaccccagaaatggagaaaaaaataatgtttcatgctacagtggctacacagacacagttcttccatgtgaaggttttaaacaccagcttgaaggagaaattcaatggaaagaaaatcatcatcatatcagattatttggaatatgatagtctcctagaggtcaatgaagaatctactgtatctgaagctggtcctaaccaaacgtttgaggttccaaataaaatcatcaacagagcaaaggaaactctgaagattgatattcttcacaaacaagcttcaggaaatattgtatatggggtatttatgctacataagaaaacagtaaatcagaagaccacaatctacgaaattcaggatgatagaggaaaaatggatgtagtggggacaggacaatgtcacaatatcccctgtgaagaaggagataagctccaacttttctgctttcgacttagaaaaaagaaccagatgtcaaaactgatttcagaaatgcatagttttatccagataaagaaaaaaacaaacccgagaaacaatgaccccaagagcatgaagctaccccaggaacagagtcagcttccaaatccttcagaggccagcacaaccttccctgagagccatcttcggactcctcagatgccaccaacaactccatccagcagtttcttcaccaagaaaagtgaagacacaatctccaaaatgaatgacttcatgaggatgcagatactgaaggaagggagtcattttccaggaccgttcatgaccagcataggcccagctgagagccatccccacactcctcagatgcctccatcaacaccaagcagcagtttcttaaccacgaaaagtgaagacacaatctccaaaatgaatgacttcatgaggatgcagatactgaaggaagggagtcattttccaggaccgttcatgaccagcataggcccagctgagagccatccccacactcctcagatgcctccatcaacaccaagcagcagtttcttaaccacgttgaaaccaagactgaagactgaacctgaagaagtttccatagaagacagtgcccagagtgacctcaaagaagtgatggtgctgaacgcaacagaatcatttgtatatgagcccaaagagcagaagaaaatgtttcatgccacagtggcaactgagaatgaagtcttccgagtgaaggtttttaatattgacctaaaggagaagttcaccccaaagaagatcattgccatagcaaattatgtttgccgcaatgggttcctggaggtatatcctttcacacttgtggctgatgtgaatgctgaccgaaacatggagatcccaaaaggattgattagaagtgccagcgtaactcctaaaatcaatcagctttgctcacaaactaaaggaagttttgtgaatggggtgtttgaggtacataagaaaaatgtaaggggtgaattcacttattatgaaatacaagataatacagggaagatggaagtggtggtgcatggacgactgaccacaatcaactgtgaggaaggagataaactgaaactcacctgctttgaattggcaccgaaaagtgggaataccggggagttgagatctgtaattcatagtcacatcaaggtcatcaagaccaggaaaaacaagaaagacatactcaatcctgattcaagtatggaaacttcaccagactttttcttctaaaatctggatgtcattgacgataatgtttatggagataaggtctaagtgcctaaaaaaatgtacatatacctggttgaaatacaacactatacatacacaccaccatatatactagctgttaatcctatggaatggggtattgggagtgcttttttaatttttcatagtttttttttaataaaatggcatattttgcatctacaacttctataatttgaaaaaataaataaacattatcttttttgtgaaaggaa

SEQ ID NO: 1446 - DNA, 2694 bp, Homo sapiens
aagactactcaggcgtgcactgcgaggtggagatctgacttctcttgttcccgcttaagactgcctcctgtatacttcattttcttagcgtttctggagattacaacatcctgcggttccgtttctgggaactttactgatttatctcccccctcacacaaataagcattgattcctgcatttctgaagatctcaagatctggactactgttgaaaaaatttccagtgaggctcacttatgtctgtaaagatgggaaaaaaatacaagaacattgttctactaaaaggattagaggtcatcaatgattatcattttagaatggttaagtccttactgagcaacgatttaaaacttaatttaaaaatgagagaagagtatgacaaaattcagattgctgacttgatggaagaaaagttccgaggtgatgctggtttgggcaaactaataaaaattttcgaagatataccaacgcttgaagacctggctgaaactcttaaaaaagaaaagttaaaagtaaaaggaccagccctatcaagaaagaggaagaaggaagtggatgctacttcacctgcaccctccacaagcagcactgtcaaaactgaaggagcagaggcaactcctggagctcagaaaagaaaaaaatcaaccaaagaaaaggctggacccaaagggagtaaggtgtccgaggaacagactcagcctccctctcctgcaggagccggcatgtccacagccatgggccgttccccatctcccaagacctcattgtcagctccacccaacagttcttcaactgagaacccgaaaacagtggccaaatgtcaggtaactcccagaagaaatgttctccaaaaacgcccagtgatagtgaaggtactgagtacaacaaagccatttgaatatgagaccccagaaatggagaaaaaaataatgtttcatgctacagtggctacacagacacagttcttccatgtgaaggttttaaacaccagcttgaaggagaaattcaatggaaagaaaatcatcatcatatcagattatttggaatatgatagtctcctagaggtcaatgaagaatctactgtatctgaagctggtcctaaccaaacgtttgaggttccaaataaaatcatcaacagagcaaaggaaactctgaagattgatattcttcacaaacaagcttcaggaaatattgtatatggggtatttatgctacataagaaaacagtaaatcagaagaccacaatctacgaaattcaggatgatagaggaaaaatggatgtagtggggacaggacaatgtcacaatatcccctgtgaagaaggagataagctccaacttttctgctttcgacttagaaaaaagaaccagatgtcaaaactgatttcagaaatgcatagttttatccagataaagaaaaaaacaaacccgagaaacaatgaccccaagagcatgaagctaccccaggaacagagtcagcttccaaatccttcagaggccagcacaaccttccctgagagccatcttcggactcctcagatgccaccaacaactccatccagcagtttcttcaccaagaaaagtgaagacacaatctccaaaatgaatgacttcatgaggatgcagatactgaaggaagggagtcattttccaggaccgttcatgaccagcataggcccagctgagagccatccccacactcctcagatgcctccatcaacaccaagcagcagtttcttaaccacgttgaaaccaagactgaagactgaacctgaagaagtttccatagaagacagtgcccagagtgacctcaaagaagtgatggtgctgaacgcaacagaatcatttgtatatgagcccaaagagcagaagaaaatgtttcatgccacagtggcaactgagaatgaagtcttccgagtgaaggtttttaatattgacctaaaggagaagttcaccccaaagaagatcattgccatagcaaattatgtttgccgcaatgggttcctggaggtatatcctttcacacttgtggctgatgtgaatgctgaccgaaacatggagatcccaaaaggattgattagaagtgccagcgtaactcctaaaatcaatcagctttgctcacaaactaaaggaagttttgtgaatggggtgtttgaggtacataagaaaaatgtaaggggtgaattcacttattatgaaatacaagataatacagggaagatggaagtggtggtgcatggacgactgaccacaatcaactgtgaggaaggagataaactgaaactcacctgctttgaattggcaccgaaaagtgggaataccggggagttgagatctgtaattcatagtcacatcaaggtcatcaagaccaggaaaaacaagaaagacatactcaatcctgattcaagtatggaaacttcaccagactttttcttctaaaatctggatgtcattgacgataatgtttatggagataaggtctaagtgcctaaaaaaatgtacatatacctggttgaaatacaacactatacatacacaccaccatatatactagctgttaatcctatggaatggggtattgggagtgcttttttaatttttcatagtttttttttaataaaatggcatattttgcatctacaacttctataatttgaaaaaataaataaacattatcttttttgtgaaaggaa

SEQ ID NO: 1447 - DNA, 2694 bp, Homo sapiens; identical to SEQ ID NO: 1446

SEQ ID NO: 1448 - DNA, 2694 bp, Homo sapiens; identical to SEQ ID NO: 1446

SEQ ID NO: 1449 - DNA, 2087 bp, Homo sapiens
aaagtgctgggattacaggcatgagccattgcgcatggcctatatacacactcttaaagagatgattcttacaaatccagttctaggatgatgagtaatgagcaaaaagctggaatgtttgagctcaaggacttggtttcaggagggggtacaaatattggaagagactcagtaaatgcagaaagtagaaaaagtaattagagagttaccagaagcttgctttttcttacagattcctcataagtcactgaataaatagttgtagcagatatccattctttttgcatggggccagagacccagaaaggctatcagagatttcagcttcctctgtatcaaggtgctttgggaagcaaagctgccctgtaggtgaaagcagtagaaatttggaagaaaactcattgttctagaactgtcatagaaatatctcagatatgaaagacttaaacaaaaaggatattgagggacggctttctgcaaagatgtggcctaagatatgtgcatatctgtactaggagttgctgttgtgcatcttgtttaactctcttagaagggacttcagcctatatgtggttgttattaattacattctcaggaacagaatattaattttctgttacagaaaacagtaaatcagaagaccacaatctacgaaattcaggatgatagaggaaaaatggatgtagtggggacaggacaatgtcacaatatcccctgtgaagaaggagataagctccaacttttctgctttcgacttagaaaaaagaaccagatgtcaaaactgatttcagaaatgcatagttttatccagataaagaaaaaaacaaacccgagaaacaatgaccccaagagcatgaagctaccccaggaacagagtcagcttccaaatccttcagaggccagcacaaccttccctgagagccatcttcggactcctcagatgccaccaacaactccatccagcagtttcttcaccaagaaaagtgaagacacaatctccaaaatgaatgacttcatgaggatgcagatactgaaggaagggagtcattttccaggaccgttcatgaccagcataggcccagctgagagccatccccacactcctcagatgcctccatcaacaccaagcagcagtttcttaaccacgttgaaaccaagactgaagactgaacctgaagaagtttccatagaagacagtgcccagagtgacctcaaagaagtgatggtgctgaacgcaacagaatcatttgtatatgagcccaaagagcagaagaaaatgtttcatgccacagtggcaactgagaatgaagtcttccgagtgaaggtttttaatattgacctaaaggagaagttcaccccaaagaagatcattgccatagcaaattatgtttgccgcaatgggttcctggaggtatatcctttcacacttgtggctgatgtgaatgctgaccgaaacatggagatcccaaaaggattgattagaagtgccagcgtaactcctaaaatcaatcagctttgctcacaaactaaaggaagttttgtgaatggggtgtttgaggtacataagaaaaatgtaaggggtgaattcacttattatgaaatacaagataatacagggaagatggaagtggtggtgcatggacgactgaccacaatcaactgtgaggaaggagataaactgaaactcacctgctttgaattggcaccgaaaagtgggaataccggggagttgagatctgtaattcatagtcacatcaaggtcatcaagaccaggaaaaacaagaaagacatactcaatcctgattcaagtatggaaacttcaccagactttttcttctaaaatctggatgtcattgacgataatgtttatggagataaggtctaagtgcctaaaaaaatgtacatatacctggttgaaatacaacactatacatacacaccaccatatatactagctgttaatcctatggaatggggtattgggagtgcttttttaatttttcatagtttttttttaataaaatggcatattttgcatctacaacttctataatttgaaaaaataaataaacattatcttttttgtg

SEQ ID NO: 1450 - DNA, 4143 bp, Homo sapiens
gggcaatagcagaataggagcaagccagcactagtcagctaactaagtgactcaaccaaggccttttttccttgttatctttgcagatacttcattttcttagcgtttctggagattacaacatcctgcggttccgtttctgggaactttactgatttatctcccccctcacacaaataagcattgattcctgcatttctgaagatctcaagatctggactactgttgaaaaaatttccagtgaggctcacttatgtctgtaaagatgggaaaaaaatacaagaacattgttctactaaaaggattagaggtcatcaatgattatcattttagaatggttaagtccttactgagcaacgatttaaaacttaatttaaaaatgagagaagagtatgacaaaattcagattgctgacttgatggaagaaaagttccgaggtgatgctggtttgggcaaactaataaaaattttcgaagatataccaacgcttgaagacctggctgaaactcttaaaaaagaaaagttaaaagtaaaaggaccagccctatcaagaaagaggaagaaggaagtggatgctacttcacctgcaccctccacaagcagcactgtcaaaactgaaggagcagaggcaactcctggagctcagaaaagaaaaaaatcaaccaaagaaaaggctggacccaaagggagtaaggtgtccgaggaacagactcagcctccctctcctgcaggagccggcatgtccacagccatgggccgttccccatctcccaagacctcattgtcagctccacccaacagttcttcaactgagaacccgaaaacagtggccaaatgtcaggtaactcccagaagaaatgttctccaaaaacgcccagtgatagtgaaggtactgagtacaacaaagccatttgaatatgagaccccagaaatggagaaaaaaataatgtttcatgctacagtggctacacagacacagttcttccatgtgaaggttttaaacaccagcttgaaggagaaattcaatggaaagaaaatcatcatcatatcagattatttggaatatgatagtctcctagaggtcaatgaagaatctactgtatctgaagctggtcctaaccaaacgtttgaggttccaaataaaatcatcaacagagcaaaggaaactctgaagattgatattcttcacaaacaagcttcaggaaatattgtatatggggtatttatgctacataagaaaacagtaaatcagaagaccacaatctacgaaattcaggatgatagaggaaaaatggatgtagtggggacaggacaatgtcacaatatcccctgtgaagaaggagataagctccaacttttctgctttcgacttagaaaaaagaaccagatgtcaaaactgatttcagaaatgcatagttttatccagataaagaaaaaaacaaacccgagaaacaatgaccccaagagcatgaagctaccccaggaacagagtcagcttccaaatccttcagaggccagcacaaccttccctgagagccatcttcggactcctcagatgccaccaacaactccatccagcagtttcttcaccaagaaaagtgaagacacaatctccaaaatgaatgacttcatgaggatgcagatactgaaggaagggagtcattttccaggaccgttcatgaccagcataggcccagctgagagccatccccacactcctcagatgcctccatcaacaccaagcagcagtttcttaaccacgttgaaaccaagactgaagactgaacctgaagaagtttccatagaagacagtgcccagagtgacctcaaagaagtgatggtgctgaacgcaacagaatcatttgtatatgagcccaaagagcagaagaaaatgtttcatgccacagtggcaactgagaatgaagtcttccgagtgaaggtttttaatattgacctaaaggagaagttcaccccaaagaagatcattgccatagcaaattatgtttgccgcaatgggttcctggaggtatatcctttcacacttgtggctgatgtgaatgctgaccgaaacatggagatcccaaaaggattgattagaagtgccagcgtaactcctaaaatcaatcagctttgctcacaaactaaaggaagttttgtgaatggggtgtttgaggtacataaggtaagcccacaccattgttttataaaatttctcctgcaacctccaatttttaaagtcttaacttgtcaactggagtttggtcaacttactcaacacagaaaatcaaccccttcacccttcccccagcactagagataattgaatagagttcatttcaggatatggggtacgttatattgtaacattcctcttcttaaggtatcatcatgcaagttatttagacagtcactaggaaacttggcattttattagttttgatgatctattcagagccacccttgtccaggacagtgcagagtttatatcaacacacatatccttaggattttgtttctttgagttcttctccatctgtatcaatgacaacttaatttaattgtgaataaaagagttgctctcccaagcctgaatcctgattgtgacaaccagagtaagaaataaaatagactactctgctttagaatgcagctatgtctaacagttagctagaattctgatcatttggactccaaagtttcttgcctcttctcattcattaattcatcaggagactgtagagcaactaacttctgcattaaataataagagaaatacgaagcaaaaagactaaaaaagtcacgtagcttaactgctcaatttataaatggggcaataaaatgcaaaaaaaagaaaaaaagcttggtgaattcttaggcttacagtgtgcctttcagtctctacacatcatgtaaatattatgcttagctgatttaacttcttgtttgaagtactgtttcatactccattatacatgtcttctagggtggcttacttttaattgtgctgttttctctacactcagtttaaatgactgtacatatatatgtggttgtagagttaatgaataatgagctacaaaccagaacaatgtgactagatagataggatgatctagatttgagatctgggcagattgggaaagagtgactatatggagaagaaagaagtagttacatattgaaataacagtctacttaatgaggacgtgcaacattctttctcaaacttacaaagtgccataaaaagcctctattctctgctcttgggcaggtgtgaaagaaacctaccaaattaatcagatttttctgtatccaggctccttaaaaaatcccagctgtgctgatgtggaaacaggaagaattaggaaagtaatcaattttttttcctagaaaaaatccagcagacaaagaacttcaacaaaagaggctcaagggaggagttgaaaggcaggattcaaagaccaagtatcttaagctatttggtacctgttattcaggacctacagctctgtttactctatcaaagacaaaagtttccagaaacaccctgtatttctcatagatttgaaaattattgatccagtttcagaagataagtgttaattttcttttgcagaaaaatgtaaggggtgaattcacttattatgaaatacaagataatacagggaagatggaagtggtggtgcatggacgactgaccacaatcaactgtgaggaaggagataaactgaaactcacctgctttgaattggcaccgaaaagtgggaataccggggagttgagatctgtaattcatagtcacatcaaggtcatcaagaccaggaaaaacaagaaagacatactcaatcctgattcaagtatggaaacttcaccagactttttcttctaaaatctggatgtcattgacgataatgtttatggagataaggtctaagtgcctaaaaaaatgtacatatacctggttgaaatacaacactatacatacacaccaccatatatactagctgttaatcctatggaatggggtattgggagtgcttttttaatttttcatagtttttttttaataaaatggcatattttgcatctacaacttctataatttgaaaaaataaataaacattatcttttttgtgaaaggaa

SEQ ID NO: 1451 - DNA, 2070 bp, Homo sapiens
ctcatcaacatgcattcccagaaatgccatgaaaggaaagaccaagtcttgactgagaaacggaccgggcagatgagggactcccacatatacctgtttcctgctcttcccgaagacattttgccacaagcatataattcagcttctgaaaaatacggtcttcctcactgcagacaccatgccagcgttttaaatcaagttggctactcgtgctgtttagagtatgcagtttgcctgtggcaatattaaactcatctggaagaaagcacttaaacctatccagttcctcatcggtgatgttatccaggctggttagcaagagtatctccttatatttactctccatctcacgacttttcagcttataagggatccaaactatgtaagattataccaccaaaagtgattcaacattcaaaatgaagcaagatacttcattttcttagcgtttctggagattacaacatcctgcggttccgtttctgggaactttactgatttatctcccccctcacacaaataagcattgattcctgcatttctgaagatctcaagatctggactactgttgaaaaaatttccagtgaggctcacttatgtctgtaaagatgggaaaaaaatacaagaacattgttctactaaaaggattagaggtcatcaatgattatcattttagaatggttaagtccttactgagcaacgatttaaaacttaatttaaaaatgagagaagagtatgacaaaattcagattgctgacttgatggaagaaaagttccgaggtgatgctggtttgggcaaactaataaaaattttcgaagatataccaacgcttgaagacctggctgaaactcttaaaaaagaaaagttaaaagtaaaaggaccagccctatcaagaaagaggaagaaggaagtggatgctacttcacctgcaccctccacaagcagcactgtcaaaactgaaggagcagaggcaactcctggagctcagaaaagaaaaaaatcaaccaaagaaaaggctggacccaaagggagtaaggtgtccgaggaacagactcagcctccctctcctgcaggagccggcatgtccacagccatgggccgttccccatctcccaagacctcattgtcagctccacccaacagttcttcaactgagaacccgaaaacagtggccaaatgtcaggtaactcccagaagaaatgttctccaaaaacgcccagtgatagtgaaggtactgagtacaacaaagccatttgaatatgagaccccagaaatggagaaaaaaataatgtttcatgctacagtggctacacagacacagttcttccatgtgaaggttttaaacaccagcttgaaggagaaattcaccccaaagaagatcattgccatagcaaattatgtttgccgcaatgggttcctggaggtatatcctttcacacttgtggctgatgtgaatgctgaccgaaacatggagatcccaaaaggattgattagaagtgccagcgtaactcctaaaatcaatcagctttgctcacaaactaaaggaagttttgtgaatggggtgtttgaggtacataagaaaaatgtaaggggtgaattcacttattatgaaatacaagataatacagggaagatggaagtggtggtgcatggacgactgaccacaatcaactgtgaggaaggagataaactgaaactcacctgctttgaattggcaccgaaaagtgggaataccggggagttgagatctgtaattcatagtcacatcaaggtcatcaagaccaggaaaaacaagaaagacatactcaatcctgattcaagtatggaaacttcaccagactttttcttctaaaatctggatgtcattgacgataatgtttatggagataaggtctaagtgcctaaaaaaatgtacatatacctggttgaaatacaacactatacatacacaccaccatatatactagctgttaatcctatggaatggggtattgggagtgcttttttaatttttcatagtttttttttaataaaatggcatattttgcatctacaacttctataatttg

SEQ ID NO: 1452 - DNA, 1829 bp, Homo sapiens
tctggggccgcagacacccagccactctgagcagaactgacagcatgaaggcactcctggccctgccgctgctgctgcttctctccacgcccccgtgtgccccccaggtctccgggatccgaggagatgctctggagaggttttgccttcagcaacccctggactgtgacgacatctatgcccagggctaccagtcagacggcgtgtacctcatctacccctcgggccccagtgtgcctgtgcccgtcttctgtgacatgaccaccgagggcgggaagtggacggttttccagaagagattcaatggctcagtaagtttcttccgcggctggaatgactacaagctgggcttcggccgtgctgatggagagtactggctggggctgcagaacatgcacctcctgacactgaagcagaagtatgagctgcgagtggacttggaggactttgagaacaacacggcctatgccaagtacgctgacttctccatctccccgaacgcggtcagcgcagaggaggatggctacaccctctttgtggcaggctttgaggatggcggggcaggtgactccctgtcctaccacagtggccagaagttctctaccttcgaccgggaccaggacctctttgtgcagaactgcgcagctctctcctcaggagccttctggttccgcagctgccactttgccaacctcaatggcttctacctaggtggctcccacctctcttatgccaatggcatcaactgggcccagtggaagggcttctactactccctcaaacgcactgagatgaaaatccgccgggcctgaagggctggccccctcaggcacctttcctcccctggacacccatggtctccatgagtgctccctctgctgcccctgatgcatgcttctgctgattcccgagcaccaactccttacaagggggccttgtggctctcagccatgccacatccctgtcacacacccagggcatccattcctaagccagacccggctcccctacacctgaagttacactgccagcagttccccaggcctcttccgagaggcacatggttctagcctggacctggctgggctccatgagaatgagttgcctccaccctgtcccaacagctgacagccaggagccactctcccagctgcaggcctttgtggtccatcttgtcctgcttcctcactgtggacccctgtctgggccaccctagtgtgctaagctgagcagtgcagtgtgaacagggcccatggtgtattctaggccacagcccagcactcctctgggctgctctcaaaccatgtcccatcttcagcatccctcccaccaacttactcccctgtggtgagtaccgtggaaccccagcccacctcactatcatactcagcttcccctgatggcccatcccagcccctgaagctctatgccaagaacacagctaccgcacaccaccctgaaacagccacagccaaggtaggcatgcatatgaggtcttccccataccctctgggtgttgagaggtttagccacatgagggagcagaggacaatctctgcagggctgggagtgggtagggactgaaggtctcaataaaccttcagaacctgaatgaactggcttcatacacacaaacatatttgtttatcccccaaatgtaggcacctggctcctccttgctcccctgctgatggtgtcctaccccgaactccaaaaattacacctggagtcaggtgcagaagggaaccttgtatttcacaggcctcattttgatggcaaaaagacagtgtaataataacataataataataaaaatataatactgaaaa

SEQ ID NO: 1453 - DNA, 1830 bp, Homo sapiens
agccactctgagcagaactgacagcatgaaggcactcctggccctgccgctgctgctgcttctctccacgcccccgtgtgccccccaggtctccgggatccgaggagatgctctggagaggttttgccttcagcaacccctggactgtgacgacatctatgcccagggctaccagtcagacggcgtgtacctcatctacccctcgggccccagtgtgcctgtgcccgtcttctgtgacatgaccaccgagggcgggaagtggacggttttccagaagagattcaatggctcagtaagtttcttccgcggctggaatgactacaagctgggcttcggccgtgctgatggagagtactggctggggctgcagaacatgcacctcctgacactgaagcagaagtatgagctgcgagtggacttggaggactttgagaacaacacggcctatgccaagtacgctgacttctccatctccccgaacgcggtcagcgcagaggaggatggctacaccctctttgtggcaggctttgaggatggcggggcaggtgactccctgtcctaccacagtggccagaagttctctaccttcgaccgggaccaggacctctttgtgcagaactgcgcagctctctcctcaggagccttctggttccgcagctgccactttgccaacctcaatggcttctacctaggtggctcccacctctcttatgccaatggcatcaactgggcccagtggaagggcttctactactccctcaaacgcactgagatgaaaatccgccgggcctgaagggctggccccctcaggcacctttcctcccctggacacccatggtctccatgagtgctccctctgctgcccctgatgcatgcttctgctgattcccgagcaccaactccttacaagggggccttgtggctctcagccatgccacatccctgtcacacacccagggcatccattcctaagccagacccggctcccctacacctgaagttacactgccagcagttccccaggcctcttccgagaggcacatggttctagcctggacctggctgggctccatgagaatgagttgcctccaccctgtcccaacagctgacagccaggagccactctcccagctgcaggcctttgtggtccatcttgtcctgcttcctcactgtggacccctgtctgggccaccctagtgtgctaagctgagcagtgcagtgtgaacagggcccatggtgtattctaggccacagcccagcactcctctgggctgctctcaaaccatgtcccatcttcagcatccctcccaccaacttactcccctgtggtgagtaccgtggaaccccagcccacctcactatcatactcagcttcccctgatggcccatcccagcccctgaagctctatgccaagaacacagctaccgcacaccaccctgaaacagccacagccaaggtaggcatgcatatgaggtcttccccataccctctgggtgttgagaggtttagccacatgagggagcagaggacaatctctgcagggctgggagtgggtagggactgaaggtctcaataaaccttcagaacctgaatgaactggcttcatacacacaaacatatttgtttatcccccaaatgtaggcacctggctcctccttgctcccctgctgatggtgtcctaccccgaactccaaaaattacacctggagtcaggtgcagaagggaaccttgtatttcacaggcctcattttgatggcaaaaagacagtgtaataataacataataataataaaaatataatactgaaaaggaaaaaaaaaaaaaaaaaa

SEQ ID NO: 1454 - DNA, 1809 bp, Homo sapiens
ctgacagcatgaaggtacggggcccagggtcgggggactcatagcatgggggaactgagcccactccagaggcccctggccacagagggcactatgaaggcacaaggagttctcttgaaactcgcactcctggccctgccgctgctgctgcttctctccacgcccccgtgtgccccccaggtctccgggatccgaggagatgctctggagaggttttgccttcagcaacccctggactgtgacgacatctatgcccagggctaccagtcagacggcgtgtacctcatctacccctcgggccccagtgtgcctgtgcccgtcttctgtgacatgaccaccgagggcgggaagtggacggttttccagaagagattcaatggctcagtaagtttcttccgcggctggaatgactacaagctgggcttcggccgtgctgatggagagtactggctggggctgcagaacatgcacctcctgacactgaagcagaagtatgagctgcgagtggacttggaggactttgagaacaacacggcctatgccaagtacgctgacttctccatctccccgaacgcggtcagcgcagaggaggatggctacaccctctttgtggcaggctttgaggatggcggggcaggtgactccctgtcctaccacagtggccagaagttctctaccttcgaccgggaccaggacctctttgtgcagaactgcgcagctctctcctcaggagccttctggttccgcagctgccactttgccaacctcaatggcttctacctaggtggctcccacctctcttatgccaatggcatcaactgggcccagtggaagggcttctactactccctcaaacgcactgagatgaaaatccgccgggcctgaagggctggccccctcaggcacctttcctcccctggacacccatggtctccatgagtgctccctctgctgcccctgatgcatgcttctgctgattcccgagcaccaactccttacaagggggccttgtggctctcagccatgccacatccctgtcacacacccagggcatccattcctaagccagacccggctcccctacacctgaagttacactgccagcagttccccaggcctcttccgagaggcacatggttctagcctggacctggctgggctccatgagaatgagttgcctccaccctgtcccaacagctgacagccaggagccactctcccagctgcaggcctttgtggtccatcttgtcctgcttcctcactgtggacccctgtctgggccaccctagtgtgctaagctgagcagtgcagtgtgaacagggcccatggtgtattctaggccacagcccagcactcctctgggctgctctcaaaccatgtcccatcttcagcatccctcccaccaacttactcccctgtggtgagtaccgtggaaccccagcccacctcactatcatactcagcttcccctgatggcccatcccagcccctgaagctctatgccaagaacacagctaccgcacaccaccctgaaacagccacagccaaggtagggactgaaggtctcaataaaccttcagaacctgaatgaactggcttcatacacacaaacatatttgtttatcccccaaatgtaggcacctggctcctccttgctcccctgctgatggtgtcctaccccgaactccaaaaattacacctggagtcaggtgcagaagggaaccttgtatttcacaggcctcattttgatggcaaaaagacagtgtaataataacataataataataaaaatataatactgaaaaggat

SEQ ID NO: 1455 - DNA, 1809 bp, Homo sapiens; identical to SEQ ID NO: 1454

SEQ ID NO: 1456 - DNA, 2805 bp, Homo sapiens
cctggccaccgccgcgcggacaccctcacgaggacaccccggccgcgcggacacctaccgcggggacgccccgaccccatcctacctgctgcgccccgcgccgcgccccgcaccccgcccgccacggcctgcgtccgccaccggaagcgccctcctaatccccgcagcgccaccgccattgccgccatcgtcgtggggcttctggggcagctagggctgcccgccgcgctgcctgcgccggaccggggcgggtccagtcccgggcgggccgtcgcgggagagaaataacatctgctttgctgccgagctcagaggagaccccagacccctcccgcagccagagggctggagcctgctcagaggtgctttgaagatgccggaggccccgcctctgctgttggcagctgtgttgctgggcctggtgctgctggtggtgctgctgctgcttctgaggcactggggctggggcctgtgccttatcggctggaacgagttcatcctgcagcccatccacaacctgctcatgggtgacaccaaggagcagcgcatcctgaaccatgtgctgcagcatgcggagcccgggaacgcacagagcgtgctggaggccattgacacctactgcgagcagaaggagtgggccatgaacgtgggcgacaagaaaggcaagatcgtggacgccgtgattcaggagcaccagccctccgtgctgctggagctgggggcctactgtggctactcagctgtgcgcatggcccgcctgctgtcaccaggggcgaggctcatcaccatcgagatcaaccccgactgtgccgccatcacccagcggatggtggatttcgctggcatgaaggacaaggtcacccttgtggttggagcgtcccaggacatcatcccccagctgaagaagaagtatgatgtggacacactggacatggtcttcctcgaccactggaaggaccggtacctgccggacacgcttctcttggaggaatgtggcctgctgcggaaggggacagtgctactggctgacaacgtgatctgcccaggtgcgccagacttcctagcacacgtgcgcgggagcagctgctttgagtgcacacactaccaatcgttcctggaatacagggaggtggtggacggcctggagaaggccatctacaagggcccaggcagcgaagcagggccctgactgccccccccggcccccctctcgggctctctcacccagcctggtactgaaggtgccagacgtgctcctgctgaccttctgcggctccgggctgtgtcctaaatgcaaagcacacctcggccgaggcctgcgccctgacatgctaacctctctgaactgcaacactggattgttcttttttaagactcaatcatgacttctttactaacactggctagctatattatcttatatactaatatcatgttttaaaaatataaaatagaaattaagaatctaaatatttagatataactcgacttagtacatccttctcaactgccattcccctgctgcccttgacttgggcaccaaacattcaaagctccccttgacggacgctaacgctaagggcggggcccctagctggctgggttctgggtggcacgcctggcccactggcctcccagccacagtggtgcagaggtcagccctcctgcagctaggccaggggcacctgttagccccatggggacgactgccagcctgggaaacgaagaggagtcagccagcattcacacctttctgaccaagcaggcgctggggacaggtggaccccgcagcagcaccagcccctctgggccccatgtggcacagagtggaagcatctccttccctactccccactgggccttgcttacagaagaggcaatggctcagaccagctcccgcatccctgtagttgcctccctggcccatgagtgaggatgcagtgctggtttctgtccacctacacctagagctgtccccatctcctccaaggggtcagactgctagccacctcagaggctccaagggcccagttcccaggcccaggacaggaatcaaccctgtgctagctgagttcacctgcaccgagaccagcccctagccaagattctactcctgggctcaaggcctggctagcccccagccagcccactcctatggatagacagaccagtgagcccaagtggacaagtttggggccacccagggaccagaaacagagcctctgcaggacacagcagatgggcacctgggaccacctccacccagggccctgccccagacgcgcagaggcccgacacaagggagaagccagccacttgtgccagacctgagtggcagaaagcaaaaagttcctttgctgctttaatttttaaattttcttacaaaaatttaggtgtttaccaatagtcttattttggcttatttttaatgctttttctcagtgtttttcttctgtttctgagtcacgaacagcaggcactgaaagcagtcccccagccactgccgaaggtcagtcccggaggtgctgcccaggctccaggcagatgcggcagccccggccacagccagcatgggctggagaaaggctctctactgcacaggggcctcacgtgactgcagggctctggggaggtggggcacctgtagcctgacccccaccttgctgcttccaaagcttccttgcccagcagcccagtcggcctcctcgggccttctgtcactcgctcacacacagcaccatgtcagtaaacagctaactcaggcctagggagttaggtaggatggggggagtggggtgggggggc

SEQ ID NO: 1457 - DNA, 1067 bp, Homo sapiens
gctgttggcagctgtgttgctgggcctggtgctgctggtggtgctgctgctgcttctgaggcactggggctggggcctgtgccttatcggctggaacgagttcatcctgcagcccatccacaacctgctcatgggtgacaccaaggagcagcgcatcctgaaccacgtgctgcagcatgcggagcccgggaacgcacagagcgtgctggaggccattgacacctactgcgagcagaaggagtgggccatgaacgtgggcgacaagaaaggcaagatcgtggacgccgtgattcaggagcaccagccctccgtgctgctggagctgggggcctactgtggctactcagctgtgcgcatggcccgcctgctgtcaccaggggcgaggctcatcaccatcgagatcaaccccgactgtgccgccatcacccagcggatggtggatttcgctggcgtgaaggacaaggtcacccttgtggttggagcgtcccaggacatcatcccccagctgaagaagaagtatgatgtggacacactggacatggtcttcctcgaccactggaaggaccggtacctgccggacacgcttctcttggaggaatgtggcctgctgcggaaggggacagtgctactggctgacaacgtgatctgcccaggtgcgccagacttcctagcacacgtgcgcgggagcagctgctttgagtgcacacactaccaatcgttcctggaatacagggaggtggtggacggcctggagaaggccatctacaagggcccaggcagcgaagcagggccctgactgcccccccggcccccctctcgggctctctcacccagcctggtactgaaggtgccagacgtgctcctgctgaccttctgcggctccgggctgtgtcctaaatgcaaagcacacctcggccgaggcctgcgccctgacatgctaacctctctgaactgcaacactggattgttcttttttaagactcaatcatgacttctttactaacactggctagctatattatcttatatactaatatcatgttttaaaaatataaaatagaaattaa

SEQ ID NO: 1458 - DNA, 2512 bp, Homo sapiens
ggggcgggtccagtcccgggcgggccgtcgcgggagaggtgctaacggatggaagggttgtttctacctgttggccattgtggatgatgttgctatgcatattgggaaataacatctgctttgctgccgagctcagaggagaccccagacccctcccgcagccagagggctggagcctgctcagaggtgctttgaagatgccggaggccccgcctctgctgttggcagctgtgttgctgggcctggtgctgctggtggtgctgctgctgcttctgaggcactggggctggggcctgtgccttatcggctggaacgagttcatcctgcagcccatccacaacctgctcatgggtgacaccaaggagcagcgcatcctgaaccatgtgctgcagcatgcggagcccgggaacgcacagagcgtgctggaggccattgacacctactgcgagcagaaggagtgggccatgaacgtgggcgacaagaaaggcaagatcgtggacgccgtgattcaggagcaccagccctccgtgctgctggagctgggggcctactgtggctactcagctgtgcgcatggcccgcctgctgtcaccaggggcgaggctcatcaccatcgagatcaaccccgactgtgccgccatcacccagcggatggtggatttcgctggcatgaaggacaaggtcacccttgtggttggagcgtcccaggacatcatcccccagctgaagaagaagtatgatgtggacacactggacatggtcttcctcgaccactggaaggaccggtacctgccggacacgcttctcttggaggaatgtggcctgctgcggaaggggacagtgctactggctgacaacgtgatctgcccaggtgcgccagacttcctagcacacgtgcgcgggagcagctgctttgagtgcacacactaccaatcgttcctggaatacagggaggtggtggacggcctggagaaggccatctacaagggcccaggcagcgaagcagggccctgactgccccccccggccccctgacatgctaacctctctgaactgcaacactggattgttcttttttaagactcaatcatgacttctttactaacactggctagctatattatcttatatactaatatcatgttttaaaaatataaaatagaaattaagaatctaaatatttagatataactcgacttagtacatccttctcaactgccattcccctgctgcccttgacttgggcaccaaacattcaaagctccccttgacggacgctaacgctaagggcggggcccctagctggctgggttctgggtggcacgcctggcccactggcctcccagccacagtggtgcagaggtcagccctcctgcagctaggccaggggcacctgttagccccatggggacgactgccagcctgggaaacgaagaggagtcagccagcattcacacctttctgaccaagcaggcgctggggacaggtggaccccgcagcagcaccagcccctctgggccccatgtggcacagagtggaagcatctccttccctactccccactgggccttgcttacagaagaggcaatggctcagaccagctcccgcatccctgtagttgcctccctggcccatgagtgaggatgcagtgctggtttctgtccacctacacctagagctgtccccatctcctccaaggggtcagactgctagccacctcagaggctccaagggcccagttcccaggcccaggacaggaatcaaccctgtgctagctgagttcacctgcaccgagaccagcccctagccaagattctactcctgggctcaaggcctggctagcccccagccagcccactcctatggatagacagaccagtgagcccaagtggacaagtttggggccacccagggaccagaaacagagcctctgcaggacacagcagatgggcacctgggaccacctccacccagggccctgccccagacgcgcagaggcccgacacaagggagaagccagccacttgtgccagacctgagtggcagaaagcaaaaagttcctttgctgctttaatttttaaattttcttacaaaaatttaggtgtttaccaatagtcttattttggcttatttttaatgctttttctcagtgtttttcttctgtttctgagtcacgaacagcaggcactgaaagcagtcccccagccactgccgaaggtcagtcccggaggtgctgcccaggctccaggcagatgcggcagccccggccacagccagcatgggctggagaaaggctctctactgcacaggggcctcacgtgactgcagggctctggggaggtggggcacctgtagcctgacccccaccttgctgcttccaaagcttccttgcccagcagcccagtcggcctcctcgggccttctgtcactcgctcacacacagcaccatgtcagtaaacagctaactcaggcctagggagttaggtaggatggggggagtggggtgggggggc

SEQ ID NO: 1459 - DNA, 2786 bp, Homo sapiens
cagtcagattaactgaaagtaaagagaggactgcgggagtttgggacctttgtgcagacgtgctcatgctcgttcgtgtagagggcgggagagaggaaaggaaggagggcattgggagctgaggccccacctttcatttcagaaaagtgcacaggcagagcgggctgagtcacaggcacaggtgaggaactcaactcaaactcctctctctgggaaaacgcggtgcttgctcctcccggagtggccttggcagggtgttggagccctcggtctgccccgtccggtctctggggccaaggctgggtttccctcatgtatggcaagagctctactcgtgcggtgcttcttctccttggcatacagctcacagctctttggcctatagcagctgtggaaatttatacctcccgggtgctggaggctgttaatgggacagatgctcggttaaaatgcactttctccagctttgcccctgtgggtgatgctctaacagtgacctggaattttcgtcctctagacgggggacctgagcagtttgtattctactaccacatagatcccttccaacccatgagtgggcggtttaaggaccgggtgtcttgggatgggaatcctgagcggtacgatgcctccatccttctctggaaactgcagttcgacgacaatgggacatacacctgccaggtgaagaacccacctgatgttgatggggtgataggggagatccggctcagcgtcgtgcacactgtacgcttctctgagatccacttcctggctctggccattggctctgcctgtgcactgatgatcataatagtaattgtagtggtcctcttccagcattaccggaaaaagcgatgggccgaaagagctcataaagtggtggagataaaatcaaaagaagaggaaaggctcaaccaagagaaaaaggtctctgtttatttagaagacacagactaacaattttagatggaagctgagatgatttccaagaacaagaaccctagtatttcttgaagttaatggaaacttttctttggcttttccagttgtgacccgttttccaaccagttctgcagcatattagattctagacaagcaacacccctctggagccagcacagtgctcctccatatcaccagtcatacacagcctcattattaaggtcttatttaatttcagagtgtaaattttttcaagtgctcattaggttttataaacaagaagctacatttttgcccttaagacactacttacagtgttatgacttgtatacacatatattggtatcaaaggggataaaagccaatttgtctgttacatttcctttcacgtatttcttttagcagcacttctgctactaaagttaatgtgtttactctctttccttcccacattctcaattaaaaggtgagctaagcctcctcggtgtttctgattaacagtaaatcctaaattcaaactgttaaatgacatttttatttttatgtctctccttaactatgagacacatcttgttttactgaatttctttcaatattccaggtgatagatttttgttgttttgttaattaatccaagatttacaatagcacaacgctaaatcacacagtaactacaaaaggttacatagatatgaaaagattggcagaggccattgcaggatgaatcacttgtcacttttcttctgtgctgggaaaaataatcaacaatgtgggtctttcatgagcagtgacggatagtttagcttactcaatgatctataacaacagagcaaagtctatgctcatttgcagactggaatcattaagtaatttaataaaaaaattgtgaaacagcatattacaagtttgaaaattcagggctggtgaaaaaaatcaactctaaatgatgataattttgtacagttttatataaaactctgagaactagaagaaattattaactttttttcttttttaattctaattcacttgtttattttgggggaggaagactttggtatggagcaaagaaataccaaaactactttaaatggaataaaaccaactttattctttttttcccccatactggtagataaagcaaactttataagtgggctattgaaagaaaagttacaagcttaagatacagaagcatttgttcaaaggatagaaagcatctaaaagtttaggctcaagatcaatctttacagattgatattttcagtttttaatcgactggactgcagatgttttttcttttaacaaactggaattttcaaacagattatctgtatttaaatgtatagaccttgatatttttccaatactattttttaaaaaattgtatgatttacatatgaacctcagttctgaaattcattacatatctgtctcattctgccttttatactgtctaaaaaagcaaagttttaaagtgcaattttaaaactgtaaattacatctgaaggctatatatcctttaatcacattttatattttttcttcacaattctaacctttgaaaatattataactggatatttcttcaaacagatgtcctggatgatggtccataagaataatgaagaagtagttaaaaatgtatggacagtttttccggcaaaatttgtagcttatgtcttggctaaatagtcaaggggtaatatgggcctgttgtttagtgtctccttcctaaagagcacttttgtattgtaatttattttttattatgctttaaacactatgtaaataaacctttagtaataaagaattatcagttatataatttgtgtatatac

SEQ ID NO: 1460 - DNA, 2623 bp, Homo sapiens
gaggaactcaactcaaactcctctctctgggaaaacgcggtgcttgctcctcccggagtggccttggcagggtgttggagccctcggtctgccccgtccggtctctggggccaaggctgggtttccctcatgtatggcaagagctctactcgtgcggtgcttcttctccttggcatacagctcacagctctttggcctatagcagctgtggaaatttatacctcccgggtgctggaggctgttaatgggacagatgctcggttaaaatgcactttctccagctttgcccctgtgggtgatgctctaacagtgacctggaattttcgtcctctagacgggggacctgagcagtttgtattctactaccacatagatcccttccaacccatgagtgggcggtttaaggaccgggtgtcttgggatgggaatcctgagcggtacgatgcctccatccttctctggaaactgcagttcgacgacaatgggacatacacctgccaggtgaagaacccacctgatgttgatggggtgataggggagatccggctcagcgtcgtgcacactgtacgcttctctgagatccacttcctggctctggccattggctctgcctgtgcactgatgatcataatagtaattgtagtggtcctcttccagcattaccggaaaaagcgatgggccgaaagagctcataaagtggtggagataaaatcaaaagaagaggaaaggctcaaccaagagaaaaaggtctctgtttatttagaagacacagactaacaattttagatggaagctgagatgatttccaagaacaagaaccctagtatttcttgaagttaatggaaacttttctttggcttttccagttgtgacccgttttccaaccagttctgcagcatattagattctagacaagcaacacccctctggagccagcacagtgctcctccatatcaccagtcatacacagcctcattattaaggtcttatttaatttcagagtgtaaattttttcaagtgctcattaggttttataaacaagaagctacatttttgcccttaagacactacttacagtgttatgacttgtatacacatatattggtatcaaaagggataaaagccaatttgtctgttacatttcctttcacgtatttcttttagcagcacttctgctactaaagttaatgtgtttactctctttccttcccacattctcaattaaaaggtgagctaagcctcctcggtgtttctgattaacagtaaatcctaaattcaaactgttaaatgacatttttatttttatgtctctccttaactatgagacacatcttgttttactgaatttctttcaatattccaggtgatagatttttgttgttttgttaattaatccaagatttacaatagcacaacgctaaatcacacagtaactacaaaaggttacatagatatgaaaagattggcagaggccattgcaggatgaatcacttgtcacttttcttctgtgctgggaaaaataatcaacaatgtgggtctttcatgagcagtgacggatagtttagcttactatgtttcccccccaattcaatgatctataacaacagagcaaagtctatgctcatttgcagactggaatcattaagtaatttaataaaaaaattgtgaaacagcatattacaagtttgaaaattcagggctggtgaaaaaaatcaactctaaatgatgataattttgtacagttttatataaaactctgagaactagaagaaattattaactttttttcttttttaattctaattcacttgtttattttgggggaggaagactttggtatggagcaaagaaataccaaaactactttaaatggaataaaaccaactttattctttttttcccccatactggtagataaagcaaactttataagtgggctattgaaagaaaagttacaagcttaagatacagaagcatttgttcaaaggatagaaagcatctaaaagtttaggctcaagatcaatctttacagattgatattttcagtttttaatcgactggactgcagatgttttttcttttaacaaactggaattttcaaacagattatctgtatttaaatgtatagaccttgatatttttccaatactattttttaaaaaattgtatgatttacatatgaacctcagttctgaaattcattacatatctgtctcattctgccttttatactgtctaaaaaagcaaagttttaaagtgcaattttaaaactgtaaattacatctgaaggctatatatcctttaatcacattttatattttttcttcacaattctaacctttgaaaatattataactggatatttcttcaaacagatgtcctggatgatggtccataagaataatgaagaagtagttaaaaatgtatggacagtttttccggcaaaatttgtagcttatgtcttggctaaatagtcaaggggtaatatgggcctgttgtttagtgtctccttcctaaagagcacttttgtattgtaatttattttttattatgctttaaacacgtatgtaaataaacctttagtaataaagaattatcagttataaaaaaaaaaaaaaaaaaa

SEQ ID NO: 1461 - DNA, 2786 bp, Homo sapiens; identical to SEQ ID NO: 1459

SEQ ID NO: 1462 - DNA, 2195 bp, Homo sapiens
gcaattatgtctaagggacctgcagtcgggatcgatcttggcaccacctactcctgcgtgggtgtcttccagcacgggaaagtggaaataattgccaatgatcagggaaaccgaaccaccccaagttatgtcgccttcacggacaccgaacgattgatcggtgatgctgcgaagaatcaagttgcgatgaaccccaccaacacggttttcgatgccaagcggctgattggacgtagatttgatgatgctgtcgtccaatctgatatgaagcattggcctttcatggtggtgaatgatgctggcaggcctaaagtccaagtagagtacaagggggagaccaaaagtttctatccagaggaggtgtcctctatggtcctgacgaagatgaaggaaattgcagaggcctaccttgggaagactgttaccaatgcagttgtcacggtacctgcatacttcaatgactctcagcgtcaggctaccaaagatgctggaactattgccggtcttaatgtacttcgaattatcaatgagccaactgctgctgctattgcttatggcttagacaagaaggttggagctgaaaggaacgtgttgatctttgatttaggaggtggcacttttgatgtgtccatccttactattgaagatgggatctttgaggtcaagtccacagctggagacactcacttaggtggagaagactttgacaacagaatggtcaaccattttattgcagaattcaagcgcaaacacaagaaggacatcagcgaaaacaagagggctgtccgccgtctccgtactgcatgtgaacgggctaagcgtacactttcttccagcacccaggccagtattgagattgattctctgtatgaaggaatcgacttctatacctctattactcgtgcccggtttgaagaattaaatgctgacctcttccgtggcaccctggaccctgtagagaaagctcttcgagatgccaagctggacaagtctcagatccatgacattgtcctggtgggtggttctacccgtatccccaagattcagaaacttctgcaagatttcttcaatggaaaggaactgaataagagcatcaaccctgatgaggctgttgcttatggtgcagctgtccaggcagccattctttctggtgacaaatctgaaaatgttcaagatttgctgctattggatgtcaccccactttctcttggtattgaaactgctggaggagtcatgactgtgctcatcaagcgcaatactaccattcctacaaaacagacacaaacctttactacctactctgacaaccagcctggtgtgcttattcaggtctatgaaggtgagcgtgctatgaccaaggataacaacctacttggcaagtttgaactcacaggcatacctcctgctcctcgtggcgttcctcagattgaagtcacttttgatattgatgcaaatggtatcctcaatgtgtctgctgtggataagagcacaggaaaagagaataagattaccatcactaatgacaagggccgcttgagcaaggaggacattgagcgcatggtccaggaagctgagaagtacaaagccgaagatgagaagcagagagacaaggtgtcttccaagaattcacttgagtcttatgctttcaacatgaaagcaactgttgaagatgaaaaacttcagggcaaaatcaatgatgaagacaaacagaagattcttgacaagtgcaatgaaatcatcaactggctcgataagaaccagactgcagagaaggaagaatttgaacatcagcagaaagagctggagaaagtctgcaatcccatcattacgaagctataccagagtgcaggaggcatgccaggaggaatgcctggaggctttcctggtggtggagctcctccctctggtggtgcctcctctgggcctaccattgaagaggttgattaagccaacctgatgacaggtctagcattgttccacacatttgaaggacccaaatttgtagcaaattccatggcagttttaaagtcgaagctgctatagtaaatatactgggcattcttgatacttgaatatggaatatgtgcacagggaaaggaaataaacattgcactttataagcactgtattgttaagtggaaaatgcaatgtcttaaataaaactgtatttaaaattggcaccataaaaaaagggg

SEQ ID NO: 1463 - DNA, 1881 bp, Homo sapiens
tgagactcctggggccacgccttgtgaaattctgaggcttcttttcagggatcgaaatcccctccggctccgccctgcgcgttgggccccgccccagcgggtcatgaatatgcaagtgagaggaagatatttaaaggcgtcggcgccacgcgcatatccctgctcggcgctgcccgcccagttcctgttcccagactgaggcccagcccccttcgcccgtttccatcacgagtgccgccagcatgtctgacaaactgccctacaaagtcgccgacatcggcctggctgcctggggacgcaaggccctggacattgctgagaacgagatgccgggcctgatgcgtatgcgggagcggtactcggcctccaagccactgaagggcgcccgcatcgctggctgcctgcacatgaccgtggagacggccgtcctcattgagaccctcgtcaccctgggtgctgaggtgcagtggtccagctgcaacatcttctccacccaggaccatgcggcggctgccattgccaaggctggcattccggtgtatgcctggaagggcgaaacggacgaggagtacctgtggtgcattgagcagaccctgtacttcaaggacgggcccctcaacatgattctggacgacgggggcgacctcaccaacctcatccacaccaagtacccgcagcttctgccaggcatccgaggcatctctgaggagaccacgactggggtccacaacctctacaagatgatggccaatgggatcctcaaggtgcctgccatcaatgtcaatgactccgtcaccaagagcaagtttgacaacctctatggctgccgggagtccctcatagatggcatcaagcgggccacagatgtgatgattgccggcaaggtagcggtggtagcaggctatggtgatgtgggcaagggctgtgcccaggccctgcggggtttcggagcccgcgtcatcatcaccgagattgaccccatcaacgcactgcaggctgccatggagggctatgaggtgaccaccatggatgaggcctgtcaggagggcaacatctttgtcaccaccacaggctgtattgacatcatccttggccggcactttgagcagatgaaggatgatgccattgtgtgtaacattggacactttgacgtggagatcgatgtcaagtggctcaacgagaacgccgtggagaaggtgaacatcaagccgcaggtggaccggtatcggttgaagaatgggcgccgcatcatcctgctggccgagggtcggctggtcaacctgggttgtgccatgggccaccccagcttcgtgatgagtaactccttcaccaaccaggtgatggcgcagatcgagctgtggacccatccagacaagtaccccgttggggttcatttcctgcccaagaagctggatgaggcagtggctgaagcccacctgggcaagctgaatgtgaagttgaccaagctaactgagaagcaagcccagtacctgggcatgtcctgtgatggccccttcaagccggatcactaccgctactgagagccaggtccagtggttcttcagcccatgacagatgagaaggggctatattgaagggcaaagaggaactgttgtttgaattttcctgagagcctggcttagtgctgggccttctcttaaacctcattacaatgaggttagtacttttagtccctgttttacaggggttagaatagactgttaaggggcaactgagaaagaacagagaagtgacagctaggggttgagaggggccagaaaaacatgaatgcaggcagatttcgtgaaatctgccaccactttataaccagatggttcctttcacaaccctgggtcaaaaagagaataatttggcctataa

SEQ ID NO: 1464 - DNA, 1881 bp, Homo sapiens; identical to SEQ ID NO: 1463

SEQ ID NO: 1465 - DNA, 1881 bp, Homo sapiens; identical to SEQ ID NO: 1463

SEQ ID NO: 1466 - DNA, 1982 bp, Homo sapiens
gaatttctgggggcgcaccgccaagagctggggatcgcagtatgtggtagggaagtgatgctgtctgaaggtgacatcctgttctcctctcttctgtcctctccatccttattttggccacctggtttgatcttgctcttctacctagttttttatgggttcctggctgcactcttctcattcacgatgtgggttatgcttcagactctcaacgatgaggttccaaaataccgtgaccagattcctagcccaggactcatggtttttccaaaaccagtgaccgcattggaatatacattcagtaggtctgatccaacttcgtatgcagggtacattgaagaccttaagaagtttctaaaaccatatactttagaagaacagaagaacctcacagtctgtcctgatggagcactttttgaacagaagggtccagtttatgttgcatgtcagtttcctatttcattacttcaagcatgcagtggtatgaatgatcctgattttggctattctcaaggaaacccttgtattcttgtgaaaatgaacagaataattggattaaagcctgaaggagtgccaaggatagattgtgtttcaaagaatgaagatataccaaatgtagcagtttatcctcataatggaatgatagacttaaaatatttcccatattatgggaaaaaactgcatgttgggtatctacagccattggttgctgttcaggtcagctttgctcctaacaacactgggaaagaagtaacagttgagtgcaagattgatggatcagccaacctaaaaagtcaggatgatcgtgacaagtttttgggacgagttatgttcaaaatcacagcacgtgcatagtatgagtaggatatctccacagagtaaatgttgtgttgtctgtcttcattttgtaacagctggaccttccattctagaattatgagaccaccttggagaaaggtgtgtggtacatgacattgggttacatcataacgtgcttccagatcatagtgttcagtgtcctctgaagtaactgcctgttgcctctgctgccctttgaaccagtgtacagtcgccagatagggaccggtgaacacctgattccaaacatgtaggatgggggtcttgtcctctttttatgtggtttaattgccaagtgtctaaagcttaatatgccgtgctatgtaaatattttatggatataacaactgtcatattttgatgtcaacagagttttagggataaaatggtacccggccaacatcaagtgactttatagctgcaagaaatgtggtatgtggagaagttctgtatgtgaggaaggaaaaaaagaaaataaaagtgtgtttgaaaaatattatcttgggttctttgtaaaatttattttttacatgctgaattagcctcgatctttttgattaagagcacaaacttttttttgtaaaacatgtaaaaaaaaaactgggattaatttttagtgttggaactgcctcttattttaggctgtagataaaatagcatttttaggttagccagtgtgactatgcacctaattttttatgagattaaattcataagacttaatttgtacaatagtttgtgaaatatcttgttactgcttttatttagcagactgtggactgtaataaagtatataaattgtgaaatataaaaacttggaacttattcaaagcttcaaagcaaacaacagttttgtgtaagcattctttcccctccagtattaggtgtattcttggtaggattatttgtgataatttgggctacttggctgagaaagttgtgcttcccatatgatctgtgttgcttcttgttttttcttaaggctattgtttattgttacttttctcctttttaaaaaaaaaaaaaggcagccgggcgcagtggctcacgcctgtagtcccagcactttgggaggccgaggcgggcggatcacaaggtcaagagatcgagaccatcctggccaa

SEQ ID NO: 1467 - DNA, 2143 bp, Homo sapiens
ggggaggggacgattaagttccctcagagaggaagccgcgggccgactggagtcgttttcgtgctctccgcacccgcccgccgcgggtagcatcttctcagcgccccggcgcccaggaacgcccaggaaacccagtcctcctcctaagcaacctgcggcgcggggacgcccgccttttgctattattataaacgatcgcagtatgtggtagggaagtgatgctgtctgaaggtgacatcctgttctcctctcttctgtcctctccatccttattttggccacctggtttgatcttgctcttctacctagttttttatgggttcctggctgcactcttctcattcacgatgtgggttatgcttcagactctcaacgatgaggttccaaaataccgtgaccagattcctagcccaggactcatggtttttccaaaaccagtgaccgcattggaatatacattcagtaggtctgatccaacttcgtatgcagggtacattgaagaccttaagaagtttctaaaaccatatactttagaagaacagaagaacctcacagtctgtcctgatggagcactttttgaacagaagggtccagtttatgttgcatgtcagtttcctatttcattacttcaagcatgcagtggtatgaatgatcctgattttggctattctcaaggaaacccttgtattcttgtgaaaatgaacagaataattggattaaagcctgaaggagtgccaaggatagattgtgtttcaaagaatgaagatataccaaatgtagcagtttatcctcataatggaatgatagacttaaaatatttcccatattatgggaaaaaactgcatgttgggtatctacagccattggttgctgttcaggtcagctttgctcctaacaacactgggaaagaagtaacagttgagtgcaagattgatggatcagccaacctaaaaagtcaggatgatcgtgacaagtttttgggacgagttatgttcaaaatcacagcacgtgcatagtatgagtaggatatctccacagagtaaatgttgtgttgtctgtcttcattttgtaacagctggaccttccattctagaattatgagaccaccttggagaaaggtgtgtggtacatgacattgggttacatcataacgtgcttccagatcatagtgttcagtgtcctctgaagtaactgcctgttgcctctgctgccctttgaaccagtgtacagtcgccagatagggaccggtgaacacctgattccaaacatgtaggatgggggtcttgtcctctttttatgtggtttaattgccaagtgtctaaagcttaatatgccgtgctatgtaaatattttatggatataacaactgtcatattttgatgtcaacagagttttagggataaaatggtacccggccaacatcaagtgactttatagctgcaagaaatgtggtatgtggagaagttctgtatgtgaggaaggaaaaaaagaaaataaaagtgtgtttgaaaaatattatcttgggttctttgtaaaatttattttttacatgctgaattagcctcgatctttttgattaagagcacaaacttttttttgtaaaacatgtaaaaaaaaaactgggattaatttttagtgttggaactgcctcttattttaggctgtagataaaatagcatttttaggttagccagtgtgactatgcacctaattttttatgagattaaattcataagacttaatttgtacaatagtttgtgaaatatcttgttactgcttttatttagcagactgtggactgtaataaagtatataaattgtgaaatataaaaacttggaacttattcaaagcttcaaagcaaacaacagttttgtgtaagcattctttcccctccagtattaggtgtattcttggtaggattatttgtgataatttgggctacttggctgagaaagttgtgcttcccatatgatctgtgttgcttcttgttttttcttaaggctattgtttattgttacttttctcctttttaaaaaaaaaaaaaggcagccgggcgcagtggctcacgcctgtagtcccagcactttgggaggccgaggcgggcggatcacaaggtcaagagatcgagaccatcctggccaa

SEQ ID NO: 1468 - DNA, 1982 bp, Homo sapiens; identical to SEQ ID NO: 1466

SEQ ID NO: 1469 - DNA, 1858 bp, Homo sapiens
gtttgatcttgctcttctacctagttttttatgggttcctggctgcactcttctcattcacgatgtgggttatgcttcagactctcaacgatgaggttccaaaataccgtgaccagattcctagcccaggactcatggtttttccaaaaccagtgaccgcattggaatatacattcagtaggtctgatccaacttcgtatgcagggtacattgaagaccttaagaagtttctaaaaccatatactttagaagaacagaagaacctcacagtctgtcctgatggagcactttttgaacagaagggtccagtttatgttgcatgtcagtttcctatttcattacttcaagcatgcagtggtatgaatgatcctgattttggctattctcaaggaaacccttgtattcttgtgaaaatgaacagaataattggattaaagcctgaaggagtgccaaggatagattgtgtttcaaagaatgaagatataccaaatgtagcagtttatcctcataatggaatgatagacttaaaatatttcccatattatgggaaaaaactgcatgttgggtatctacagccattggttgctgttcaggtcagctttgctcctaacaacactgggaaagaagtaacagttgagtgcaagattgatggatcagccaacctaaaaagtcaggatgatcgtgacaagtttttgggacgagttatgttcaaaatcacagcacgtgcatagtatgagtaggatatctccacagagtaaatgttgtgttgtctgtcttcattttgtaacagctggaccttccattctagaattatgagaccaccttggagaaaggtgtgtggtacatgacattgggttacatcataacgtgcttccagatcatagtgttcagtgtcctctgaagtaactgcctgttgcctctgctgccctttgaaccagtgtacagtcgccagatagggaccggtgaacacctgattccaaacatgtaggatgggggtcttgtcctctttttatgtggtttaattgccaagtgtctaaagcttaatatgccgtgctatgtaaatattttatggatataacaactgtcatattttgatgtcaacagagttttagggataaaatggtacccggccaacatcaagtgactttatagctgcaagaaatgtggtatgtggagaagttctgtatgtgaggaaggaaaaaaagaaaataaaagtgtgtttgaaaaatattatcttgggttctttgtaaaatttattttttacatgctgaattagcctcgatctttttgattaagagcacaaacttttttttgtaaaacatgtaaaaaaaaaactgggattaatttttagtgttggaactgcctcttattttaggctgtagataaaatagcatttttaggttagccagtgtgactatgcacctaattttttatgagattaaattcataagacttaatttgtacaatagtttgtgaaatatcttgttactgcttttatttagcagactgtggactgtaataaagtatataaattgtgaaatataaaaacttggaacttattcaaagcttcaaagcaaacaacagttttgtgtaagcattctttcccctccagtattaggtgtattcttggtaggattatttgtgataatttgggctacttggctgagaaagttgtgcttcccatatgatctgtgttgcttcttgttttttcttaaggctattgtttattgttacttttctcctttttaaaaaaaaaaaaaggcagccgggcgcagtggctcacgcctgtagtcccagcactttgggaggccgaggcgggcggatcacaaggtcaagagatcgagaccatcctggccaa

SEQ ID NO: 1470 - DNA, 1367 bp, Homo sapiens
agctcctctcgccgtccgcgcgcacaccatgacgaagaacgagaagaagtccctcaaccagagcctggccgagtggaagctcttcatctacaacccgaccaccggagaattcctggggcgcaccgccaagagctggggtttgatcttgctcttctacctagttttttatgggttcctggctgcactcttctcattcacgatgtgggttatgcttcagactctcaacgatgaggttccaaaataccgtgaccagattcctagcccaggactcatggtttttccaaaaccagtgaccgcattggaatatacattcagtaggtctgatccaacttcgtatgcagggtacattgaagaccttaagaagtttctaaaaccatatactttagaagaacagaagaacctcacagtctgtcctgatggagcactttttgaacagaagggtccagtttatgttgcatgtcagtttcctatttcattacttcaagcatgcagtggtatgaatgatcctgattttggctattctcaaggaaacccttgtattcttgtgaaaatgaacagaataattggattaaagcctgaaggagtgccaaggatagattgtgtttcaaagaatgaagatataccaaatgtagcagtttatcctcataatggaatgatagacttaaaatatttcccatattatgggaaaaaactgcatgttgggtatctacagccattggttgctgttcaggtcagctttgctcctaacaacactgggaaagaagtaacagttgagtgcaagattgatggatcagccaacctaaaaagtcaggatgatcgtgacaagtttttgggacgagttatgttcaaaatcacagcacgtgcatagtatgagtaggatatctccacagagtaaatgttgtgttgtctgtcttcattttgtaacagctggaccttccattctagaattatgagaccaccttggagaaaggtgtgtggtacatgacattgggttacatcataacgtgcttccagatcatagtgttcagtgtcctctgaagtaactgcctgttgcctctgctgccctttgaaccagtgtacagtcgccagatagggaccggtgaacacctgattccaaacatgtaggatgggggtcttgtcctctttttatgtggtttaattgccaagtgtctaaagcttaatatgccgtgctatgtaaatattttatggatataacaactgtcatattttgatgtcaacagagttttagggataaaatggtacccggccaacatcaagtgactttatagctgcaagaaatgtggtatgtggagaagttctgtatgtgaggaaggaaaaaaagaaaataaaagtgtgtttgaaaaata

SEQ ID NO: 1471 - DNA, 1982 bp, Homo sapiens; identical to SEQ ID NO: 1466

SEQ ID NO: 1472 - DNA, 1858 bp, Homo sapiens; identical to SEQ ID NO: 1469

SEQ ID NO: 1473 - DNA, 7912 bp, Homo sapiens
gcccgcgccggctgtgctgcacagggggaggagagggaaccccaggcgcgagcgggaagaggggacctgcagccacaacttctctggtcctctgcatcccttctgtccctccacccgtccccttccccaccctctggcccccaccttcttggaggcgacaacccccgggaggcattagaagggatttttcccgcaggttgcgaagggaagcaaacttggtggcaacttgcctcccggtgcgggcgtctctcccccaccgtctcaacatgcttaggggtccggggcccgggctgctgctgctggccgtccagtgcctggggacagcggtgccctccacgggagcctcgaagagcaagaggcaggctcagcaaatggttcagccccagtccccggtggctgtcagtcaaagcaagcccggttgttatgacaatggaaaacactatcagataaatcaacagtgggagcggacctacctaggcaatgcgttggtttgtacttgttatggaggaagccgaggttttaactgcgagagtaaacctgaagctgaagagacttgctttgacaagtacactgggaacacttaccgagtgggtgacacttatgagcgtcctaaagactccatgatctgggactgtacctgcatcggggctgggcgagggagaataagctgtaccatcgcaaaccgctgccatgaagggggtcagtcctacaagattggtgacacctggaggagaccacatgagactggtggttacatgttagagtgtgtgtgtcttggtaatggaaaaggagaatggacctgcaagcccatagctgagaagtgttttgatcatgctgctgggacttcctatgtggtcggagaaacgtgggagaagccctaccaaggctggatgatggtagattgtacttgcctgggagaaggcagcggacgcatcacttgcacttctagaaatagatgcaacgatcaggacacaaggacatcctatagaattggagacacctggagcaagaaggataatcgaggaaacctgctccagtgcatctgcacaggcaacggccgaggagagtggaagtgtgagaggcacacctctgtgcagaccacatcgagcggatctggccccttcaccgatgttcgtgcagctgtttaccaaccgcagcctcacccccagcctcctccctatggccactgtgtcacagacagtggtgtggtctactctgtggggatgcagtggctgaagacacaaggaaataagcaaatgctttgcacgtgcctgggcaacggagtcagctgccaagagacagctgtaacccagacttacggtggcaactcaaatggagagccatgtgtcttaccattcacctacaatggcaggacgttctactcctgcaccacagaagggcgacaggacggacatctttggtgcagcacaacttcgaattatgagcaggaccagaaatactctttctgcacagaccacactgttttggttcagactcgaggaggaaattccaatggtgccttgtgccacttccccttcctatacaacaaccacaattacactgattgcacttctgagggcagaagagacaacatgaagtggtgtgggaccacacagaactatgatgccgaccagaagtttgggttctgccccatggctgcccacgaggaaatctgcacaaccaatgaaggggtcatgtaccgcattggagatcagtgggataagcagcatgacatgggtcacatgatgaggtgcacgtgtgttgggaatggtcgtggggaatggacatgcattgcctactcgcagcttcgagatcagtgcattgttgatgacatcacttacaatgtgaacgacacattccacaagcgtcatgaagaggggcacatgctgaactgtacatgcttcggtcagggtcggggcaggtggaagtgtgatcccgtcgaccaatgccaggattcagagactgggacgttttatcaaattggagattcatgggagaagtatgtgcatggtgtcagataccagtgctactgctatggccgtggcattggggagtggcattgccaacctttacagacctatccaagctcaagtggtcctgtcgaagtatttatcactgagactccgagtcagcccaactcccaccccatccagtggaatgcaccacagccatctcacatttccaagtacattctcaggtggagacctaaaaattctgtaggccgttggaaggaagctaccataccaggccacttaaactcctacaccatcaaaggcctgaagcctggtgtggtatacgagggccagctcatcagcatccagcagtacggccaccaagaagtgactcgctttgacttcaccaccaccagcaccagcacacctgtgaccagcaacaccgtgacaggagagacgactcccttttctcctcttgtggccacttctgaatctgtgaccgaaatcacagccagtagctttgtggtctcctgggtctcagcttccgacaccgtgtcgggattccgggtggaatatgagctgagtgaggagggagatgagccacagtacctggatcttccaagcacagccacttctgtgaacatccctgacctgcttcctggccgaaaatacattgtaaatgtctatcagatatctgaggatggggagcagagtttgatcctgtctacttcacaaacaacagcgcctgatgcccctcctgacccgactgtggaccaagttgatgacacctcaattgttgttcgctggagcagaccccaggctcccatcacagggtacagaatagtctattcgccatcagtagaaggtagcagcacagaactcaaccttcctgaaactgcaaactccgtcaccctcagtgacttgcaacctggtgttcagtataacatcactatctatgctgtggaagaaaatcaagaaagtacacctgttgtcattcaacaagaaaccactggcaccccacgctcagatacagtgccctctcccagggacctgcagtttgtggaagtgacagacgtgaaggtcaccatcatgtggacaccgcctgagagtgcagtgaccggctaccgtgtggatgtgatccccgtcaacctgcctggcgagcacgggcagaggctgcccatcagcaggaacacctttgcagaagtcaccgggctgtcccctggggtcacctattacttcaaagtctttgcagtgagccatgggagggagagcaagcctctgactgctcaacagacaaccaaactggatgctcccactaacctccagtttgtcaatgaaactgattctactgtcctggtgagatggactccacctcgggcccagataacaggataccgactgaccgtgggccttacccgaagaggacagcccaggcagtacaatgtgggtccctctgtctccaagtacccactgaggaatctgcagcctgcatctgagtacaccgtatccctcgtggccataaagggcaaccaagagagccccaaagccactggagtctttaccacactgcagcctgggagctctattccaccttacaacaccgaggtgactgagaccaccattgtgatcacatggacgcctgctccaagaattggttttaagctgggtgtacgaccaagccagggaggagaggcaccacgagaagtgacttcagactcaggaagcatcgttgtgtccggcttgactccaggagtagaatacgtctacaccatccaagtcctgagagatggacaggaaagagatgcgccaattgtaaacaaagtggtgacaccattgtctccaccaacaaacttgcatctggaggcaaaccctgacactggagtgctcacagtctcctgggagaggagcaccaccccagacattactggttatagaattaccacaacccctacaaacggccagcagggaaattctttggaagaagtggtccatgctgatcagagctcctgcacttttgataacctgagtcccggcctggagtacaatgtcagtgtttacactgtcaaggatgacaaggaaagtgtccctatctctgataccatcatcccagctgttcctcctcccactgacctgcgattcaccaacattggtccagacaccatgcgtgtcacctgggctccacccccatccattgatttaaccaacttcctggtgcgttactcacctgtgaaaaatgaggaagatgttgcagagttgtcaatttctccttcagacaatgcagtggtcttaacaaatctcctgcctggtacagaatatgtagtgagtgtctccagtgtctacgaacaacatgagagcacacctcttagaggaagacagaaaacaggtcttgattccccaactggcattgacttttctgatattactgccaactcttttactgtgcactggattgctcctcgagccaccatcactggctacaggatccgccatcatcccgagcacttcagtgggagacctcgagaagatcgggtgccccactctcggaattccatcaccctcaccaacctcactccaggcacagagtatgtggtcagcatcgttgctcttaatggcagagaggaaagtcccttattgattggccaacaatcaacagtttctgatgttccgagggacctggaagttgttgctgcgacccccaccagcctactgatcagctgggatgctcctgctgtcacagtgagatattacaggatcacttacggagagacaggaggaaatagccctgtccaggagttcactgtgcctgggagcaagtctacagctaccatcagcggccttaaacctggagttgattataccatcactgtgtatgctgtcactggccgtggagacagccccgcaagcagcaagccaatttccattaattaccgaacagaaattgacaaaccatcccagatgcaagtgaccgatgttcaggacaacagcattagtgtcaagtggctgccttcaagttcccctgttactggttacagagtaaccaccactcccaaaaatggaccaggaccaacaaaaactaaaactgcaggtccagatcaaacagaaatgactattgaaggcttgcagcccacagtggagtatgtggttagtgtctatgctcagaatccaagcggagagagtcagcctctggttcagactgcagtaaccactattcctgcaccaactgacctgaagttcactcaggtcacacccacaagcctgagcgcccagtggacaccacccaatgttcagctcactggatatcgagtgcgggtgacccccaaggagaagaccggaccaatgaaagaaatcaaccttgctcctgacagctcatccgtggttgtatcaggacttatggtggccaccaaatatgaagtgagtgtctatgctcttaaggacactttgacaagcagaccagctcagggagttgtcaccactctggagaatgtcagcccaccaagaagggctcgtgtgacagatgctactgagaccaccatcaccattagctggagaaccaagactgagacgatcactggcttccaagttgatgccgttccagccaatggccagactccaatccagagaaccatcaagccagatgtcagaagctacaccatcacaggtttacaaccaggcactgactacaagatctacctgtacaccttgaatgacaatgctcggagctcccctgtggtcatcgacgcctccactgccattgatgcaccatccaacctgcgtttcctggccaccacacccaattccttgctggtatcatggcagccgccacgtgccaggattaccggctacatcatcaagtatgagaagcctgggtctcctcccagagaagtggtccctcggccccgccctggtgtcacagaggctactattactggcctggaaccgggaaccgaatatacaatttatgtcattgccctgaagaataatcagaagagcgagcccctgattggaaggaaaaagacaggacaagaagctctctctcagacaaccatctcatgggccccattccaggacacttctgagtacatcatttcatgtcatcctgttggcactgatgaagaacccttacagttcagggttcctggaacttctaccagtgccactctgacaggcctcaccagaggtgccacctacaacatcatagtggaggcactgaaagaccagcagaggcataaggttcgggaagaggttgttaccgtgggcaactctgtcaacgaaggcttgaaccaacctacggatgactcgtgctttgacccctacacagtttcccattatgccgttggagatgagtgggaacgaatgtctgaatcaggctttaaactgttgtgccagtgcttaggctttggaagtggtcatttcagatgtgattcatctagatggtgccatgacaatggtgtgaactacaagattggagagaagtgggaccgtcagggagaaaatggccagatgatgagctgcacatgtcttgggaacggaaaaggagaattcaagtgtgaccctcatgaggcaacgtgttatgatgatgggaagacataccacgtaggagaacagtggcagaaggaatatctcggtgccatttgctcctgcacatgctttggaggccagcggggctggcgctgtgacaactgccgcagacctgggggtgaacccagtcccgaaggcactactggccagtcctacaaccagtattctcagagataccatcagagaacaaacactaatgttaattgcccaattgagtgcttcatgcctttagatgtacaggctgacagagaagattcccgagagtaaatcatctttccaatccagaggaacaagcatgtctctctgccaagatccatctaaactggagtgatgttagcagacccagcttagagttcttctttctttcttaagccctttgctctggaggaagttctccagcttcagctcaactcacagcttctccaagcatcaccctgggagtttcctgagggttttctcataaatgagggctgcacattgcctgttctgcttcgaagtattcaataccgctcagtattttaaatgaagtgattctaagatttggtttgggatcaataggaaagcatatgcagccaaccaagatgcaaatgttttgaaatgatatgaccaaaattttaagtaggaaagtcacccaaacacttctgctttcacttaagtgtctggcccgcaatactgtaggaacaagcatgatcttgttactgtgatattttaaatatccacagtactcactttttccaaatgatcctagtaattgcctagaaatatctttctcttacctgttatttatcaatttttcccagtatttttatacggaaaaaattgtattgaaaacacttagtatgcagttgataagaggaatttggtataattatggtgggtgattattttttatactgtatgtgccaaagctttactactgtggaaagacaactgttttaataaaagatttacattccacaacttgaagttcatctatttgatataagacaccttcgggggaaataattcctgtgaatattctttttcaattcagcaaacatttgaaaatctatgatgtgcaagtctaattgttgatttcagtacaagattttctaaatcagttgctacaaaaactgattggtttttgtcacttcatctcttcactaatggagatagctttacactttctgctttaatagatttaagtggaccccaatatttattaaaattgctagtttaccgttcagaagtataatagaaataatctttagttgctcttttctaaccattgtaattcttcccttcttccctccacctttccttcattgaataaacctctgttcaaagagattgcctgcaagggaaataaaaatgactaagatattaaaaaaaaaaaaaaaaaa

SEQ ID NO: 1474 - DNA, 8647 bp, Homo sapiens
gcccgcgccggctgtgctgcacagggggaggagagggaaccccaggcgcgagcgggaagaggggacctgcagccacaacttctctggtcctctgcatcccttctgtccctccacccgtccccttccccaccctctggcccccaccttcttggaggcgacaacccccgggaggcattagaagggatttttcccgcaggttgcgaagggaagcaaacttggtggcaacttgcctcccggtgcgggcgtctctcccccaccgtctcaacatgcttaggggtccggggcccgggctgctgctgctggccgtccagtgcctggggacagcggtgccctccacgggagcctcgaagagcaagaggcaggctcagcaaatggttcagccccagtccccggtggctgtcagtcaaagcaagcccggttgttatgacaatggaaaacactatcagataaatcaacagtgggagcggacctacctaggcaatgcgttggtttgtacttgttatggaggaagccgaggttttaactgcgagagtaaacctgaagctgaagagacttgctttgacaagtacactgggaacacttaccgagtgggtgacacttatgagcgtcctaaagactccatgatctgggactgtacctgcatcggggctgggcgagggagaataagctgtaccatcgcaaaccgctgccatgaagggggtcagtcctacaagattggtgacacctggaggagaccacatgagactggtggttacatgttagagtgtgtgtgtcttggtaatggaaaaggagaatggacctgcaagcccatagctgagaagtgttttgatcatgctgctgggacttcctatgtggtcggagaaacgtgggagaagccctaccaaggctggatgatggtagattgtacttgcctgggagaaggcagcggacgcatcacttgcacttctagaaatagatgcaacgatcaggacacaaggacatcctatagaattggagacacctggagcaagaaggataatcgaggaaacctgctccagtgcatctgcacaggcaacggccgaggagagtggaagtgtgagaggcacacctctgtgcagaccacatcgagcggatctggccccttcaccgatgttcgtgcagctgtttaccaaccgcagcctcacccccagcctcctccctatggccactgtgtcacagacagtggtgtggtctactctgtggggatgcagtggctgaagacacaaggaaataagcaaatgctttgcacgtgcctgggcaacggagtcagctgccaagagacagctgtaacccagacttacggtggcaactcaaatggagagccatgtgtcttaccattcacctacaatggcaggacgttctactcctgcaccacagaagggcgacaggacggacatctttggtgcagcacaacttcgaattatgagcaggaccagaaatactctttctgcacagaccacactgttttggttcagactcgaggaggaaattccaatggtgccttgtgccacttccccttcctatacaacaaccacaattacactgattgcacttctgagggcagaagagacaacatgaagtggtgtgggaccacacagaactatgatgccgaccagaagtttgggttctgccccatggctgcccacgaggaaatctgcacaaccaatgaaggggtcatgtaccgcattggagatcagtgggataagcagcatgacatgggtcacatgatgaggtgcacgtgtgttgggaatggtcgtggggaatggacatgcattgcctactcgcagcttcgagatcagtgcattgttgatgacatcacttacaatgtgaacgacacattccacaagcgtcatgaagaggggcacatgctgaactgtacatgcttcggtcagggtcggggcaggtggaagtgtgatcccgtcgaccaatgccaggattcagagactgggacgttttatcaaattggagattcatgggagaagtatgtgcatggtgtcagataccagtgctactgctatggccgtggcattggggagtggcattgccaacctttacagacctatccaagctcaagtggtcctgtcgaagtatttatcactgagactccgagtcagcccaactcccaccccatccagtggaatgcaccacagccatctcacatttccaagtacattctcaggtggagacctaaaaattctgtaggccgttggaaggaagctaccataccaggccacttaaactcctacaccatcaaaggcctgaagcctggtgtggtatacgagggccagctcatcagcatccagcagtacggccaccaagaagtgactcgctttgacttcaccaccaccagcaccagcacacctgtgaccagcaacaccgtgacaggagagacgactcccttttctcctcttgtggccacttctgaatctgtgaccgaaatcacagccagtagctttgtggtctcctgggtctcagcttccgacaccgtgtcgggattccgggtggaatatgagctgagtgaggagggagatgagccacagtacctggatcttccaagcacagccacttctgtgaacatccctgacctgcttcctggccgaaaatacattgtaaatgtctatcagatatctgaggatggggagcagagtttgatcctgtctacttcacaaacaacagcgcctgatgcccctcctgacccgactgtggaccaagttgatgacacctcaattgttgttcgctggagcagaccccaggctcccatcacagggtacagaatagtctattcgccatcagtagaaggtagcagcacagaactcaaccttcctgaaactgcaaactccgtcaccctcagtgacttgcaacctggtgttcagtataacatcactatctatgctgtggaagaaaatcaagaaagtacacctgttgtcattcaacaagaaaccactggcaccccacgctcagatacagtgccctctcccagggacctgcagtttgtggaagtgacagacgtgaaggtcaccatcatgtggacaccgcctgagagtgcagtgaccggctaccgtgtggatgtgatccccgtcaacctgcctggcgagcacgggcagaggctgcccatcagcaggaacacctttgcagaagtcaccgggctgtcccctggggtcacctattacttcaaagtctttgcagtgagccatgggagggagagcaagcctctgactgctcaacagacaaccaaactggatgctcccactaacctccagtttgtcaatgaaactgattctactgtcctggtgagatggactccacctcgggcccagataacaggataccgactgaccgtgggccttacccgaagaggacagcccaggcagtacaatgtgggtccctctgtctccaagtacccactgaggaatctgcagcctgcatctgagtacaccgtatccctcgtggccataaagggcaaccaagagagccccaaagccactggagtctttaccacactgcagcctgggagctctattccaccttacaacaccgaggtgactgagaccaccattgtgatcacatggacgcctgctccaagaattggttttaagctgggtgtacgaccaagccagggaggagaggcaccacgagaagtgacttcagactcaggaagcatcgttgtgtccggcttgactccaggagtagaatacgtctacaccatccaagtcctgagagatggacaggaaagagatgcgccaattgtaaacaaagtggtgacaccattgtctccaccaacaaacttgcatctggaggcaaaccctgacactggagtgctcacagtctcctgggagaggagcaccaccccagacattactggttatagaattaccacaacccctacaaacggccagcagggaaattctttggaagaagtggtccatgctgatcagagctcctgcacttttgataacctgagtcccggcctggagtacaatgtcagtgtttacactgtcaaggatgacaaggaaagtgtccctatctctgataccatcatcccagaggtgccccaactcactgacctaagctttgttgatataaccgattcaagcatcggcctgaggtggaccccgctaaactcttccaccattattgggtaccgcatcacagtagttgcggcaggagaaggtatccctatttttgaagattttgtggactcctcagtaggatactacacagtcacagggctggagccgggcattgactatgatatcagcgttatcactctcattaatggcggcgagagtgcccctactacactgacacaacaaacggctgttcctcctcccactgacctgcgattcaccaacattggtccagacaccatgcgtgtcacctgggctccacccccatccattgatttaaccaacttcctggtgcgttactcacctgtgaaaaatgaggaagatgttgcagagttgtcaatttctccttcagacaatgcagtggtcttaacaaatctcctgcctggtacagaatatgtagtgagtgtctccagtgtctacgaacaacatgagagcacacctcttagaggaagacagaaaacaggtcttgattccccaactggcattgacttttctgatattactgccaactcttttactgtgcactggattgctcctcgagccaccatcactggctacaggatccgccatcatcccgagcacttcagtgggagacctcgagaagatcgggtgccccactctcggaattccatcaccctcaccaacctcactccaggcacagagtatgtggtcagcatcgttgctcttaatggcagagaggaaagtcccttattgattggccaacaatcaacagtttctgatgttccgagggacctggaagttgttgctgcgacccccaccagcctactgatcagctgggatgctcctgctgtcacagtgagatattacaggatcacttacggagagacaggaggaaatagccctgtccaggagttcactgtgcctgggagcaagtctacagctaccatcagcggccttaaacctggagttgattataccatcactgtgtatgctgtcactggccgtggagacagccccgcaagcagcaagccaatttccattaattaccgaacagaaattgacaaaccatcccagatgcaagtgaccgatgttcaggacaacagcattagtgtcaagtggctgccttcaagttcccctgttactggttacagagtaaccaccactcccaaaaatggaccaggaccaacaaaaactaaaactgcaggtccagatcaaacagaaatgactattgaaggcttgcagcccacagtggagtatgtggttagtgtctatgctcagaatccaagcggagagagtcagcctctggttcagactgcagtaaccaacattgatcgccctaaaggactggcattcactgatgtggatgtcgattccatcaaaattgcttgggaaagcccacaggggcaagtttccaggtacagggtgacctactcgagccctgaggatggaatccatgagctattccctgcacctgatggtgaagaagacactgcagagctgcaaggcctcagaccgggttctgagtacacagtcagtgtggttgccttgcacgatgatatggagagccagcccctgattggaacccagtccacagctattcctgcaccaactgacctgaagttcactcaggtcacacccacaagcctgagcgcccagtggacaccacccaatgttcagctcactggatatcgagtgcgggtgacccccaaggagaagaccggaccaatgaaagaaatcaaccttgctcctgacagctcatccgtggttgtatcaggacttatggtggccaccaaatatgaagtgagtgtctatgctcttaaggacactttgacaagcagaccagctcagggagttgtcaccactctggagaatgtcagcccaccaagaagggctcgtgtgacagatgctactgagaccaccatcaccattagctggagaaccaagactgagacgatcactggcttccaagttgatgccgttccagccaatggccagactccaatccagagaaccatcaagccagatgtcagaagctacaccatcacaggtttacaaccaggcactgactacaagatctacctgtacaccttgaatgacaatgctcggagctcccctgtggtcatcgacgcctccactgccattgatgcaccatccaacctgcgtttcctggccaccacacccaattccttgctggtatcatggcagccgccacgtgccaggattaccggctacatcatcaagtatgagaagcctgggtctcctcccagagaagtggtccctcggccccgccctggtgtcacagaggctactattactggcctggaaccgggaaccgaatatacaatttatgtcattgccctgaagaataatcagaagagcgagcccctgattggaaggaaaaagacagttcaaaagacccctttcgtcacccaccctgggtatgacactggaaatggtattcagcttcctggcacttctggtcagcaacccagtgttgggcaacaaatgatctttgaggaacatggttttaggcggaccacaccgcccacaacggccacccccataaggcataggccaagaccatacccgccgaatgtaggacaagaagctctctctcagacaaccatctcatgggccccattccaggacacttctgagtacatcatttcatgtcatcctgttggcactgatgaagaacccttacagttcagggttcctggaacttctaccagtgccactctgacaggcctcaccagaggtgccacctacaacatcatagtggaggcactgaaagaccagcagaggcataaggttcgggaagaggttgttaccgtgggcaactctgtcaacgaaggcttgaaccaacctacggatgactcgtgctttgacccctacacagtttcccattatgccgttggagatgagtgggaacgaatgtctgaatcaggctttaaactgttgtgccagtgcttaggctttggaagtggtcatttcagatgtgattcatctagatggtgccatgacaatggtgtgaactacaagattggagagaagtgggaccgtcagggagaaaatggccagatgatgagctgcacatgtcttgggaacggaaaaggagaattcaagtgtgaccctcatgaggcaacgtgttatgatgatgggaagacataccacgtaggagaacagtggcagaaggaatatctcggtgccatttgctcctgcacatgctttggaggccagcggggctggcgctgtgacaactgccgcagacctgggggtgaacccagtcccgaaggcactactggccagtcctacaaccagtattctcagagataccatcagagaacaaacactaatgttaattgcccaattgagtgcttcatgcctttagatgtacaggctgacagagaagattcccgagagtaaatcatctttccaatccagaggaacaagcatgtctctctgccaagatccatctaaactggagtgatgttagcagacccagcttagagttcttctttctttcttaagccctttgctctggaggaagttctccagcttcagctcaactcacagcttctccaagcatcaccctgggagtttcctgagggttttctcataaatgagggctgcacattgcctgttctgcttcgaagtattcaataccgctcagtattttaaatgaagtgattctaagatttggtttgggatcaataggaaagcatatgcagccaaccaagatgcaaatgttttgaaatgatatgaccaaaattttaagtaggaaagtcacccaaacacttctgctttcacttaagtgtctggcccgcaatactgtaggaacaagcatgatcttgttactgtgatattttaaatatccacagtactcactttttccaaatgatcctagtaattgcctagaaatatctttctcttacctgttatttatcaatttttcccagtatttttatacggaaaaaattgtattgaaaacacttagtatgcagttgataagaggaatttggtataattatggtgggtgattattttttatactgtatgtgccaaagctttactactgtggaaagacaactgttttaataaaagatttacattccacaacttgaagttcatctatttgatataagacaccttcgggggaaataattcctgtgaatattctttttcaattcagcaaacatttgaaaatctatgatgtgcaagtctaattgttgatttcagtacaagattttctaaatcagttgctacaaaaactgattggtttttgtcacttcatctcttcactaatggagatagctttacactttctgctttaatagatttaagtggaccccaatatttattaaaattgctagtttaccgttcagaagtataatagaaataatctttagttgctcttttctaaccattgtaattcttcccttcttccctccacctttccttcattgaataaacctctgttcaaagagattgcctgcaagggaaataaaaatgactaagatattaaaaaaaaaaaaaaaaaa

SEQ ID NO: 1475 - DNA, 7959 bp, Homo sapiens
ggcggggcggggacagcccggcgggtctctcctcccccgcgccccgggcctccagaggggcgggaggggaccgtcccatataagccccggctcccggcgctcggacgcccgcgccggctgtgctgcacagggggaggagagggaaccccaggcgcgagcgggaagaggggacctgcagccacaacttctctggtcctctgcatcccttctgtccctccacccgtccccttccccaccctctggcccccaccttcttggaggcgacaacccccgggaggcattagaagggatttttcccgcaggttgcgaagggaagcaaacttggtggcaacttgcctcccggtgcgggcgtctctcccccaccgtctcaacatgcttaggggtccggggcccgggctgctgctgctggccgtcctgtgcctggggacagcggtgccctccacgggagcctcgaagagcaagaggcaggctcagcaaatggttcagccccagtccccggtggctgtcagtcaaagcaagcccggttgttatgacaatggaaaacactatcagataaatcaacagtgggagcggacctacctaggcaatgcgttggtttgtacttgttatggaggaagccgaggttttaactgcgagagtaaacctgaagctgaagagacttgctttgacaagtacactgggaacacttaccgagtgggtgacacttatgagcgtcctaaagactccatgatctgggactgtacctgcatcggggctgggcgagggagaataagctgtaccatcgcaaaccgctgccatgaagggggtcagtcctacaagattggtgacacctggaggagaccacatgagactggtggttacatgttagagtgtgtgtgtcttggtaatggaaaaggagaatggacctgcaagcccatagctgagaagtgttttgatcatgctgctgggacttcctatgtggtcggagaaacgtgggagaagccctaccaaggctggatgatggtagattgtacttgcctgggagaaggcagcggacgcatcacttgcacttctagaaatagatgcaacgatcaggacacaaggacatcctatagaattggagacacctggagcaagaaggataatcgaggaaacctgctccagtgcatctgcacaggcaacggccgaggagagtggaagtgtgagaggcacacctctgtgcagaccacatcgagcggatctggccccttcaccgatgttcgtgcagctgtttaccaaccgcagcctcacccccagcctcctccctatggccactgtgtcacagacagtggtgtggtctactctgtggggatgcagtggctgaagacacaaggaaataagcaaatgctttgcacgtgcctgggcaacggagtcagctgccaagagacagctgtaacccagacttacggtggcaactcaaatggagagccatgtgtcttaccattcacctacaatggcaggacgttctactcctgcaccacagaagggcgacaggacggacatctttggtgcagcacaacttcgaattatgagcaggaccagaaatactctttctgcacagaccacactgttttggttcagactcgaggaggaaattccaatggtgccttgtgccacttccccttcctatacaacaaccacaattacactgattgcacttctgagggcagaagagacaacatgaagtggtgtgggaccacacagaactatgatgccgaccagaagtttgggttctgccccatggctgcccacgaggaaatctgcacaaccaatgaaggggtcatgtaccgcattggagatcagtgggataagcagcatgacatgggtcacatgatgaggtgcacgtgtgttgggaatggtcgtggggaatggacatgcattgcctactcgcagcttcgagatcagtgcattgttgatgacatcacttacaatgtgaacgacacattccacaagcgtcatgaagaggggcacatgctgaactgtacatgcttcggtcagggtcggggcaggtggaagtgtgatcccgtcgaccaatgccaggattcagagactgggacgttttatcaaattggagattcatgggagaagtatgtgcatggtgtcagataccagtgctactgctatggccgtggcattggggagtggcattgccaacctttacagacctatccaagctcaagtggtcctgtcgaagtatttatcactgagactccgagtcagcccaactcccaccccatccagtggaatgcaccacagccatctcacatttccaagtacattctcaggtggagacctaaaaattctgtaggccgttggaaggaagctaccataccaggccacttaaactcctacaccatcaaaggcctgaagcctggtgtggtatacgagggccagctcatcagcatccagcagtacggccaccaagaagtgactcgctttgacttcaccaccaccagcaccagcacacctgtgaccagtatgtacacaaccaccctcatgcctcctacccccgaggttcctagagctaggctctcctgaggcaatgctttccttctcaattcatattcttccaggaggggcaccaacgttttttaaaatgatgttggcgacgaggacggtaaattttctagatgactgaaggctgactttcccctttctgtgactctctaggcaacaccgtgacaggagagacgactcccttttctcctcttgtggccacttctgaatctgtgaccgaaatcacagccagtagctttgtggtctcctgggtctcagcttccgacaccgtgtcgggattccgggtggaatatgagctgagtgaggagggagatgagccacagtacctggatcttccaagcacagccacttctgtgaacatccctgacctgcttcctggccgaaaatacattgtaaatgtctatcagatatctgaggatggggagcagagtttgatcctgtctacttcacaaacaacagcgcctgatgccccacctgacccgactgtggaccaagttgatgacacctcaattgttgttcgctggagcagaccccaggctcccatcacagggtacagaatagtctattcgccatcagtagaaggtagcagcacagaactcaaccttcctgaaactgcaaactccgtcaccctcagtgacttgcaacctggtgttcagtataacatcactatctatgctgtggaagaaaatcaagaaagtacacctgttgtcattcaacaagaaaccactggcaccccacgctcagatacagtgccctctcccagggacctgcagtttgtggaagtgacagacgtgaaggtcaccatcatgtggacaccgcctgagagtgcagtgaccggctaccgtgtggatgtgatccccgtcaacctgcctggcgagcacgggcagaggctgcccatcagcaggaacacctttgcagaagtcaccgggctgtcccctggggtcacctattacttcaaagtctttgcagtgagccatgggagggagagcaagcctctgactgctcaacagacaaccaaactggatgctcccactaacctccagtttgtcaatgaaactgattctactgtcctggtgagatggactccacctcgggcccagataacaggataccgactgaccgtgggccttacccgaagaggacagcccaggcagtacaatgtgggtccctctgtctccaagtacccactgaggaatctgcagcctgcatctgagtacaccgtatccctcgtggccataaagggcaaccaagagagccccaaagccactggagtctttaccacactgcagcctgggagctctattccaccttacaacaccgaggtgactgagaccaccattgtgatcacatggacgcctgctccaagaattggttttaagctgggtgtacgaccaagccagggaggagaggcaccacgagaagtgacttcagactcaggaagcatcgttgtgtccggcttgactccaggagtagaatacgtctacaccatccaagtcctgagagatggacaggaaagagatgcgccaattgtaaacaaagtggtgacaccattgtctccaccaacaaacttgcatctggaggcaaaccctgacactggagtgctcacagtctcctgggagaggagcaccaccccagacattactggttatagaattaccacaacccctacaaacggccagcagggaaattctttggaagaagtggtccatgctgatcagagctcctgcacttttgataacctgagtcccggcctggagtacaatgtcagtgtttacactgtcaaggatgacaaggaaagtgtccctatctctgataccatcatcccagctgttcctcctcccactgacctgcgattcaccaacattggtccagacaccatgcgtgtcacctgggctccacccccatccattgatttaaccaacttcctggtgcgttactcacctgtgaaaaatgaggaagatgttgcagagttgtcaatttctccttcagacaatgcagtggtcttaacaaatctcctgcctggtacagaatatgtagtgagtgtctccagtgtctacgaacaacatgagagcacacctcttagaggaagacagaaaacaggtcttgattccccaactggcattgacttttctgatattactgccaactcttttactgtgcactggattgctcctcgagccaccatcactggctacaggatccgccatcatcccgagcacttcagtgggagacctcgagaagatcgggtgccccactctcggaattccatcaccctcaccaacctcactccaggcacagagtatgtggtcagcatcgttgctcttaatggcagagaggaaagtcccttattgattggccaacaatcaacagtttctgatgttccgagggacctggaagttgttgctgcgacccccaccagcctactgatcagctgggatgctcctgctgtcacagtgagatattacaggatcacttacggagaaacaggaggaaatagccctgtccaggagttcactgtgcctgggagcaagtctacagctaccatcagcggccttaaacctggagttgattataccatcactgtgtatgctgtcactggccgtggagacagccccgcaagcagcaagccaatttccattaattaccgaacagaaattgacaaaccatcccagatgcaagtgaccgatgttcaggacaacagcattagtgtcaagtggctgccttcaagttcccctgttactggttacagagtaaccaccactcccaaaaatggaccaggaccaacaaaaactaaaactgcaggtccagatcaaacagaaatgactattgaaggcttgcagcccacagtggagtatgtggttagtgtctatgctcagaatccaagcggagagagtcagcctctggttcagactgcagtaaccaacattgatcgccctaaaggactggcattcactgatgtggatgtcgattccatcaaaattgcttgggaaagcccacaggggcaagtttccaggtacagggtgacctactcgagccctgaggatggaatccatgagctattccctgcacctgatggtgaagaagacactgcagagctgcaaggcctcagaccgggttctgagtacacagtcagtgtggttgccttgcacgatgatatggagagccagcccctgattggaacccagtccacagctattcctgcaccaactgacctgaagttcactcaggtcacacccacaagcctgagcgcccagtggacaccacccaatgttcagctcactggatatcgagtgcgggtgacccccaaggagaagaccggaccaatgaaagaaatcaaccttgctcctgacagctcatccgtggttgtatcaggacttatggtggccaccaaatatgaagtgagtgtctatgctcttaaggacactttgacaagcagaccagctcagggtgttgtcaccactctggagaatgtcagcccaccaagaagggctcgtgtgacagatgctactgagaccaccatcaccattagctggagaaccaagactgagacgatcactggcttccaagttgatgccgttccagccaatggccagactccaatccagagaaccatcaagccagatgtcagaagctacaccatcacaggtttacaaccaggcactgactacaagatctacctgtacaccttgaatgacaatgctcggagctcccctgtggtcatcgacgcctccactgccattgatgcaccatccaacctgcgtttcctggccaccacacccaattccttgctggtatcatggcagccgccacgtgccaggattaccggctacatcatcaagtatgagaagcctgggtctcctcccagagaagtggtccctcggccccgccctggtgtcacagaggctactattactggcctggaaccgggaaccgaatatacaatttatgtcattgccctgaagaataatcagaagagcgagcccctgattggaaggaaaaagacagtcaacgaaggcttgaaccaacctacggatgactcgtgctttgacccctacacagtttcccattatgccgttggagatgagtgggaacgaatgtctgaatcaggctttaaactgttgtgccagtgcttaggctttggaagtggtcatttcagatgtgattcatctagatggtgccatgacaatggtgtgaactacaagattggagagaagtgggaccgtcagggagaaaatggccagatgatgagctgcacatgtcttgggaacggaaaaggagaattcaagtgtgaccctcatgaggcaacgtgttacgatgatgggaagacataccacgtaggagaacagtggcagaaggaatatctcggtgccatttgctcctgcacatgctttggaggccagcggggctggcgctgtgacaactgccgcagacctgggggtgaacccagtcccgaaggcactactggccagtcctacaaccagtattctcagagataccatcagagaacaaacactaatgttaattgcccaattgagtgcttcatgcctttagatgtacaggctgacagagaagattcccgagagtaaatcatctttccaatccagaggaacaagcatgtctctctgccaagatccatctaaactggagtgatgttagcagacccagcttagagttcttctttctttcttaagccctttgctctggaggaagttctccagcttcagctcaactcacagcttctccaagcatcaccctgggagtttcctgagggttttctcataaatgagggctgcacattgcctgttctgcttcgaagtattcaataccgctcagtattttaaatgaagtgattctaagatttggtttgggatcaataggaaagcatatgcagccaaccaagatgcaaatgttttgaaatgattgtctggcccgcaatactgtaggaacaagcatgatcttgttactgtgatattttaaatatccacagtactcactttttccaaatgatcctagtaattgcctagaaatatctttctcttacctgttatttatcaatttttcccagtatttttatacggaaaaaattgtattgaaaacacttagtatgcagttgataagaggaatttggtataattatggtgggtgattattttttatactgtatgtgccaaagctttactactgtggaaagacaactgttttaataaaagatttacattccacaacttgaagttcatctatttgatataagacaccttcgggggaaataattcctgtgaatattctttttcaattcagcaaacatttgaaaatctatgatgtgcaagtctaattgttgatttcagtacaagattttctaaatcagttgctacaaaaactgattggtttttgtcacttcatctcttcactaatggagatagcttt

SEQ ID NO: 1476 - DNA, 8371 bp, Homo sapiens
ggcggggcggggacagcccggcgggtctctcctcccccgcgccccgggcctccagaggggcgggaggggaccgtcccatataagccccggctcccggcgctcggacgcccgcgccggctgtgctgcacagggggaggagagggaaccccaggcgcgagcgggaagaggggacctgcagccacaacttctctggtcctctgcatcccttctgtccctccacccgtccccttccccaccctctggcccccaccttcttggaggcgacaacccccgggaggcattagaagggatttttcccgcaggttgcgaagggaagcaaacttggtggcaacttgcctcccggtgcgggcgtctctcccccaccgtctcaacatgcttaggggtccggggcccgggctgctgctgctggccgtcctgtgcctggggacagcggtgccctccacgggagcctcgaagagcaagaggcaggctcagcaaatggttcagccccagtccccggtggctgtcagtcaaagcaagcccggttgttatgacaatggaaaacactatcagataaatcaacagtgggagcggacctacctaggcaatgcgttggtttgtacttgttatggaggaagccgaggttttaactgcgagagtaaacctgaagctgaagagacttgctttgacaagtacactgggaacacttaccgagtgggtgacacttatgagcgtcctaaagactccatgatctgggactgtacctgcatcggggctgggcgagggagaataagctgtaccatcgcaaaccgctgccatgaagggggtcagtcctacaagattggtgacacctggaggagaccacatgagactggtggttacatgttagagtgtgtgtgtcttggtaatggaaaaggagaatggacctgcaagcccatagctgagaagtgttttgatcatgctgctgggacttcctatgtggtcggagaaacgtgggagaagccctaccaaggctggatgatggtagattgtacttgcctgggagaaggcagcggacgcatcacttgcacttctagaaatagatgcaacgatcaggacacaaggacatcctatagaattggagacacctggagcaagaaggataatcgaggaaacctgctccagtgcatctgcacaggcaacggccgaggagagtggaagtgtgagaggcacacctctgtgcagaccacatcgagcggatctggccccttcaccgatgttcgtgcagctgtttaccaaccgcagcctcacccccagcctcctccctatggccactgtgtcacagacagtggtgtggtctactctgtggggatgcagtggctgaagacacaaggaaataagcaaatgctttgcacgtgcctgggcaacggagtcagctgccaagagacagctgtaacccagacttacggtggcaactcaaatggagagccatgtgtcttaccattcacctacaatggcaggacgttctactcctgcaccacagaagggcgacaggacggacatctttggtgcagcacaacttcgaattatgagcaggaccagaaatactctttctgcacagaccacactgttttggttcagactcgaggaggaaattccaatggtgccttgtgccacttccccttcctatacaacaaccacaattacactgattgcacttctgagggcagaagagacaacatgaagtggtgtgggaccacacagaactatgatgccgaccagaagtttgggttctgccccatggctgcccacgaggaaatctgcacaaccaatgaaggggtcatgtaccgcattggagatcagtgggataagcagcatgacatgggtcacatgatgaggtgcacgtgtgttgggaatggtcgtggggaatggacatgcattgcctactcgcagcttcgagatcagtgcattgttgatgacatcacttacaatgtgaacgacacattccacaagcgtcatgaagaggggcacatgctgaactgtacatgcttcggtcagggtcggggcaggtggaagtgtgatcccgtcgaccaatgccaggattcagagactgggacgttttatcaaattggagattcatgggagaagtatgtgcatggtgtcagataccagtgctactgctatggccgtggcattggggagtggcattgccaacctttacagacctatccaagctcaagtggtcctgtcgaagtatttatcactgagactccgagtcagcccaactcccaccccatccagtggaatgcaccacagccatctcacatttccaagtacattctcaggtggagacctaaaaattctgtaggccgttggaaggaagctaccataccaggccacttaaactcctacaccatcaaaggcctgaagcctggtgtggtatacgagggccagctcatcagcatccagcagtacggccaccaagaagtgactcgctttgacttcaccaccaccagcaccagcacacctgtgaccagcaacaccgtgacaggagagacgactcccttttctcctcttgtggccacttctgaatctgtgaccgaaatcacagccagtagctttgtggtctcctgggtctcagcttccgacaccgtgtcgggattccgggtggaatatgagctgagtgaggagggagatgagccacagtacctggatcttccaagcacagccacttctgtgaacatccctgacctgcttcctggccgaaaatacattgtaaatgtctatcagatatctgaggatggggagcagagtttgatcctgtctacttcacaaacaacagcgcctgatgccccacctgacccgactgtggaccaagttgatgacacctcaattgttgttcgctggagcagaccccaggctcccatcacagggtacagaatagtctattcgccatcagtagaaggtagcagcacagaactcaaccttcctgaaactgcaaactccgtcaccctcagtgacttgcaacctggtgttcagtataacatcactatctatgctgtggaagaaaatcaagaaagtacacctgttgtcattcaacaagaaaccactggcaccccacgctcagatacagtgccctctcccagggacctgcagtttgtggaagtgacagacgtgaaggtcaccatcatgtggacaccgcctgagagtgcagtgaccggctaccgtgtggatgtgatccccgtcaacctgcctggcgagcacgggcagaggctgcccatcagcaggaacacctttgcagaagtcaccgggctgtcccctggggtcacctattacttcaaagtctttgcagtgagccatgggagggagagcaagcctctgactgctcaacagacaaccaaactggatgctcccactaacctccagtttgtcaatgaaactgattctactgtcctggtgagatggactccacctcgggcccagataacaggataccgactgaccgtgggccttacccgaagaggacagcccaggcagtacaatgtgggtccctctgtctccaagtacccactgaggaatctgcagcctgcatctgagtacaccgtatccctcgtggccataaagggcaaccaagagagccccaaagccactggagtctttaccacactgcagcctgggagctctattccaccttacaacaccgaggtgactgagaccaccattgtgatcacatggacgcctgctccaagaattggttttaagctgggtgtacgaccaagccagggaggagaggcaccacgagaagtgacttcagactcaggaagcatcgttgtgtccggcttgactccaggagtagaatacgtctacaccatccaagtcctgagagatggacaggaaagagatgcgccaattgtaaacaaagtggtgacaccattgtctccaccaacaaacttgcatctggaggcaaaccctgacactggagtgctcacagtctcctgggagaggagcaccaccccagacattactggttatagaattaccacaacccctacaaacggccagcagggaaattctttggaagaagtggtccatgctgatcagagctcctgcacttttgataacctgagtcccggcctggagtacaatgtcagtgtttacactgtcaaggatgacaaggaaagtgtccctatctctgataccatcatcccagctgttcctcctcccactgacctgcgattcaccaacattggtccagacaccatgcgtgtcacctgggctccacccccatccattgatttaaccaacttcctggtgcgttactcacctgtgaaaaatgaggaagatgttgcagagttgtcaatttctccttcagacaatgcagtggtcttaacaaatctcctgcctggtacagaatatgtagtgagtgtctccagtgtctacgaacaacatgagagcacacctcttagaggaagacagaaaacaggtcttgattccccaactggcattgacttttctgatattactgccaactcttttactgtgcactggattgctcctcgagccaccatcactggctacaggatccgccatcatcccgagcacttcagtgggagacctcgagaagatcgggtgccccactctcggaattccatcaccctcaccaacctcactccaggcacagagtatgtggtcagcatcgttgctcttaatggcagagaggaaagtcccttattgattggccaacaatcaacagtttctgatgttccgagggacctggaagttgttgctgcgacccccaccagcctactgatcagctgggatgctcctgctgtcacagtgagatattacaggatcacttacggagaaacaggaggaaatagccctgtccaggagttcactgtgcctgggagcaagtctacagctaccatcagcggccttaaacctggagttgattataccatcactgtgtatgctgtcactggccgtggagacagccccgcaagcagcaagccaatttccattaattaccgaacagaaattgacaaaccatcccagatgcaagtgaccgatgttcaggacaacagcattagtgtcaagtggctgccttcaagttcccctgttactggttacagagtaaccaccactcccaaaaatggaccaggaccaacaaaaactaaaactgcaggtccagatcaaacagaaatgactattgaaggcttgcagcccacagtggagtatgtggttagtgtctatgctcagaatccaagcggagagagtcagcctctggttcagactgcagtaaccaacattgatcgccctaaaggactggcattcactgatgtggatgtcgattccatcaaaattgcttgggaaagcccacaggggcaagtttccaggtacagggtgacctactcgagccctgaggatggaatccatgagctattccctgcacctgatggtgaagaagacactgcagagctgcaaggcctcagaccgggttctgagtacacagtcagtgtggttgccttgcacgatgatatggagagccagcccctgattggaacccagtccacagctattcctgcaccaactgacctgaagttcactcaggtcacacccacaagcctgagcgcccagtggacaccacccaatgttcagctcactggatatcgagtgcgggtgacccccaaggagaagaccggaccaatgaaagaaatcaaccttgctcctgacagctcatccgtggttgtatcaggacttatggtggccaccaaatatgaagtgagtgtctatgctcttaaggacactttgacaagcagaccagctcagggtgttgtcaccactctggagaatgtcagcccaccaagaagggctcgtgtgacagatgctactgagaccaccatcaccattagctggagaaccaagactgagacgatcactggcttccaagttgatgccgttccagccaatggccagactccaatccagagaaccatcaagccagatgtcagaagctacaccatcacaggtttacaaccaggcactgactacaagatctacctgtacaccttgaatgacaatgctcggagctcccctgtggtcatcgacgcctccactgccattgatgcaccatccaacctgcgtttcctggccaccacacccaattccttgctggtatcatggcagccgccacgtgccaggattaccggctacatcatcaagtatgagaagcctgggtctcctcccagagaagtggtccctcggccccgccctggtgtcacagaggctactattactggcctggaaccgggaaccgaatatacaatttatgtcattgccctgaagaataatcagaagagcgagcccctgattggaaggaaaaagacagacgagcttccccaactggtaacccttccacaccccaatcttcatggaccagagatcttggatgttccttccacagttcaaaagacccctttcgtcacccaccctgggtatgacactggaaatggtattcagcttcctggcacttctggtcagcaacccagtgttgggcaacaaatgatctttgaggaacatggttttaggcggaccacaccgcccacaacggccacccccataaggcataggccaagaccatacccgccgaatgtaggtgaggaaatccaaattggtcacatccccagggaagatgtagactatcacctgtacccacacggtccgggactcaatccaaatgcctctacaggacaagaagctctctctcagacaaccatctcatgggccccattccaggacacttctgagtacatcatttcatgtcatcctgttggcactgatgaagaacccttacagttcagggttcctggaacttctaccagtgccactctgacaggcctcaccagaggtgccacctacaacatcatagtggaggcactgaaagaccagcagaggcataaggttcgggaagaggttgttaccgtgggcaactctgtcaacgaaggcttgaaccaacctacggatgactcgtgctttgacccctacacagtttcccattatgccgttggagatgagtgggaacgaatgtctgaatcaggctttaaactgttgtgccagtgcttaggctttggaagtggtcatttcagatgtgattcatctagatggtgccatgacaatggtgtgaactacaagattggagagaagtgggaccgtcagggagaaaatggccagatgatgagctgcacatgtcttgggaacggaaaaggagaattcaagtgtgaccctcatgaggcaacgtgttacgatgatgggaagacataccacgtaggagaacagtggcagaaggaatatctcggtgccatttgctcctgcacatgctttggaggccagcggggctggcgctgtgacaactgccgcagacctgggggtgaacccagtcccgaaggcactactggccagtcctacaaccagtattctcagagataccatcagagaacaaacactaatgttaattgcccaattgagtgcttcatgcctttagatgtacaggctgacagagaagattcccgagagtaaatcatctttccaatccagaggaacaagcatgtctctctgccaagatccatctaaactggagtgatgttagcagacccagcttagagttcttctttctttcttaagccctttgctctggaggaagttctccagcttcagctcaactcacagcttctccaagcatcaccctgggagtttcctgagggttttctcataaatgagggctgcacattgcctgttctgcttcgaagtattcaataccgctcagtattttaaatgaagtgattctaagatttggtttgggatcaataggaaagcatatgcagccaaccaagatgcaaatgttttgaaatgattgtctggcccgcaatactgtaggaacaagcatgatcttgttactgtgatattttaaatatccacagtactcactttttccaaatgatcctagtaattgcctagaaatatctttctcttacctgttatttatcaatttttcccagtatttttatacggaaaaaattgtattgaaaacacttagtatgcagttgataagaggaatttggtataattatggtgggtgattattttttatactgtatgtgccaaagctttactactgtggaaagacaactgttttaataaaagatttacattccacaacttgaagttcatctatttgatataagacaccttcgggggaaataattcctgtgaatattctttttcaattcagcaaacatttgaaaatctatgatgtgcaagtctaattgttgatttcagtacaagattttctaaatcagttgctacaaaaactgattggtttttgtcacttcatctcttcactaatggagatagcttt

SEQ ID NO: 1477 - DNA, 2488 bp, Homo sapiens
ggcggggcggggacagcccggcgggtctctcctcccccgcgccccgggcctccagaggggcgggaggggaccgtcccatataagccccggctcccggcgctcggacgcccgcgccggctgtgctgcacagggggaggagagggaaccccaggcgcgagcgggaagaggggacctgcagccacaacttctctggtcctctgcatcccttctgtccctccacccgtccccttccccaccctctggcccccaccttcttggaggcgacaacccccgggaggcattagaagggatttttcccgcaggttgcgaagggaagcaaacttggtggcaacttgcctcccggtgcgggcgtctctcccccaccgtctcaacatgcttaggggtccggggcccgggctgctgctgctggccgtcctgtgcctggggacagcggtgccctccacgggagcctcgaagagcaagaggcaggctcagcaaatggttcagccccagtccccggtggctgtcagtcaaagcaagcccggttgttatgacaatggaaaacactatcagataaatcaacagtgggagcggacctacctaggcaatgcgttggtttgtacttgttatggaggaagccgaggttttaactgcgagagtaaacctgaagctgaagagacttgctttgacaagtacactgggaacacttaccgagtgggtgacacttatgagcgtcctaaagactccatgatctgggactgtacctgcatcggggctgggcgagggagaataagctgtaccatcgcaaaccgctgccatgaagggggtcagtcctacaagattggtgacacctggaggagaccacatgagactggtggttacatgttagagtgtgtgtgtcttggtaatggaaaaggagaatggacctgcaagcccatagctgagaagtgttttgatcatgctgctgggacttcctatgtggtcggagaaacgtgggagaagccctaccaaggctggatgatggtagattgtacttgcctgggagaaggcagcggacgcatcacttgcacttctagaaatagatgcaacgatcaggacacaaggacatcctatagaattggagacacctggagcaagaaggataatcgaggaaacctgctccagtgcatctgcacaggcaacggccgaggagagtggaagtgtgagaggcacacctctgtgcagaccacatcgagcggatctggccccttcaccgatgttcgtgcagctgtttaccaaccgcagcctcacccccagcctcctccctatggccactgtgtcacagacagtggtgtggtctactctgtggggatgcagtggctgaagacacaaggaaataagcaaatgctttgcacgtgcctgggcaacggagtcagctgccaagagacagctgtaacccagacttacggtggcaactcaaatggagagccatgtgtcttaccattcacctacaatggcaggacgttctactcctgcaccacagaagggcgacaggacggacatctttggtgcagcacaacttcgaattatgagcaggaccagaaatactctttctgcacagaccacactgttttggttcagactcgaggaggaaattccaatggtgccttgtgccacttccccttcctatacaacaaccacaattacactgattgcacttctgagggcagaagagacaacatgaagtggtgtgggaccacacagaactatgatgccgaccagaagtttgggttctgccccatggctgcccacgaggaaatctgcacaaccaatgaaggggtcatgtaccgcattggagatcagtgggataagcagcatgacatgggtcacatgatgaggtgcacgtgtgttgggaatggtcgtggggaatggacatgcattgcctactcgcagcttcgagatcagtgcattgttgatgacatcacttacaatgtgaacgacacattccacaagcgtcatgaagaggggcacatgctgaactgtacatgcttcggtcagggtcggggcaggtggaagtgtgatcccgtcgaccaatgccaggattcagagactgggacgttttatcaaattggagattcatgggagaagtatgtgcatggtgtcagataccagtgctactgctatggccgtggcattggggagtggcattgccaacctttacagacctatccaagctcaagtggtcctgtcgaagtatttatcactgagactccgagtcagcccaactcccaccccatccagtggaatgcaccacagccatctcacatttccaagtacattctcaggtggagacctgtgagtatcccacccagaaaccttggatactgagtctcctaatcttatcaattctgatggtttctttttttcccagcttttgagccaacaactctgattaactattcctatagcatttactatatttgtttagtgaacaaacaatatgtggtcaattaaattgacttgtagactg

SEQ ID NO: 1478 - DNA, 8374 bp, Homo sapiens
gcccgcgccggctgtgctgcacagggggaggagagggaaccccaggcgcgagcgggaagaggggacctgcagccacaacttctctggtcctctgcatcccttctgtccctccacccgtccccttccccaccctctggcccccaccttcttggaggcgacaacccccgggaggcattagaagggatttttcccgcaggttgcgaagggaagcaaacttggtggcaacttgcctcccggtgcgggcgtctctcccccaccgtctcaacatgcttaggggtccggggcccgggctgctgctgctggccgtccagtgcctggggacagcggtgccctccacgggagcctcgaagagcaagaggcaggctcagcaaatggttcagccccagtccccggtggctgtcagtcaaagcaagcccggttgttatgacaatggaaaacactatcagataaatcaacagtgggagcggacctacctaggcaatgcgttggtttgtacttgttatggaggaagccgaggttttaactgcgagagtaaacctgaagctgaagagacttgctttgacaagtacactgggaacacttaccgagtgggtgacacttatgagcgtcctaaagactccatgatctgggactgtacctgcatcggggctgggcgagggagaataagctgtaccatcgcaaaccgctgccatgaagggggtcagtcctacaagattggtgacacctggaggagaccacatgagactggtggttacatgttagagtgtgtgtgtcttggtaatggaaaaggagaatggacctgcaagcccatagctgagaagtgttttgatcatgctgctgggacttcctatgtggtcggagaaacgtgggagaagccctaccaaggctggatgatggtagattgtacttgcctgggagaaggcagcggacgcatcacttgcacttctagaaatagatgcaacgatcaggacacaaggacatcctatagaattggagacacctggagcaagaaggataatcgaggaaacctgctccagtgcatctgcacaggcaacggccgaggagagtggaagtgtgagaggcacacctctgtgcagaccacatcgagcggatctggccccttcaccgatgttcgtgcagctgtttaccaaccgcagcctcacccccagcctcctccctatggccactgtgtcacagacagtggtgtggtctactctgtggggatgcagtggctgaagacacaaggaaataagcaaatgctttgcacgtgcctgggcaacggagtcagctgccaagagacagctgtaacccagacttacggtggcaactcaaatggagagccatgtgtcttaccattcacctacaatggcaggacgttctactcctgcaccacagaagggcgacaggacggacatctttggtgcagcacaacttcgaattatgagcaggaccagaaatactctttctgcacagaccacactgttttggttcagactcgaggaggaaattccaatggtgccttgtgccacttccccttcctatacaacaaccacaattacactgattgcacttctgagggcagaagagacaacatgaagtggtgtgggaccacacagaactatgatgccgaccagaagtttgggttctgccccatggctgcccacgaggaaatctgcacaaccaatgaaggggtcatgtaccgcattggagatcagtgggataagcagcatgacatgggtcacatgatgaggtgcacgtgtgttgggaatggtcgtggggaatggacatgcattgcctactcgcagcttcgagatcagtgcattgttgatgacatcacttacaatgtgaacgacacattccacaagcgtcatgaagaggggcacatgctgaactgtacatgcttcggtcagggtcggggcaggtggaagtgtgatcccgtcgaccaatgccaggattcagagactgggacgttttatcaaattggagattcatgggagaagtatgtgcatggtgtcagataccagtgctactgctatggccgtggcattggggagtggcattgccaacctttacagacctatccaagctcaagtggtcctgtcgaagtatttatcactgagactccgagtcagcccaactcccaccccatccagtggaatgcaccacagccatctcacatttccaagtacattctcaggtggagacctaaaaattctgtaggccgttggaaggaagctaccataccaggccacttaaactcctacaccatcaaaggcctgaagcctggtgtggtatacgagggccagctcatcagcatccagcagtacggccaccaagaagtgactcgctttgacttcaccaccaccagcaccagcacacctgtgaccagcaacaccgtgacaggagagacgactcccttttctcctcttgtggccacttctgaatctgtgaccgaaatcacagccagtagctttgtggtctcctgggtctcagcttccgacaccgtgtcgggattccgggtggaatatgagctgagtgaggagggagatgagccacagtacctggatcttccaagcacagccacttctgtgaacatccctgacctgcttcctggccgaaaatacattgtaaatgtctatcagatatctgaggatggggagcagagtttgatcctgtctacttcacaaacaacagcgcctgatgcccctcctgacccgactgtggaccaagttgatgacacctcaattgttgttcgctggagcagaccccaggctcccatcacagggtacagaatagtctattcgccatcagtagaaggtagcagcacagaactcaaccttcctgaaactgcaaactccgtcaccctcagtgacttgcaacctggtgttcagtataacatcactatctatgctgtggaagaaaatcaagaaagtacacctgttgtcattcaacaagaaaccactggcaccccacgctcagatacagtgccctctcccagggacctgcagtttgtggaagtgacagacgtgaaggtcaccatcatgtggacaccgcctgagagtgcagtgaccggctaccgtgtggatgtgatccccgtcaacctgcctggcgagcacgggcagaggctgcccatcagcaggaacacctttgcagaagtcaccgggctgtcccctggggtcacctattacttcaaagtctttgcagtgagccatgggagggagagcaagcctctgactgctcaacagacaaccaaactggatgctcccactaacctccagtttgtcaatgaaactgattctactgtcctggtgagatggactccacctcgggcccagataacaggataccgactgaccgtgggccttacccgaagaggacagcccaggcagtacaatgtgggtccctctgtctccaagtacccactgaggaatctgcagcctgcatctgagtacaccgtatccctcgtggccataaagggcaaccaagagagccccaaagccactggagtctttaccacactgcagcctgggagctctattccaccttacaacaccgaggtgactgagaccaccattgtgatcacatggacgcctgctccaagaattggttttaagctgggtgtacgaccaagccagggaggagaggcaccacgagaagtgacttcagactcaggaagcatcgttgtgtccggcttgactccaggagtagaatacgtctacaccatccaagtcctgagagatggacaggaaagagatgcgccaattgtaaacaaagtggtgacaccattgtctccaccaacaaacttgcatctggaggcaaaccctgacactggagtgctcacagtctcctgggagaggagcaccaccccagacattactggttatagaattaccacaacccctacaaacggccagcagggaaattctttggaagaagtggtccatgctgatcagagctcctgcacttttgataacctgagtcccggcctggagtacaatgtcagtgtttacactgtcaaggatgacaaggaaagtgtccctatctctgataccatcatcccagctgttcctcctcccactgacctgcgattcaccaacattggtccagacaccatgcgtgtcacctgggctccacccccatccattgatttaaccaacttcctggtgcgttactcacctgtgaaaaatgaggaagatgttgcagagttgtcaatttctccttcagacaatgcagtggtcttaacaaatctcctgcctggtacagaatatgtagtgagtgtctccagtgtctacgaacaacatgagagcacacctcttagaggaagacagaaaacaggtcttgattccccaactggcattgacttttctgatattactgccaactcttttactgtgcactggattgctcctcgagccaccatcactggctacaggatccgccatcatcccgagcacttcagtgggagacctcgagaagatcgggtgccccactctcggaattccatcaccctcaccaacctcactccaggcacagagtatgtggtcagcatcgttgctcttaatggcagagaggaaagtcccttattgattggccaacaatcaacagtttctgatgttccgagggacctggaagttgttgctgcgacccccaccagcctactgatcagctgggatgctcctgctgtcacagtgagatattacaggatcacttacggagagacaggaggaaatagccctgtccaggagttcactgtgcctgggagcaagtctacagctaccatcagcggccttaaacctggagttgattataccatcactgtgtatgctgtcactggccgtggagacagccccgcaagcagcaagccaatttccattaattaccgaacagaaattgacaaaccatcccagatgcaagtgaccgatgttcaggacaacagcattagtgtcaagtggctgccttcaagttcccctgttactggttacagagtaaccaccactcccaaaaatggaccaggaccaacaaaaactaaaactgcaggtccagatcaaacagaaatgactattgaaggcttgcagcccacagtggagtatgtggttagtgtctatgctcagaatccaagcggagagagtcagcctctggttcagactgcagtaaccaacattgatcgccctaaaggactggcattcactgatgtggatgtcgattccatcaaaattgcttgggaaagcccacaggggcaagtttccaggtacagggtgacctactcgagccctgaggatggaatccatgagctattccctgcacctgatggtgaagaagacactgcagagctgcaaggcctcagaccgggttctgagtacacagtcagtgtggttgccttgcacgatgatatggagagccagcccctgattggaacccagtccacagctattcctgcaccaactgacctgaagttcactcaggtcacacccacaagcctgagcgcccagtggacaccacccaatgttcagctcactggatatcgagtgcgggtgacccccaaggagaagaccggaccaatgaaagaaatcaaccttgctcctgacagctcatccgtggttgtatcaggacttatggtggccaccaaatatgaagtgagtgtctatgctcttaaggacactttgacaagcagaccagctcagggagttgtcaccactctggagaatgtcagcccaccaagaagggctcgtgtgacagatgctactgagaccaccatcaccattagctggagaaccaagactgagacgatcactggcttccaagttgatgccgttccagccaatggccagactccaatccagagaaccatcaagccagatgtcagaagctacaccatcacaggtttacaaccaggcactgactacaagatctacctgtacaccttgaatgacaatgctcggagctcccctgtggtcatcgacgcctccactgccattgatgcaccatccaacctgcgtttcctggccaccacacccaattccttgctggtatcatggcagccgccacgtgccaggattaccggctacatcatcaagtatgagaagcctgggtctcctcccagagaagtggtccctcggccccgccctggtgtcacagaggctactattactggcctggaaccgggaaccgaatatacaatttatgtcattgccctgaagaataatcagaagagcgagcccctgattggaaggaaaaagacagttcaaaagacccctttcgtcacccaccctgggtatgacactggaaatggtattcagcttcctggcacttctggtcagcaacccagtgttgggcaacaaatgatctttgaggaacatggttttaggcggaccacaccgcccacaacggccacccccataaggcataggccaagaccatacccgccgaatgtaggacaagaagctctctctcagacaaccatctcatgggccccattccaggacacttctgagtacatcatttcatgtcatcctgttggcactgatgaagaacccttacagttcagggttcctggaacttctaccagtgccactctgacaggcctcaccagaggtgccacctacaacatcatagtggaggcactgaaagaccagcagaggcataaggttcgggaagaggttgttaccgtgggcaactctgtcaacgaaggcttgaaccaacctacggatgactcgtgctttgacccctacacagtttcccattatgccgttggagatgagtgggaacgaatgtctgaatcaggctttaaactgttgtgccagtgcttaggctttggaagtggtcatttcagatgtgattcatctagatggtgccatgacaatggtgtgaactacaagattggagagaagtgggaccgtcagggagaaaatggccagatgatgagctgcacatgtcttgggaacggaaaaggagaattcaagtgtgaccctcatgaggcaacgtgttatgatgatgggaagacataccacgtaggagaacagtggcagaaggaatatctcggtgccatttgctcctgcacatgctttggaggccagcggggctggcgctgtgacaactgccgcagacctgggggtgaacccagtcccgaaggcactactggccagtcctacaaccagtattctcagagataccatcagagaacaaacactaatgttaattgcccaattgagtgcttcatgcctttagatgtacaggctgacagagaagattcccgagagtaaatcatctttccaatccagaggaacaagcatgtctctctgccaagatccatctaaactggagtgatgttagcagacccagcttagagttcttctttctttcttaagccctttgctctggaggaagttctccagcttcagctcaactcacagcttctccaagcatcaccctgggagtttcctgagggttttctcataaatgagggctgcacattgcctgttctgcttcgaagtattcaataccgctcagtattttaaatgaagtgattctaagatttggtttgggatcaataggaaagcatatgcagccaaccaagatgcaaatgttttgaaatgatatgaccaaaattttaagtaggaaagtcacccaaacacttctgctttcacttaagtgtctggcccgcaatactgtaggaacaagcatgatcttgttactgtgatattttaaatatccacagtactcactttttccaaatgatcctagtaattgcctagaaatatctttctcttacctgttatttatcaatttttcccagtatttttatacggaaaaaattgtattgaaaacacttagtatgcagttgataagaggaatttggtataattatggtgggtgattattttttatactgtatgtgccaaagctttactactgtggaaagacaactgttttaataaaagatttacattccacaacttgaagttcatctatttgatataagacaccttcgggggaaataattcctgtgaatattctttttcaattcagcaaacatttgaaaatctatgatgtgcaagtctaattgttgatttcagtacaagattttctaaatcagttgctacaaaaactgattggtttttgtcacttcatctcttcactaatggagatagctttacactttctgctttaatagatttaagtggaccccaatatttattaaaattgctagtttaccgttcagaagtataatagaaataatctttagttgctcttttctaaccattgtaattcttcccttcttccctccacctttccttcattgaataaacctctgttcaaagagattgcctgcaagggaaataaaaatgactaagatattaaaaaaaaaaaaaaaaaa

SEQ ID NO: 1479 - DNA, 2443 bp, Homo sapiens
ggcggggcggggacagcccggcgggtctctcctcccccgcgccccgggcctccagaggggcgggaggggaccgtcccatataagccccggctcccggcgctcggacgcccgcgccggctgtgctgcacagggggaggagagggaaccccaggcgcgagcgggaagaggggacctgcagccacaacttctctggtcctctgcatcccttctgtccctccacccgtccccttccccaccctctggcccccaccttcttggaggcgacaacccccgggaggcattagaagggatttttcccgcaggttgcgaagggaagcaaacttggtggcaacttgcctcccggtgcgggcgtctctcccccaccgtctcaacatgcttaggggtccggggcccgggctgctgctgctggccgtcctgtgcctggggacagcggtgccctccacgggagcctcgaagagcaagaggcaggctcagcaaatggttcagccccagtccccggtggctgtcagtcaaagcaagcccggttgttatgacaatggaaaacactatcagataaatcaacagtgggagcggacctacctaggcaatgcgttggtttgtacttgttatggaggaagccgaggttttaactgcgagagtaaacctgaagctgaagagacttgctttgacaagtacactgggaacacttaccgagtgggtgacacttatgagcgtcctaaagactccatgatctgggactgtacctgcatcggggctgggcgagggagaataagctgtaccatcgcaaaccgctgccatgaagggggtcagtcctacaagattggtgacacctggaggagaccacatgagactggtggttacatgttagagtgtgtgtgtcttggtaatggaaaaggagaatggacctgcaagcccatagctgagaagtgttttgatcatgctgctgggacttcctatgtggtcggagaaacgtgggagaagccctaccaaggctggatgatggtagattgtacttgcctgggagaaggcagcggacgcatcacttgcacttctagaaatagatgcaacgatcaggacacaaggacatcctatagaattggagacacctggagcaagaaggataatcgaggaaacctgctccagtgcatctgcacaggcaacggccgaggagagtggaagtgtgagaggcacacctctgtgcagaccacatcgagcggatctggccccttcaccgatgttcgtgcagctgtttaccaaccgcagcctcacccccagcctcctccctatggccactgtgtcacagacagtggtgtggtctactctgtggggatgcagtggctgaagacacaaggaaataagcaaatgctttgcacgtgcctgggcaacggagtcagctgccaagagacagctgtaacccagacttacggtggcaactcaaatggagagccatgtgtcttaccattcacctacaatggcaggacgtgcagcacaacttcgaattatgagcaggaccagaaatactctttctgcacagaccacactgttttggttcagactcgaggaggaaattccaatggtgccttgtgccacttccccttcctatacaacaaccacaattacactgattgcacttctgagggcagaagagacaacatgaagtggtgtgggaccacacagaactatgatgccgaccagaagtttgggttctgccccatggctgcccacgaggaaatctgcacaaccaatgaaggggtcatgtaccgcattggagatcagtgggataagcagcatgacatgggtcacatgatgaggtgcacgtgtgttgggaatggtcgtggggaatggacatgcattgcctactcgcagcttcgagatcagtgcattgttgatgacatcacttacaatgtgaacgacacattccacaagcgtcatgaagaggggcacatgctgaactgtacatgcttcggtcagggtcggggcaggtggaagtgtgatcccgtcgaccaatgccaggattcagagactgggacgttttatcaaattggagattcatgggagaagtatgtgcatggtgtcagataccagtgctactgctatggccgtggcattggggagtggcattgccaacctttacagacctatccaagctcaagtggtcctgtcgaagtatttatcactgagactccgagtcagcccaactcccaccccatccagtggaatgcaccacagccatctcacatttccaagtacattctcaggtggagacctgtgagtatcccacccagaaaccttggatactgagtctcctaatcttatcaattctgatggtttctttttttcccagcttttgagccaacaactctgattaactattcctatagcatttactatatttgtttagtgaacaaacaatatgtggtcaattaaattgacttgtagactg

SEQ ID NO: 1480 - DNA, 7823 bp, Homo sapiens
ggcggggcggggacagcccggcgggtctctcctcccccgcgccccgggcctccagaggggcgggaggggaccgtcccatataagccccggctcccggcgctcggacgcccgcgccggctgtgctgcacagggggaggagagggaaccccaggcgcgagcgggaagaggggacctgcagccacaacttctctggtcctctgcatcccttctgtccctccacccgtccccttccccaccctctggcccccaccttcttggaggcgacaacccccgggaggcattagaagggatttttcccgcaggttgcgaagggaagcaaacttggtggcaacttgcctcccggtgcgggcgtctctcccccaccgtctcaacatgcttaggggtccggggcccgggctgctgctgctggccgtcctgtgcctggggacagcggtgccctccacgggagcctcgaagagcaagaggcaggctcagcaaatggttcagccccagtccccggtggctgtcagtcaaagcaagcccggttgttatgacaatggaaaacactatcagataaatcaacagtgggagcggacctacctaggcaatgcgttggtttgtacttgttatggaggaagccgaggttttaactgcgagagtaaacctgaagctgaagagacttgctttgacaagtacactgggaacacttaccgagtgggtgacacttatgagcgtcctaaagactccatgatctgggactgtacctgcatcggggctgggcgagggagaataagctgtaccatcgcaaaccgctgccatgaagggggtcagtcctacaagattggtgacacctggaggagaccacatgagactggtggttacatgttagagtgtgtgtgtcttggtaatggaaaaggagaatggacctgcaagcccatagctgagaagtgttttgatcatgctgctgggacttcctatgtggtcggagaaacgtgggagaagccctaccaaggctggatgatggtagattgtacttgcctgggagaaggcagcggacgcatcacttgcacttctagaaatagatgcaacgatcaggacacaaggacatcctatagaattggagacacctggagcaagaaggataatcgaggaaacctgctccagtgcatctgcacaggcaacggccgaggagagtggaagtgtgagaggcacacctctgtgcagaccacatcgagcggatctggccccttcaccgatgttcgtgcagctgtttaccaaccgcagcctcacccccagcctcctccctatggccactgtgtcacagacagtggtgtggtctactctgtggggatgcagtggctgaagacacaaggaaataagcaaatgctttgcacgtgcctgggcaacggagtcagctgccaagagacagctgtaacccagacttacggtggcaactcaaatggagagccatgtgtcttaccattcacctacaatggcaggacgttctactcctgcaccacagaagggcgacaggacggacatctttggtgcagcacaacttcgaattatgagcaggaccagaaatactctttctgcacagaccacactgttttggttcagactcgaggaggaaattccaatggtgccttgtgccacttccccttcctatacaacaaccacaattacactgattgcacttctgagggcagaagagacaacatgaagtggtgtgggaccacacagaactatgatgccgaccagaagtttgggttctgccccatggctgcccacgaggaaatctgcacaaccaatgaaggggtcatgtaccgcattggagatcagtgggataagcagcatgacatgggtcacatgatgaggtgcacgtgtgttgggaatggtcgtggggaatggacatgcattgcctactcgcagcttcgagatcagtgcattgttgatgacatcacttacaatgtgaacgacacattccacaagcgtcatgaagaggggcacatgctgaactgtacatgcttcggtcagggtcggggcaggtggaagtgtgatcccgtcgaccaatgccaggattcagagactgggacgttttatcaaattggagattcatgggagaagtatgtgcatggtgtcagataccagtgctactgctatggccgtggcattggggagtggcattgccaacctttacagacctatccaagctcaagtggtcctgtcgaagtatttatcactgagactccgagtcagcccaactcccaccccatccagtggaatgcaccacagccatctcacatttccaagtacattctcaggtggagacctaaaaattctgtaggccgttggaaggaagctaccataccaggccacttaaactcctacaccatcaaaggcctgaagcctggtgtggtatacgagggccagctcatcagcatccagcagtacggccaccaagaagtgactcgctttgacttcaccaccaccagcaccagcacacctgtgaccagcaacaccgtgacaggagagacgactcccttttctcctcttgtggccacttctgaatctgtgaccgaaatcacagccagtagctttgtggtctcctgggtctcagcttccgacaccgtgtcgggattccgggtggaatatgagctgagtgaggagggagatgagccacagtacctggatcttccaagcacagccacttctgtgaacatccctgacctgcttcctggccgaaaatacattgtaaatgtctatcagatatctgaggatggggagcagagtttgatcctgtctacttcacaaacaacagcgcctgatgccccacctgacccgactgtggaccaagttgatgacacctcaattgttgttcgctggagcagaccccaggctcccatcacagggtacagaatagtctattcgccatcagtagaaggtagcagcacagaactcaaccttcctgaaactgcaaactccgtcaccctcagtgacttgcaacctggtgttcagtataacatcactatctatgctgtggaagaaaatcaagaaagtacacctgttgtcattcaacaagaaaccactggcaccccacgctcagatacagtgccctctcccagggacctgcagtttgtggaagtgacagacgtgaaggtcaccatcatgtggacaccgcctgagagtgcagtgaccggctaccgtgtggatgtgatccccgtcaacctgcctggcgagcacgggcagaggctgcccatcagcaggaacactctttgcagtgagccatgggagggagagcaagcctctgactgctcaacagacaaccaaactggatgctcccactaacctccagtttgtcaatgaaactgattctactgtcctggtgagatggactccacctcgggcccagataacaggataccgactgaccgtgggccttacccgaagaggacagcccaggcagtacaatgtgggtccctctgtctccaagtacccactgaggaatctgcagcctgcatctgagtacaccgtatccctcgtggccataaagggcaaccaagagagccccaaagccactggagtctttaccacactgcagcctgggagctctattccaccttacaacaccgaggtgactgagaccaccattgtgatcacatggacgcctgctccaagaattggttttaagctgggtgtacgaccaagccagggaggagaggcaccacgagaagtgacttcagactcaggaagcatcgttgtgtccggcttgactccaggagtagaatacgtctacaccatccaagtcctgagagatggacaggaaagagatgcgccaattgtaaacaaagtggtgacaccattgtctccaccaacaaacttgcatctggaggcaaaccctgacactggagtgctcacagtctcctgggagaggagcaccaccccagacattactggttatagaattaccacaacccctacaaacggccagcagggaaattctttggaagaagtggtccatgctgatcagagctcctgcacttttgataacctgagtcccggcctggagtacaatgtcagtgtttacactgtcaaggatgacaaggaaagtgtccctatctctgataccatcatcccagaggtgccccaactcactgacctaagctttgttgatataaccgattcaagcatcggcctgaggtggaccccgctaaactcttccaccattattgggtaccgcatcacagtagttgcggcaggagaaggtatccctatttttgaagattttgtggactcctcagtaggatactacacagtcacagggctggagccgggcattgactatgatatcagcgttatcactctcattaatggcggcgagagtgcccctactacactgacacaacaaacggctgttcctcctcccactgacctgcgattcaccaacattggtccagacaccatgcgtgtcacctgggctccacccccatccattgatttaaccaacttcctggtgcgttactcacctgtgaaaaatgaggaagatgttgcagagttgtcaatttctccttcagacaatgcagtggtcttaacaaatctcctgcctggtacagaatatgtagtgagtgtctccagtgtctacgaacaacatgagagcacacctcttagaggaagacagaaaacaggtcttgattccccaactggcattgacttttctgatattactgccaactcttttactgtgcactggattgctcctcgagccaccatcactggctacaggatccgccatcatcccgagcacttcagtgggagacctcgagaagatcgggtgccccactctcggaattccatcaccctcaccaacctcactccaggcacagagtatgtggtcagcatcgttgctcttaatggcagagaggaaagtcccttattgattggccaacaatcaacagtttctgatgttccgagggacctggaagttgttgctgcgacccccaccagcctactgatcagctgggatgctcctgctgtcacagtgagatattacaggatcacttacggagaaacaggaggaaatagccctgtccaggagttcactgtgcctgggagcaagtctacagctaccatcagcggccttaaacctggagttgattataccatcactgtgtatgctgtcactggccgtggagacagccccgcaagcagcaagccaatttccattaattaccgaacagaaattgacaaaccatcccagatgcaagtgaccgatgttcaggacaacagcattagtgtcaagtggctgccttcaagttcccctgttactggttacagagtaaccaccactcccaaaaatggaccaggaccaacaaaaactaaaactgcaggtccagatcaaacagaaatgactattgaaggcttgcagcccacagtggagtatgtggttagtgtctatgctcagaatccaagcggagagagtcagcctctggttcagactgcagtaaccaacattgatcgccctaaaggactggcattcactgatgtggatgtcgattccatcaaaattgcttgggaaagcccacaggggcaagtttccaggtacagggtgacctactcgagccctgaggatggaatccatgagctattccctgcacctgatggtgaagaagacactgcagagctgcaaggcctcagaccgggttctgagtacacagtcagtgtggttgccttgcacgatgatatggagagccagcccctgattggaacccagtccacagctattcctgcaccaactgacctgaagttcactcaggtcacacccacaagcctgagcgcccagtggacaccacccaatgttcagctcactggatatcgagtgcgggtgacccccaaggagaagaccggaccaatgaaagaaatcaaccttgctcctgacagctcatccgtggttgtatcaggacttatggtggccaccaaatatgaagtgagtgtctatgctcttaaggacactttgacaagcagaccagctcagggtgttgtcaccactctggagaatgtcagcccaccaagaagggctcgtgtgacagatgctactgagaccaccatcaccattagctggagaaccaagactgagacgatcactggcttccaagttgatgccgttccagccaatggccagactccaatccagagaaccatcaagccagatgtcagaagctacaccatcacaggtttacaaccaggcactgactacaagatctacctgtacaccttgaatgacaatgctcggagctcccctgtggtcatcgacgcctccactgccattgatgcaccatccaacctgcgtttcctggccaccacacccaattccttgctggtatcatggcagccgccacgtgccaggattaccggctacatcatcaagtatgagaagcctgggtctcctcccagagaagtggtccctcggccccgccctggtgtcacagaggctactattactggcctggaaccgggaaccgaatatacaatttatgtcattgccctgaagaataatcagaagagcgagcccctgattggaaggaaaaagacaggatggtgccatgacaatggtgtgaactacaagattggagagaagtgggaccgtcagggagaaaatggccagatgatgagctgcacatgtcttgggaacggaaaaggagaattcaagtgtgaccctcatgaggcaacgtgttacgatgatgggaagacataccacgtaggagaacagtggcagaaggaatatctcggtgccatttgctcctgcacatgctttggaggccagcggggctggcgctgtgacaactgccgcagacctgggggtgaacccagtcccgaaggcactactggccagtcctacaaccagtattctcagagataccatcagagaacaaacactaatgttaattgcccaattgagtgcttcatgcctttagatgtacaggctgacagagaagattcccgagagtaaatcatctttccaatccagaggaacaagcatgtctctctgccaagatccatctaaactggagtgatgttagcagacccagcttagagttcttctttctttcttaagccctttgctctggaggaagttctccagcttcagctcaactcacagcttctccaagcatcaccctgggagtttcctgagggttttctcataaatgagggctgcacattgcctgttctgcttcgaagtattcaataccgctcagtattttaaatgaagtgattctaagatttggtttgggatcaataggaaagcatatgcagccaaccaagatgcaaatgttttgaaatgattgtctggcccgcaatactgtaggaacaagcatgatcttgttactgtgatattttaaatatccacagtactcactttttccaaatgatcctagtaattgcctagaaatatctttctcttacctgttatttatcaatttttcccagtatttttatacggaaaaaattgtattgaaaacacttagtatgcagttgataagaggaatttggtataattatggtgggtgattattttttatactgtatgtgccaaagctttactactgtggaaagacaactgttttaataaaagatttacattccacaacttgaagttcatctatttgatataagacaccttcgggggaaataattcctgtgaatattctttttcaattcagcaaacatttgaaaatctatgatgtgcaagtctaattgttgatttcagtacaagattttctaaatcagttgctacaaaaactgattggtttttgtcacttcatctcttcactaatggagatagcttt

SEQ ID NO: 1481 - DNA, 8815 bp, Homo sapiens
gcccgcgccggctgtgctgcacagggggaggagagggaaccccaggcgcgagcgggaagaggggacctgcagccacaacttctctggtcctctgcatcccttctgtccctccacccgtccccttccccaccctctggcccccaccttcttggaggcgacaacccccgggaggcattagaagggatttttcccgcaggttgcgaagggaagcaaacttggtggcaacttgcctcccggtgcgggcgtctctcccccaccgtctcaacatgcttaggggtccggggcccgggctgctgctgctggccgtccagtgcctggggacagcggtgccctccacgggagcctcgaagagcaagaggcaggctcagcaaatggttcagccccagtccccggtggctgtcagtcaaagcaagcccggttgttatgacaatggaaaacactatcagataaatcaacagtgggagcggacctacctaggcaatgcgttggtttgtacttgttatggaggaagccgaggttttaactgcgagagtaaacctgaagctgaagagacttgctttgacaagtacactgggaacacttaccgagtgggtgacacttatgagcgtcctaaagactccatgatctgggactgtacctgcatcggggctgggcgagggagaataagctgtaccatcgcaaaccgctgccatgaagggggtcagtcctacaagattggtgacacctggaggagaccacatgagactggtggttacatgttagagtgtgtgtgtcttggtaatggaaaaggagaatggacctgcaagcccatagctgagaagtgttttgatcatgctgctgggacttcctatgtggtcggagaaacgtgggagaagccctaccaaggctggatgatggtagattgtacttgcctgggagaaggcagcggacgcatcacttgcacttctagaaatagatgcaacgatcaggacacaaggacatcctatagaattggagacacctggagcaagaaggataatcgaggaaacctgctccagtgcatctgcacaggcaacggccgaggagagtggaagtgtgagaggcacacctctgtgcagaccacatcgagcggatctggccccttcaccgatgttcgtgcagctgtttaccaaccgcagcctcacccccagcctcctccctatggccactgtgtcacagacagtggtgtggtctactctgtggggatgcagtggctgaagacacaaggaaataagcaaatgctttgcacgtgcctgggcaacggagtcagctgccaagagacagctgtaacccagacttacggtggcaactcaaatggagagccatgtgtcttaccattcacctacaatggcaggacgttctactcctgcaccacagaagggcgacaggacggacatctttggtgcagcacaacttcgaattatgagcaggaccagaaatactctttctgcacagaccacactgttttggttcagactcgaggaggaaattccaatggtgccttgtgccacttccccttcctatacaacaaccacaattacactgattgcacttctgagggcagaagagacaacatgaagtggtgtgggaccacacagaactatgatgccgaccagaagtttgggttctgccccatggctgcccacgaggaaatctgcacaaccaatgaaggggtcatgtaccgcattggagatcagtgggataagcagcatgacatgggtcacatgatgaggtgcacgtgtgttgggaatggtcgtggggaatggacatgcattgcctactcgcagcttcgagatcagtgcattgttgatgacatcacttacaatgtgaacgacacattccacaagcgtcatgaagaggggcacatgctgaactgtacatgcttcggtcagggtcggggcaggtggaagtgtgatcccgtcgaccaatgccaggattcagagactgggacgttttatcaaattggagattcatgggagaagtatgtgcatggtgtcagataccagtgctactgctatggccgtggcattggggagtggcattgccaacctttacagacctatccaagctcaagtggtcctgtcgaagtatttatcactgagactccgagtcagcccaactcccaccccatccagtggaatgcaccacagccatctcacatttccaagtacattctcaggtggagacctaaaaattctgtaggccgttggaaggaagctaccataccaggccacttaaactcctacaccatcaaaggcctgaagcctggtgtggtatacgagggccagctcatcagcatccagcagtacggccaccaagaagtgactcgctttgacttcaccaccaccagcaccagcacacctgtgaccagcaacaccgtgacaggagagacgactcccttttctcctcttgtggccacttctgaatctgtgaccgaaatcacagccagtagctttgtggtctcctgggtctcagcttccgacaccgtgtcgggattccgggtggaatatgagctgagtgaggagggagatgagccacagtacctggatcttccaagcacagccacttctgtgaacatccctgacctgcttcctggccgaaaatacattgtaaatgtctatcagatatctgaggatggggagcagagtttgatcctgtctacttcacaaacaacagcgcctgatgcccctcctgacccgactgtggaccaagttgatgacacctcaattgttgttcgctggagcagaccccaggctcccatcacagggtacagaatagtctattcgccatcagtagaaggtagcagcacagaactcaaccttcctgaaactgcaaactccgtcaccctcagtgacttgcaacctggtgttcagtataacatcactatctatgctgtggaagaaaatcaagaaagtacacctgttgtcattcaacaagaaaccactggcaccccacgctcagatacagtgccctctcccagggacctgcagtttgtggaagtgacagacgtgaaggtcaccatcatgtggacaccgcctgagagtgcagtgaccggctaccgtgtggatgtgatccccgtcaacctgcctggcgagcacgggcagaggctgcccatcagcaggaacacctttgcagaagtcaccgggctgtcccctggggtcacctattacttcaaagtctttgcagtgagccatgggagggagagcaagcctctgactgctcaacagacaaccaaactggatgctcccactaacctccagtttgtcaatgaaactgattctactgtcctggtgagatggactccacctcgggcccagataacaggataccgactgaccgtgggccttacccgaagaggacagcccaggcagtacaatgtgggtccctctgtctccaagtacccactgaggaatctgcagcctgcatctgagtacaccgtatccctcgtggccataaagggcaaccaagagagccccaaagccactggagtctttaccacactgcagcctgggagctctattccaccttacaacaccgaggtgactgagaccaccattgtgatcacatggacgcctgctccaagaattggttttaagctgggtgtacgaccaagccagggaggagaggcaccacgagaagtgacttcagactcaggaagcatcgttgtgtccggcttgactccaggagtagaatacgtctacaccatccaagtcctgagagatggacaggaaagagatgcgccaattgtaaacaaagtggtgacaccattgtctccaccaacaaacttgcatctggaggcaaaccctgacactggagtgctcacagtctcctgggagaggagcaccaccccagacattactggttatagaattaccacaacccctacaaacggccagcagggaaattctttggaagaagtggtccatgctgatcagagctcctgcacttttgataacctgagtcccggcctggagtacaatgtcagtgtttacactgtcaaggatgacaaggaaagtgtccctatctctgataccatcatcccagaggtgccccaactcactgacctaagctttgttgatataaccgattcaagcatcggcctgaggtggaccccgctaaactcttccaccattattgggtaccgcatcacagtagttgcggcaggagaaggtatccctatttttgaagattttgtggactcctcagtaggatactacacagtcacagggctggagccgggcattgactatgatatcagcgttatcactctcattaatggcggcgagagtgcccctactacactgacacaacaaacggctgttcctcctcccactgacctgcgattcaccaacattggtccagacaccatgcgtgtcacctgggctccacccccatccattgatttaaccaacttcctggtgcgttactcacctgtgaaaaatgaggaagatgttgcagagttgtcaatttctccttcagacaatgcagtggtcttaacaaatctcctgcctggtacagaatatgtagtgagtgtctccagtgtctacgaacaacatgagagcacacctcttagaggaagacagaaaacaggtcttgattccccaactggcattgacttttctgatattactgccaactcttttactgtgcactggattgctcctcgagccaccatcactggctacaggatccgccatcatcccgagcacttcagtgggagacctcgagaagatcgggtgccccactctcggaattccatcaccctcaccaacctcactccaggcacagagtatgtggtcagcatcgttgctcttaatggcagagaggaaagtcccttattgattggccaacaatcaacagtttctgatgttccgagggacctggaagttgttgctgcgacccccaccagcctactgatcagctgggatgctcctgctgtcacagtgagatattacaggatcacttacggagagacaggaggaaatagccctgtccaggagttcactgtgcctgggagcaagtctacagctaccatcagcggccttaaacctggagttgattataccatcactgtgtatgctgtcactggccgtggagacagccccgcaagcagcaagccaatttccattaattaccgaacagaaattgacaaaccatcccagatgcaagtgaccgatgttcaggacaacagcattagtgtcaagtggctgccttcaagttcccctgttactggttacagagtaaccaccactcccaaaaatggaccaggaccaacaaaaactaaaactgcaggtccagatcaaacagaaatgactattgaaggcttgcagcccacagtggagtatgtggttagtgtctatgctcagaatccaagcggagagagtcagcctctggttcagactgcagtaaccaacattgatcgccctaaaggactggcattcactgatgtggatgtcgattccatcaaaattgcttgggaaagcccacaggggcaagtttccaggtacagggtgacctactcgagccctgaggatggaatccatgagctattccctgcacctgatggtgaagaagacactgcagagctgcaaggcctcagaccgggttctgagtacacagtcagtgtggttgccttgcacgatgatatggagagccagcccctgattggaacccagtccacagctattcctgcaccaactgacctgaagttcactcaggtcacacccacaagcctgagcgcccagtggacaccacccaatgttcagctcactggatatcgagtgcgggtgacccccaaggagaagaccggaccaatgaaagaaatcaaccttgctcctgacagctcatccgtggttgtatcaggacttatggtggccaccaaatatgaagtgagtgtctatgctcttaaggacactttgacaagcagaccagctcagggagttgtcaccactctggagaatgtcagcccaccaagaagggctcgtgtgacagatgctactgagaccaccatcaccattagctggagaaccaagactgagacgatcactggcttccaagttgatgccgttccagccaatggccagactccaatccagagaaccatcaagccagatgtcagaagctacaccatcacaggtttacaaccaggcactgactacaagatctacctgtacaccttgaatgacaatgctcggagctcccctgtggtcatcgacgcctccactgccattgatgcaccatccaacctgcgtttcctggccaccacacccaattccttgctggtatcatggcagccgccacgtgccaggattaccggctacatcatcaagtatgagaagcctgggtctcctcccagagaagtggtccctcggccccgccctggtgtcacagaggctactattactggcctggaaccgggaaccgaatatacaatttatgtcattgccctgaagaataatcagaagagcgagcccctgattggaaggaaaaagacagacgagcttccccaactggtaacccttccacaccccaatcttcatggaccagagatcttggatgttccttccacagttcaaaagacccctttcgtcacccaccctgggtatgacactggaaatggtattcagcttcctggcacttctggtcagcaacccagtgttgggcaacaaatgatctttgaggaacatggttttaggcggaccacaccgcccacaacggccacccccataaggcataggccaagaccatacccgccgaatgtaggtgaggaaatccaaattggtcacatccccagggaagatgtagactatcacctgtacccacacggtccgggactcaatccaaatgcctctacaggacaagaagctctctctcagacaaccatctcatgggccccattccaggacacttctgagtacatcatttcatgtcatcctgttggcactgatgaagaacccttacagttcagggttcctggaacttctaccagtgccactctgacaggcctcaccagaggtgccacctacaacatcatagtggaggcactgaaagaccagcagaggcataaggttcgggaagaggttgttaccgtgggcaactctgtcaacgaaggcttgaaccaacctacggatgactcgtgctttgacccctacacagtttcccattatgccgttggagatgagtgggaacgaatgtctgaatcaggctttaaactgttgtgccagtgcttaggctttggaagtggtcatttcagatgtgattcatctagatggtgccatgacaatggtgtgaactacaagattggagagaagtgggaccgtcagggagaaaatggccagatgatgagctgcacatgtcttgggaacggaaaaggagaattcaagtgtgaccctcatgaggcaacgtgttatgatgatgggaagacataccacgtaggagaacagtggcagaaggaatatctcggtgccatttgctcctgcacatgctttggaggccagcggggctggcgctgtgacaactgccgcagacctgggggtgaacccagtcccgaaggcactactggccagtcctacaaccagtattctcagagataccatcagagaacaaacactaatgttaattgcccaattgagtgcttcatgcctttagatgtacaggctgacagagaagattcccgagagtaaatcatctttccaatccagaggaacaagcatgtctctctgccaagatccatctaaactggagtgatgttagcagacccagcttagagttcttctttctttcttaagccctttgctctggaggaagttctccagcttcagctcaactcacagcttctccaagcatcaccctgggagtttcctgagggttttctcataaatgagggctgcacattgcctgttctgcttcgaagtattcaataccgctcagtattttaaatgaagtgattctaagatttggtttgggatcaataggaaagcatatgcagccaaccaagatgcaaatgttttgaaatgatatgaccaaaattttaagtaggaaagtcacccaaacacttctgctttcacttaagtgtctggcccgcaatactgtaggaacaagcatgatcttgttactgtgatattttaaatatccacagtactcactttttccaaatgatcctagtaattgcctagaaatatctttctcttacctgttatttatcaatttttcccagtatttttatacggaaaaaattgtattgaaaacacttagtatgcagttgataagaggaatttggtataattatggtgggtgattattttttatactgtatgtgccaaagctttactactgtggaaagacaactgttttaataaaagatttacattccacaacttgaagttcatctatttgatataagacaccttcgggggaaataattcctgtgaatattctttttcaattcagcaaacatttgaaaatctatgatgtgcaagtctaattgttgatttcagtacaagattttctaaatcagttgctacaaaaactgattggtttttgtcacttcatctcttcactaatggagatagctttacactttctgctttaatagatttaagtggaccccaatatttattaaaattgctagtttaccgttcagaagtataatagaaataatctttagttgctcttttctaaccattgtaattcttcccttcttccctccacctttccttcattgaataaacctctgttcaaagagattgcctgcaagggaaataaaaatgactaagatattaaaaaaaaaaaaaaaaaa

SEQ ID NO: 1482 - DNA, 8278 bp, Homo sapiens
ggcggggcggggacagcccggcgggtctctcctcccccgcgccccgggcctccagaggggcgggaggggaccgtcccatataagccccggctcccggcgctcggacgcccgcgccggctgtgctgcacagggggaggagagggaaccccaggcgcgagcgggaagaggggacctgcagccacaacttctctggtcctctgcatcccttctgtccctccacccgtccccttccccaccctctggcccccaccttcttggaggcgacaacccccgggaggcattagaagggatttttcccgcaggttgcgaagggaagcaaacttggtggcaacttgcctcccggtgcgggcgtctctcccccaccgtctcaacatgcttaggggtccggggcccgggctgctgctgctggccgtcctgtgcctggggacagcggtgccctccacgggagcctcgaagagcaagaggcaggctcagcaaatggttcagccccagtccccggtggctgtcagtcaaagcaagcccggttgttatgacaatggaaaacactatcagataaatcaacagtgggagcggacctacctaggcaatgcgttggtttgtacttgttatggaggaagccgaggttttaactgcgagagtaaacctgaagctgaagagacttgctttgacaagtacactgggaacacttaccgagtgggtgacacttatgagcgtcctaaagactccatgatctgggactgtacctgcatcggggctgggcgagggagaataagctgtaccatcgcaaaccgctgccatgaagggggtcagtcctacaagattggtgacacctggaggagaccacatgagactggtggttacatgttagagtgtgtgtgtcttggtaatggaaaaggagaatggacctgcaagcccatagctgagaagtgttttgatcatgctgctgggacttcctatgtggtcggagaaacgtgggagaagccctaccaaggctggatgatggtagattgtacttgcctgggagaaggcagcggacgcatcacttgcacttctagaaatagatgcaacgatcaggacacaaggacatcctatagaattggagacacctggagcaagaaggataatcgaggaaacctgctccagtgcatctgcacaggcaacggccgaggagagtggaagtgtgagaggcacacctctgtgcagaccacatcgagcggatctggccccttcaccgatgttcgtgcagctgtttaccaaccgcagcctcacccccagcctcctccctatggccactgtgtcacagacagtggtgtggtctactctgtggggatgcagtggctgaagacacaaggaaataagcaaatgctttgcacgtgcctgggcaacggagtcagctgccaagagacagctgtaacccagacttacggtggcaactcaaatggagagccatgtgtcttaccattcacctacaatggcaggacgttctactcctgcaccacagaagggcgacaggacggacatctttggtgcagcacaacttcgaattatgagcaggaccagaaatactctttctgcacagaccacactgttttggttcagactcgaggaggaaattccaatggtgccttgtgccacttccccttcctatacaacaaccacaattacactgattgcacttctgagggcagaagagacaacatgaagtggtgtgggaccacacagaactatgatgccgaccagaagtttgggttctgccccatggctgcccacgaggaaatctgcacaaccaatgaaggggtcatgtaccgcattggagatcagtgggataagcagcatgacatgggtcacatgatgaggtgcacgtgtgttgggaatggtcgtggggaatggacatgcattgcctactcgcagcttcgagatcagtgcattgttgatgacatcacttacaatgtgaacgacacattccacaagcgtcatgaagaggggcacatgctgaactgtacatgcttcggtcagggtcggggcaggtggaagtgtgatcccgtcgaccaatgccaggattcagagactgggacgttttatcaaattggagattcatgggagaagtatgtgcatggtgtcagataccagtgctactgctatggccgtggcattggggagtggcattgccaacctttacagacctatccaagctcaagtggtcctgtcgaagtatttatcactgagactccgagtcagcccaactcccaccccatccagtggaatgcaccacagccatctcacatttccaagtacattctcaggtggagacctaaaaattctgtaggccgttggaaggaagctaccataccaggccacttaaactcctacaccatcaaaggcctgaagcctggtgtggtatacgagggccagctcatcagcatccagcagtacggccaccaagaagtgactcgctttgacttcaccaccaccagcaccagcacacctgtgaccagcaacaccgtgacaggagagacgactcccttttctcctcttgtggccacttctgaatctgtgaccgaaatcacagccagtagctttgtggtctcctgggtctcagcttccgacaccgtgtcgggattccgggtggaatatgagctgagtgaggagggagatgagccacagtacctggatcttccaagcacagccacttctgtgaacatccctgacctgcttcctggccgaaaatacattgtaaatgtctatcagatatctgaggatggggagcagagtttgatcctgtctacttcacaaacaacagcgcctgatgccccacctgacccgactgtggaccaagttgatgacacctcaattgttgttcgctggagcagaccccaggctcccatcacagggtacagaatagtctattcgccatcagtagaaggtagcagcacagaactcaaccttcctgaaactgcaaactccgtcaccctcagtgacttgcaacctggtgttcagtataacatcactatctatgctgtggaagaaaatcaagaaagtacacctgttgtcattcaacaagaaaccactggcaccccacgctcagatacagtgccctctcccagggacctgcagtttgtggaagtgacagacgtgaaggtcaccatcatgtggacaccgcctgagagtgcagtgaccggctaccgtgtggatgtgatccccgtcaacctgcctggcgagcacgggcagaggctgcccatcagcaggaacacctttgcagaagtcaccgggctgtcccctggggtcacctattacttcaaagtctttgcagtgagccatgggagggagagcaagcctctgactgctcaacagacaaccaaactggatgctcccactaacctccagtttgtcaatgaaactgattctactgtcctggtgagatggactccacctcgggcccagataacaggataccgactgaccgtgggccttacccgaagaggacagcccaggcagtacaatgtgggtccctctgtctccaagtacccactgaggaatctgcagcctgcatctgagtacaccgtatccctcgtggccataaagggcaaccaagagagccccaaagccactggagtctttaccacactgcagcctgggagctctattccaccttacaacaccgaggtgactgagaccaccattgtgatcacatggacgcctgctccaagaattggttttaagctgggtgtacgaccaagccagggaggagaggcaccacgagaagtgacttcagactcaggaagcatcgttgtgtccggcttgactccaggagtagaatacgtctacaccatccaagtcctgagagatggacaggaaagagatgcgccaattgtaaacaaagtggtgacaccattgtctccaccaacaaacttgcatctggaggcaaaccctgacactggagtgctcacagtctcctgggagaggagcaccaccccagacattactggttatagaattaccacaacccctacaaacggccagcagggaaattctttggaagaagtggtccatgctgatcagagctcctgcacttttgataacctgagtcccggcctggagtacaatgtcagtgtttacactgtcaaggatgacaaggaaagtgtccctatctctgataccatcatcccagctgttcctcctcccactgacctgcgattcaccaacattggtccagacaccatgcgtgtcacctgggctccacccccatccattgatttaaccaacttcctggtgcgttactcacctgtgaaaaatgaggaagatgttgcagagttgtcaatttctccttcagacaatgcagtggtcttaacaaatctcctgcctggtacagaatatgtagtgagtgtctccagtgtctacgaacaacatgagagcacacctcttagaggaagacagaaaacaggtcttgattccccaactggcattgacttttctgatattactgccaactcttttactgtgcactggattgctcctcgagccaccatcactggctacaggatccgccatcatcccgagcacttcagtgggagacctcgagaagatcgggtgccccactctcggaattccatcaccctcaccaacctcactccaggcacagagtatgtggtcagcatcgttgctcttaatggcagagaggaaagtcccttattgattggccaacaatcaacagtttctgatgttccgagggacctggaagttgttgctgcgacccccaccagcctactgatcagctgggatgctcctgctgtcacagtgagatattacaggatcacttacggagaaacaggaggaaatagccctgtccaggagttcactgtgcctgggagcaagtctacagctaccatcagcggccttaaacctggagttgattataccatcactgtgtatgctgtcactggccgtggagacagccccgcaagcagcaagccaatttccattaattaccgaacagaaattgacaaaccatcccagatgcaagtgaccgatgttcaggacaacagcattagtgtcaagtggctgccttcaagttcccctgttactggttacagagtaaccaccactcccaaaaatggaccaggaccaacaaaaactaaaactgcaggtccagatcaaacagaaatgactattgaaggcttgcagcccacagtggagtatgtggttagtgtctatgctcagaatccaagcggagagagtcagcctctggttcagactgcagtaaccaacattgatcgccctaaaggactggcattcactgatgtggatgtcgattccatcaaaattgcttgggaaagcccacaggggcaagtttccaggtacagggtgacctactcgagccctgaggatggaatccatgagctattccctgcacctgatggtgaagaagacactgcagagctgcaaggcctcagaccgggttctgagtacacagtcagtgtggttgccttgcacgatgatatggagagccagcccctgattggaacccagtccacagctattcctgcaccaactgacctgaagttcactcaggtcacacccacaagcctgagcgcccagtggacaccacccaatgttcagctcactggatatcgagtgcgggtgacccccaaggagaagaccggaccaatgaaagaaatcaaccttgctcctgacagctcatccgtggttgtatcaggacttatggtggccaccaaatatgaagtgagtgtctatgctcttaaggacactttgacaagcagaccagctcagggtgttgtcaccactctggagaatgtcagcccaccaagaagggctcgtgtgacagatgctactgagaccaccatcaccattagctggagaaccaagactgagacgatcactggcttccaagttgatgccgttccagccaatggccagactccaatccagagaaccatcaagccagatgtcagaagctacaccatcacaggtttacaaccaggcactgactacaagatctacctgtacaccttgaatgacaatgctcggagctcccctgtggtcatcgacgcctccactgccattgatgcaccatccaacctgcgtttcctggccaccacacccaattccttgctggtatcatggcagccgccacgtgccaggattaccggctacatcatcaagtatgagaagcctgggtctcctcccagagaagtggtccctcggccccgccctggtgtcacagaggctactattactggcctggaaccgggaaccgaatatacaatttatgtcattgccctgaagaataatcagaagagcgagcccctgattggaaggaaaaagacagacgagcttccccaactggtaacccttccacaccccaatcttcatggaccagagatcttggatgttccttccacagttcaaaagacccctttcgtcacccaccctgggtatgacactggaaatggtattcagcttcctggcacttctggtcagcaacccagtgttgggcaacaaatgatctttgaggaacatggttttaggcggaccacaccgcccacaacggccacccccataaggcataggccaagaccatacccgccgaatgtaggacaagaagctctctctcagacaaccatctcatgggccccattccaggacacttctgagtacatcatttcatgtcatcctgttggcactgatgaagaacccttacagttcagggttcctggaacttctaccagtgccactctgacaggcctcaccagaggtgccacctacaacatcatagtggaggcactgaaagaccagcagaggcataaggttcgggaagaggttgttaccgtgggcaactctgtcaacgaaggcttgaaccaacctacggatgactcgtgctttgacccctacacagtttcccattatgccgttggagatgagtgggaacgaatgtctgaatcaggctttaaactgttgtgccagtgcttaggctttggaagtggtcatttcagatgtgattcatctagatggtgccatgacaatggtgtgaactacaagattggagagaagtgggaccgtcagggagaaaatggccagatgatgagctgcacatgtcttgggaacggaaaaggagaattcaagtgtgaccctcatgaggcaacgtgttacgatgatgggaagacataccacgtaggagaacagtggcagaaggaatatctcggtgccatttgctcctgcacatgctttggaggccagcggggctggcgctgtgacaactgccgcagacctgggggtgaacccagtcccgaaggcactactggccagtcctacaaccagtattctcagagataccatcagagaacaaacactaatgttaattgcccaattgagtgcttcatgcctttagatgtacaggctgacagagaagattcccgagagtaaatcatctttccaatccagaggaacaagcatgtctctctgccaagatccatctaaactggagtgatgttagcagacccagcttagagttcttctttctttcttaagccctttgctctggaggaagttctccagcttcagctcaactcacagcttctccaagcatcaccctgggagtttcctgagggttttctcataaatgagggctgcacattgcctgttctgcttcgaagtattcaataccgctcagtattttaaatgaagtgattctaagatttggtttgggatcaataggaaagcatatgcagccaaccaagatgcaaatgttttgaaatgattgtctggcccgcaatactgtaggaacaagcatgatcttgttactgtgatattttaaatatccacagtactcactttttccaaatgatcctagtaattgcctagaaatatctttctcttacctgttatttatcaatttttcccagtatttttatacggaaaaaattgtattgaaaacacttagtatgcagttgataagaggaatttggtataattatggtgggtgattattttttatactgtatgtgccaaagctttactactgtggaaagacaactgttttaataaaagatttacattccacaacttgaagttcatctatttgatataagacaccttcgggggaaataattcctgtgaatattctttttcaattcagcaaacatttgaaaatctatgatgtgcaagtctaattgttgatttcagtacaagattttctaaatcagttgctacaaaaactgattggtttttgtcacttcatctcttcactaatggagatagcttt

SEQ ID NO: 1483 - DNA, 8013 bp, Homo sapiens
ggcggggcggggacagcccggcgggtctctcctcccccgcgccccgggcctccagaggggcgggaggggaccgtcccatataagccccggctcccggcgctcggacgcccgcgccggctgtgctgcacagggggaggagagggaaccccaggcgcgagcgggaagaggggacctgcagccacaacttctctggtcctctgcatcccttctgtccctccacccgtccccttccccaccctctggcccccaccttcttggaggcgacaacccccgggaggcattagaagggatttttcccgcaggttgcgaagggaagcaaacttggtggcaacttgcctcccggtgcgggcgtctctcccccaccgtctcaacatgcttaggggtccggggcccgggctgctgctgctggccgtcctgtgcctggggacagcggtgccctccacgggagcctcgaagagcaagaggcaggctcagcaaatggttcagccccagtccccggtggctgtcagtcaaagcaagcccggttgttatgacaatggaaaacactatcagataaatcaacagtgggagcggacctacctaggcaatgcgttggtttgtacttgttatggaggaagccgaggttttaactgcgagagtaaacctgaagctgaagagacttgctttgacaagtacactgggaacacttaccgagtgggtgacacttatgagcgtcctaaagactccatgatctgggactgtacctgcatcggggctgggcgagggagaataagctgtaccatcgcaaaccgctgccatgaagggggtcagtcctacaagattggtgacacctggaggagaccacatgagactggtggttacatgttagagtgtgtgtgtcttggtaatggaaaaggagaatggacctgcaagcccatagctgagaagtgttttgatcatgctgctgggacttcctatgtggtcggagaaacgtgggagaagccctaccaaggctggatgatggtagattgtacttgcctgggagaaggcagcggacgcatcacttgcacttctagaaatagatgcaacgatcaggacacaaggacatcctatagaattggagacacctggagcaagaaggataatcgaggaaacctgctccagtgcatctgcacaggcaacggccgaggagagtggaagtgtgagaggcacacctctgtgcagaccacatcgagcggatctggccccttcaccgatgttcgtgcagctgtttaccaaccgcagcctcacccccagcctcctccctatggccactgtgtcacagacagtggtgtggtctactctgtggggatgcagtggctgaagacacaaggaaataagcaaatgctttgcacgtgcctgggcaacggagtcagctgccaagagacagctgtaacccagacttacggtggcaactcaaatggagagccatgtgtcttaccattcacctacaatggcaggacgttctactcctgcaccacagaagggcgacaggacggacatctttggtgcagcacaacttcgaattatgagcaggaccagaaatactctttctgcacagaccacactgttttggttcagactcgaggaggaaattccaatggtgccttgtgccacttccccttcctatacaacaaccacaattacactgattgcacttctgagggcagaagagacaacatgaagtggtgtgggaccacacagaactatgatgccgaccagaagtttgggttctgccccatggctgcccacgaggaaatctgcacaaccaatgaaggggtcatgtaccgcattggagatcagtgggataagcagcatgacatgggtcacatgatgaggtgcacgtgtgttgggaatggtcgtggggaatggacatgcattgcctactcgcagcttcgagatcagtgcattgttgatgacatcacttacaatgtgaacgacacattccacaagcgtcatgaagaggggcacatgctgaactgtacatgcttcggtcagggtcggggcaggtggaagtgtgatcccgtcgaccaatgccaggattcagagactgggacgttttatcaaattggagattcatgggagaagtatgtgcatggtgtcagataccagtgctactgctatggccgtggcattggggagtggcattgccaacctttacagacctatccaagctcaagtggtcctgtcgaagtatttatcactgagactccgagtcagcccaactcccaccccatccagtggaatgcaccacagccatctcacatttccaagtacattctcaggtggagacctaaaaattctgtaggccgttggaaggaagctaccataccaggccacttaaactcctacaccatcaaaggcctgaagcctggtgtggtatacgagggccagctcatcagcatccagcagtacggccaccaagaagtgactcgctttgacttcaccaccaccagcaccagcacacctgtgaccagcaacaccgtgacaggagagacgactcccttttctcctcttgtggccacttctgaatctgtgaccgaaatcacagccagtagctttgtggtctcctgggtctcagcttccgacaccgtgtcgggattccgggtggaatatgagctgagtgaggagggagatgagccacagtacctggatcttccaagcacagccacttctgtgaacatccctgacctgcttcctggccgaaaatacattgtaaatgtctatcagatatctgaggatggggagcagagtttgatcctgtctacttcacaaacaacagcgcctgatgccccacctgacccgactgtggaccaagttgatgacacctcaattgttgttcgctggagcagaccccaggctcccatcacaggtcagctaaaatagtctattcgccatcagtagaaggtagcagcacagaactcaaccttcctgaaactgcaaactccgtcaccctcagtgacttgcaacctggtgttcagtataacatcactatctatgctgtggaagaaaatcaagaaagtacacctgttgtcattcaacaagaaaccactggcaccccacgctcagatacagtgccctctcccagggacctgcagtttgtggaagtgacagacgtgaaggtcaccatcatgtggacaccgcctgagagtgcagtgaccggctaccgtgtggatgtgatccccgtcaacctgcctggcgagcacgggcagaggctgcccatcagcaggaacacctttgcagaagtcaccgggctgtcccctggggtcacctattacttcaaagtctttgcagtgagccatgggagggagagcaagcctctgactgctcaacagacaaccaaactggatgctcccactaacctccagtttgtcaatgaaactgattctactgtcctggtgagatggactccacctcgggcccagataacaggataccgactgaccgtgggccttacccgaagaggacagcccaggcagtacaatgtgggtccctctgtctccaagtacccactgaggaatctgcagcctgcatctgagtacaccgtatccctcgtggccataaagggcaaccaagagagccccaaagccactggagtctttaccacactgcagcctgggagctctattccaccttacaacaccgaggtgactgagaccaccattgtgatcacatggacgcctgctccaagaattggttttaagctgggtgtacgaccaagccagggaggagaggcaccacgagaagtgacttcagactcaggaagcatcgttgtgtccggcttgactccaggagtagaatacgtctacaccatccaagtcctgagagatggacaggaaagagatgcgccaattgtaaacaaagtggtgacaccattgtctccaccaacaaacttgcatctggaggcaaaccctgacactggagtgctcacagtctcctgggagaggagcaccaccccagacattactggttatagaattaccacaacccctacaaacggccagcagggaaattctttggaagaagtggtccatgctgatcagagctcctgcacttttgataacctgagtcccggcctggagtacaatgtcagtgtttacactgtcaaggatgacaaggaaagtgtccctatctctgataccatcatcccagctgttcctcctcccactgacctgcgattcaccaacattggtccagacaccatgcgtgtcacctgggctccacccccatccattgatttaaccaacttcctggtgcgttactcacctgtgaaaaatgaggaagatgttgcagagttgtcaatttctccttcagacaatgcagtggtcttaacaaatctcctgcctggtacagaatatgtagtgagtgtctccagtgtctacgaacaacatgagagcacacctcttagaggaagacagaaaacaggtcttgattccccaactggcattgacttttctgatattactgccaactcttttactgtgcactggattgctcctcgagccaccatcactggctacaggatccgccatcatcccgagcacttcagtgggagacctcgagaagatcgggtgccccactctcggaattccatcaccctcaccaacctcactccaggcacagagtatgtggtcagcatcgttgctcttaatggcagagaggaaagtcccttattgattggccaacaatcaacagtttctgatgttccgagggacctggaagttgttgctgcgacccccaccagcctactgatcagctgggatgctcctgctgtcacagtgagatattacaggatcacttacggagaaacaggaggaaatagccctgtccaggagttcactgtgcctgggagcaagtctacagctaccatcagcggccttaaacctggagttgattataccatcactgtgtatgctgtcactggccgtggagacagccccgcaagcagcaagccaatttccattaattaccgaacagaaattgacaaaccatcccagatgcaagtgaccgatgttcaggacaacagcattagtgtcaagtggctgccttcaagttcccctgttactggttacagagtaaccaccactcccaaaaatggaccaggaccaacaaaaactaaaactgcaggtccagatcaaacagaaatgactattgaaggcttgcagcccacagtggagtatgtggttagtgtctatgctcagaatccaagcggagagagtcagcctctggttcagactgcagtaaccaacattgatcgccctaaaggactggcattcactgatgtggatgtcgattccatcaaaattgcttgggaaagcccacaggggcaagtttccaggtacagggtgacctactcgagccctgaggatggaatccatgagctattccctgcacctgatggtgaagaagacactgcagagctgcaaggcctcagaccgggttctgagtacacagtcagtgtggttgccttgcacgatgatatggagagccagcccctgattggaacccagtccacagctattcctgcaccaactgacctgaagttcactcaggtcacacccacaagcctgagcgcccagtggacaccacccaatgttcagctcactggatatcgagtgcgggtgacccccaaggagaagaccggaccaatgaaagaaatcaaccttgctcctgacagctcatccgtggttgtatcaggacttatggtggccaccaaatatgaagtgagtgtctatgctcttaaggacactttgacaagcagaccagctcagggtgttgtcaccactctggagaatgtcagcccaccaagaagggctcgtgtgacagatgctactgagaccaccatcaccattagctggagaaccaagactgagacgatcactggcttccaagttgatgccgttccagccaatggccagactccaatccagagaaccatcaagccagatgtcagaagctacaccatcacaggtttacaaccaggcactgactacaagatctacctgtacaccttgaatgacaatgctcggagctcccctgtggtcatcgacgcctccactgccattgatgcaccatccaacctgcgtttcctggccaccacacccaattccttgctggtatcatggcagccgccacgtgccaggattaccggctacatcatcaagtatgagaagcctgggtctcctcccagagaagtggtccctcggccccgccctggtgtcacagaggctactattactggcctggaaccgggaaccgaatatacaatttatgtcattgccctgaagaataatcagaagagcgagcccctgattggaaggaaaaagacaggacaagaagctctctctcagacaaccatctcatgggccccattccaggacacttctgagtacatcatttcatgtcatcctgttggcactgatgaagaacccttacagttcagggttcctggaacttctaccagtgccactctgacaggcctcaccagaggtgccacctacaacatcatagtggaggcactgaaagaccagcagaggcataaggttcgggaagaggttgttaccgtgggcaactctgtcaacgaaggcttgaaccaacctacggatgactcgtgctttgacccctacacagtttcccattatgccgttggagatgagtgggaacgaatgtctgaatcaggctttaaactgttgtgccagtgcttaggctttggaagtggtcatttcagatgtgattcatctagatggtgccatgacaatggtgtgaactacaagattggagagaagtgggaccgtcagggagaaaatggccagatgatgagctgcacatgtcttgggaacggaaaaggagaattcaagtgtgaccctcatgaggcaacgtgttacgatgatgggaagacataccacgtaggagaacagtggcagaaggaatatctcggtgccatttgctcctgcacatgctttggaggccagcggggctggcgctgtgacaactgccgcagacctgggggtgaacccagtcccgaaggcactactggccagtcctacaaccagtattctcagagataccatcagagaacaaacactaatgttaattgcccaattgagtgcttcatgcctttagatgtacaggctgacagagaagattcccgagagtaaatcatctttccaatccagaggaacaagcatgtctctctgccaagatccatctaaactggagtgatgttagcagacccagcttagagttcttctttctttcttaagccctttgctctggaggaagttctccagcttcagctcaactcacagcttctccaagcatcaccctgggagtttcctgagggttttctcataaatgagggctgcacattgcctgttctgcttcgaagtattcaataccgctcagtattttaaatgaagtgattctaagatttggtttgggatcaataggaaagcatatgcagccaaccaagatgcaaatgttttgaaatgattgtctggcccgcaatactgtaggaacaagcatgatcttgttactgtgatattttaaatatccacagtactcactttttccaaatgatcctagtaattgcctagaaatatctttctcttacctgttatttatcaatttttcccagtatttttatacggaaaaaattgtattgaaaacacttagtatgcagttgataagaggaatttggtataattatggtgggtgattattttttatactgtatgtgccaaagctttactactgtggaaagacaactgttttaataaaagatttacattccacaacttgaagttcatctatttgatataagacaccttcgggggaaataattcctgtgaatattctttttcaattcagcaaacatttgaaaatctatgatgtgcaagtctaattgttgatttcagtacaagattttctaaatcagttgctacaaaaactgattggtttttgtcacttcatctcttcactaatggagatagcttt

SEQ ID NO: 1484 - DNA, 8278 bp, Homo sapiens; identical to SEQ ID NO: 1482

SEQ ID NO: 1485 - DNA, 7848 bp, Homo sapiens
ggcggggcggggacagcccggcgggtctctcctcccccgcgccccgggcctccagaggggcgggaggggaccgtcccatataagccccggctcccggcgctcggacgcccgcgccggctgtgctgcacagggggaggagagggaaccccaggcgcgagcgggaagaggggacctgcagccacaacttctctggtcctctgcatcccttctgtccctccacccgtccccttccccaccctctggcccccaccttcttggaggcgacaacccccgggaggcattagaagggatttttcccgcaggttgcgaagggaagcaaacttggtggcaacttgcctcccggtgcgggcgtctctcccccaccgtctcaacatgcttaggggtccggggcccgggctgctgctgctggccgtcctgtgcctggggacagcggtgccctccacgggagcctcgaagagcaagaggcaggctcagcaaatggttcagccccagtccccggtggctgtcagtcaaagcaagcccggttgttatgacaatggaaaacactatcagataaatcaacagtgggagcggacctacctaggcaatgcgttggtttgtacttgttatggaggaagccgaggttttaactgcgagagtaaacctgaagctgaagagacttgctttgacaagtacactgggaacacttaccgagtgggtgacacttatgagcgtcctaaagactccatgatctgggactgtacctgcatcggggctgggcgagggagaataagctgtaccatcgcaaaccgctgccatgaagggggtcagtcctacaagattggtgacacctggaggagaccacatgagactggtggttacatgttagagtgtgtgtgtcttggtaatggaaaaggagaatggacctgcaagcccatagctgagaagtgttttgatcatgctgctgggacttcctatgtggtcggagaaacgtgggagaagccctaccaaggctggatgatggtagattgtacttgcctgggagaaggcagcggacgcatcacttgcacttctagaaatagatgcaacgatcaggacacaaggacatcctatagaattggagacacctggagcaagaaggataatcgaggaaacctgctccagtgcatctgcacaggcaacggccgaggagagtggaagtgtgagaggcacacctctgtgcagaccacatcgagcggatctggccccttcaccgatgttcgtgcagctgtttaccaaccgcagcctcacccccagcctcctccctatggccactgtgtcacagacagtggtgtggtctactctgtggggatgcagtggctgaagacacaaggaaataagcaaatgctttgcacgtgcctgggcaacggagtcagctgccaagagacagctgtaacccagacttacggtggcaactcaaatggagagccatgtgtcttaccattcacctacaatggcaggacgttctactcctgcaccacagaagggcgacaggacggacatctttggtgcagcacaacttcgaattatgagcaggaccagaaatactctttctgcacagaccacactgttttggttcagactcgaggaggaaattccaatggtgccttgtgccacttccccttcctatacaacaaccacaattacactgattgcacttctgagggcagaagagacaacatgaagtggtgtgggaccacacagaactatgatgccgaccagaagtttgggttctgccccatggctgcccacgaggaaatctgcacaaccaatgaaggggtcatgtaccgcattggagatcagtgggataagcagcatgacatgggtcacatgatgaggtgcacgtgtgttgggaatggtcgtggggaatggacatgcattgcctactcgcagcttcgagatcagtgcattgttgatgacatcacttacaatgtgaacgacacattccacaagcgtcatgaagaggggcacatgctgaactgtacatgcttcggtcagggtcggggcaggtggaagtgtgatcccgtcgaccaatgccaggattcagagactgggacgttttatcaaattggagattcatgggagaagtatgtgcatggtgtcagataccagtgctactgctatggccgtggcattggggagtggcattgccaacctttacagacctatccaagctcaagtggtcctgtcgaagtatttatcactgagactccgagtcagcccaactcccaccccatccagtggaatgcaccacagccatctcacatttccaagtacattctcaggtggagacctaaaaattctgtaggccgttggaaggaagctaccataccaggccacttaaactcctacaccatcaaaggcctgaagcctggtgtggtatacgagggccagctcatcagcatccagcagtacggccaccaagaagtgactcgctttgacttcaccaccaccagcaccagcacacctgtgaccagcaacaccgtgacaggagagacgactcccttttctcctcttgtggccacttctgaatctgtgaccgaaatcacagccagtagctttgtggtctcctgggtctcagcttccgacaccgtgtcgggattccgggtggaatatgagctgagtgaggagggagatgagccacagtacctggatcttccaagcacagccacttctgtgaacatccctgacctgcttcctggccgaaaatacattgtaaatgtctatcagatatctgaggatggggagcagagtttgatcctgtctacttcacaaacaacagcgcctgatgccccacctgacccgactgtggaccaagttgatgacacctcaattgttgttcgctggagcagaccccaggctcccatcacaggtcagctaaaatagtctattcgccatcagtagaaggtagcagcacagaactcaaccttcctgaaactgcaaactccgtcaccctcagtgacttgcaacctggtgttcagtataacatcactatctatgctgtggaagaaaatcaagaaagtacacctgttgtcattcaacaagaaaccactggcaccccacgctcagatacagtgccctctcccagggacctgcagtttgtggaagtgacagacgtgaaggtcaccatcatgtggacaccgcctgagagtgcagtgaccggctaccgtgtggatgtgatccccgtcaacctgcctggcgagcacgggcagaggctgcccatcagcaggaacacctttgcagaagtcaccgggctgtcccctggggtcacctattacttcaaagtctttgcagtgagccatgggagggagagcaagcctctgactgctcaacagacaaccaaactggatgctcccactaacctccagtttgtcaatgaaactgattctactgtcctggtgagatggactccacctcgggcccagataacaggataccgactgaccgtgggccttacccgaagaggacagcccaggcagtacaatgtgggtccctctgtctccaagtacccactgaggaatctgcagcctgcatctgagtacaccgtatccctcgtggccataaagggcaaccaagagagccccaaagccactggagtctttaccacactgcagcctgggagctctattccaccttacaacaccgaggtgactgagaccaccattgtgatcacatggacgcctgctccaagaattggttttaagctgggtgtacgaccaagccagggaggagaggcaccacgagaagtgacttcagactcaggaagcatcgttgtgtccggcttgactccaggagtagaatacgtctacaccatccaagtcctgagagatggacaggaaagagatgcgccaattgtaaacaaagtggtgacaccattgtctccaccaacaaacttgcatctggaggcaaaccctgacactggagtgctcacagtctcctgggagaggagcaccaccccagacattactggttatagaattaccacaacccctacaaacggccagcagggaaattctttggaagaagtggtccatgctgatcagagctcctgcacttttgataacctgagtcccggcctggagtacaatgtcagtgtttacactgtcaaggatgacaaggaaagtgtccctatctctgataccatcatcccagctgttcctcctcccactgacctgcgattcaccaacattggtccagacaccatgcgtgtcacctgggctccacccccatccattgatttaaccaacttcctggtgcgttactcacctgtgaaaaatgaggaagatgttgcagagttgtcaatttctccttcagacaatgcagtggtcttaacaaatctcctgcctggtacagaatatgtagtgagtgtctccagtgtctacgaacaacatgagagcacacctcttagaggaagacagaaaacaggtcttgattccccaactggcattgacttttctgatattactgccaactcttttactgtgcactggattgctcctcgagccaccatcactggctacaggatccgccatcatcccgagcacttcagtgggagacctcgagaagatcgggtgccccactctcggaattccatcaccctcaccaacctcactccaggcacagagtatgtggtcagcatcgttgctcttaatggcagagaggaaagtcccttattgattggccaacaatcaacagtttctgatgttccgagggacctggaagttgttgctgcgacccccaccagcctactgatcagctgggatgctcctgctgtcacagtgagatattacaggatcacttacggagaaacaggaggaaatagccctgtccaggagttcactgtgcctgggagcaagtctacagctaccatcagcggccttaaacctggagttgattataccatcactgtgtatgctgtcactggccgtggagacagccccgcaagcagcaagccaatttccattaattaccgaacagaaattgacaaaccatcccagatgcaagtgaccgatgttcaggacaacagcattagtgtcaagtggctgccttcaagttcccctgttactggttacagagtaaccaccactcccaaaaatggaccaggaccaacaaaaactaaaactgcaggtccagatcaaacagaaatgactattgaaggcttgcagcccacagtggagtatgtggttagtgtctatgctcagaatccaagcggagagagtcagcctctggttcagactgcagtaaccaacattgatcgccctaaaggactggcattcactgatgtggatgtcgattccatcaaaattgcttgggaaagcccacaggggcaagtttccaggtacagggtgacctactcgagccctgaggatggaatccatgagctattccctgcacctgatggtgaagaagacactgcagagctgcaaggcctcagaccgggttctgagtacacagtcagtgtggttgccttgcacgatgatatggagagccagcccctgattggaacccagtccacagctattcctgcaccaactgacctgaagttcactcaggtcacacccacaagcctgagcgcccagtggacaccacccaatgttcagctcactggatatcgagtgcgggtgacccccaaggagaagaccggaccaatgaaagaaatcaaccttgctcctgacagctcatccgtggttgtatcaggacttatggtggccaccaaatatgaagtgagtgtctatgctcttaaggacactttgacaagcagaccagctcagggtgttgtcaccactctggagaatgtcagcccaccaagaagggctcgtgtgacagatgctactgagaccaccatcaccattagctggagaaccaagactgagacgatcactggcttccaagttgatgccgttccagccaatggccagactccaatccagagaaccatcaagccagatgtcagaagctacaccatcacaggtttacaaccaggcactgactacaagatctacctgtacaccttgaatgacaatgctcggagctcccctgtggtcatcgacgcctccactgccattgatgcaccatccaacctgcgtttcctggccaccacacccaattccttgctggtatcatggcagccgccacgtgccaggattaccggctacatcatcaagtatgagaagcctgggtctcctcccagagaagtggtccctcggccccgccctggtgtcacagaggctactattactggcctggaaccgggaaccgaatatacaatttatgtcattgccctgaagaataatcagaagagcgagcccctgattggaaggaaaaagacaggacaagaagctctctctcagacaaccatctcatgggccccattccaggacacttctgagtacatcatttcatgtcatcctgttggcactgatgaagaacccttacagttcagggttcctggaacttctaccagtgccactctgacaggcctcaccagaggtgccacctacaacatcatagtggaggcactgaaagaccagcagaggcataaggttcgggaagaggttgttaccgtgggcaactctggatggtgccatgacaatggtgtgaactacaagattggagagaagtgggaccgtcagggagaaaatggccagatgatgagctgcacatgtcttgggaacggaaaaggagaattcaagtgtgaccctcatgaggcaacgtgttacgatgatgggaagacataccacgtaggagaacagtggcagaaggaatatctcggtgccatttgctcctgcacatgctttggaggccagcggggctggcgctgtgacaactgccgcagacctgggggtgaacccagtcccgaaggcactactggccagtcctacaaccagtattctcagagataccatcagagaacaaacactaatgttaattgcccaattgagtgcttcatgcctttagatgtacaggctgacagagaagattcccgagagtaaatcatctttccaatccagaggaacaagcatgtctctctgccaagatccatctaaactggagtgatgttagcagacccagcttagagttcttctttctttcttaagccctttgctctggaggaagttctccagcttcagctcaactcacagcttctccaagcatcaccctgggagtttcctgagggttttctcataaatgagggctgcacattgcctgttctgcttcgaagtattcaataccgctcagtattttaaatgaagtgattctaagatttggtttgggatcaataggaaagcatatgcagccaaccaagatgcaaatgttttgaaatgattgtctggcccgcaatactgtaggaacaagcatgatcttgttactgtgatattttaaatatccacagtactcactttttccaaatgatcctagtaattgcctagaaatatctttctcttacctgttatttatcaatttttcccagtatttttatacggaaaaaattgtattgaaaacacttagtatgcagttgataagaggaatttggtataattatggtgggtgattattttttatactgtatgtgccaaagctttactactgtggaaagacaactgttttaataaaagatttacattccacaacttgaagttcatctatttgatataagacaccttcgggggaaataattcctgtgaatattctttttcaattcagcaaacatttgaaaatctatgatgtgcaagtctaattgttgatttcagtacaagattttctaaatcagttgctacaaaaactgattggtttttgtcacttcatctcttcactaatggagatagcttt

SEQ ID NO: 1486 - DNA, 2402 bp, Homo sapiens
gcccgcgccggctgtgctgcacagggggaggagagggaaccccaggcgcgagcgggaagaggggacctgcagccacaacttctctggtcctctgcatcccttctgtccctccacccgtccccttccccaccctctggcccccaccttcttggaggcgacaacccccgggaggcattagaagggatttttcccgcaggttgcgaagggaagcaaacttggtggcaacttgcctcccggtgcgggcgtctctcccccaccgtctcaacatgcttaggggtccggggcccgggctgctgctgctggccgtccagtgcctggggacagcggtgccctccacgggagcctcgaagagcaagaggcaggctcagcaaatggttcagccccagtccccggtggctgtcagtcaaagcaagcccggttgttatgacaatggaaaacactatcagataaatcaacagtgggagcggacctacctaggcaatgcgttggtttgtacttgttatggaggaagccgaggttttaactgcgagagtaaacctgaagctgaagagacttgctttgacaagtacactgggaacacttaccgagtgggtgacacttatgagcgtcctaaagactccatgatctgggactgtacctgcatcggggctgggcgagggagaataagctgtaccatcgcaaaccgctgccatgaagggggtcagtcctacaagattggtgacacctggaggagaccacatgagactggtggttacatgttagagtgtgtgtgtcttggtaatggaaaaggagaatggacctgcaagcccatagctgagaagtgttttgatcatgctgctgggacttcctatgtggtcggagaaacgtgggagaagccctaccaaggctggatgatggtagattgtacttgcctgggagaaggcagcggacgcatcacttgcacttctagaaatagatgcaacgatcaggacacaaggacatcctatagaattggagacacctggagcaagaaggataatcgaggaaacctgctccagtgcatctgcacaggcaacggccgaggagagtggaagtgtgagaggcacacctctgtgcagaccacatcgagcggatctggccccttcaccgatgttcgtgcagctgtttaccaaccgcagcctcacccccagcctcctccctatggccactgtgtcacagacagtggtgtggtctactctgtggggatgcagtggctgaagacacaaggaaataagcaaatgctttgcacgtgcctgggcaacggagtcagctgccaagagacagctgtaacccagacttacggtggcaactcaaatggagagccatgtgtcttaccattcacctacaatggcaggacgttctactcctgcaccacagaagggcgacaggacggacatctttggtgcagcacaacttcgaattatgagcaggaccagaaatactctttctgcacagaccacactgttttggttcagactcgaggaggaaattccaatggtgccttgtgccacttccccttcctatacaacaaccacaattacactgattgcacttctgagggcagaagagacaacatgaagtggtgtgggaccacacagaactatgatgccgaccagaagtttgggttctgccccatggctgcccacgaggaaatctgcacaaccaatgaaggggtcatgtaccgcattggagatcagtgggataagcagcatgacatgggtcacatgatgaggtgcacgtgtgttgggaatggtcgtggggaatggacatgcattgcctactcgcagcttcgagatcagtgcattgttgatgacatcacttacaatgtgaacgacacattccacaagcgtcatgaagaggggcacatgctgaactgtacatgcttcggtcagggtcggggcaggtggaagtgtgatcccgtcgaccaatgccaggattcagagactgggacgttttatcaaattggagattcatgggagaagtatgtgcatggtgtcagataccagtgctactgctatggccgtggcattggggagtggcattgccaacctttacagacctatccaagctcaagtggtcctgtcgaagtatttatcactgagactccgagtcagcccaactcccaccccatccagtggaatgcaccacagccatctcacatttccaagtacattctcaggtggagacctgtgagtatcccacccagaaaccttggatactgagtctcctaatcttatcaattctgatggtttctttttttcccagcttttgagccaacaactctgattaactattcctatagcatttactatatttgtttagtgaacaaacaatatgtggtcaattaaattgacttgtagactgaaaaaaaaaaaaaaaaaaaa

SEQ ID NO: 1487 - DNA, 7823 bp, Homo sapiens; identical to SEQ ID NO: 1480

SEQ ID NO: 1488 - DNA, 8155 bp, Homo sapiens
ggcggggcggggacagcccggcgggtctctcctcccccgcgccccgggcctccagaggggcgggaggggaccgtcccatataagccccggctcccggcgctcggacgcccgcgccggctgtgctgcacagggggaggagagggaaccccaggcgcgagcgggaagaggggacctgcagccacaacttctctggtcctctgcatcccttctgtccctccacccgtccccttccccaccctctggcccccaccttcttggaggcgacaacccccgggaggcattagaagggatttttcccgcaggttgcgaagggaagcaaacttggtggcaacttgcctcccggtgcgggcgtctctcccccaccgtctcaacatgcttaggggtccggggcccgggctgctgctgctggccgtcctgtgcctggggacagcggtgccctccacgggagcctcgaagagcaagaggcaggctcagcaaatggttcagccccagtccccggtggctgtcagtcaaagcaagcccggttgttatgacaatggaaaacactatcagataaatcaacagtgggagcggacctacctaggcaatgcgttggtttgtacttgttatggaggaagccgaggttttaactgcgagagtaaacctgaagctgaagagacttgctttgacaagtacactgggaacacttaccgagtgggtgacacttatgagcgtcctaaagactccatgatctgggactgtacctgcatcggggctgggcgagggagaataagctgtaccatcgcaaaccgctgccatgaagggggtcagtcctacaagattggtgacacctggaggagaccacatgagactggtggttacatgttagagtgtgtgtgtcttggtaatggaaaaggagaatggacctgcaagcccatagctgagaagtgttttgatcatgctgctgggacttcctatgtggtcggagaaacgtgggagaagccctaccaaggctggatgatggtagattgtacttgcctgggagaaggcagcggacgcatcacttgcacttctagaaatagatgcaacgatcaggacacaaggacatcctatagaattggagacacctggagcaagaaggataatcgaggaaacctgctccagtgcatctgcacaggcaacggccgaggagagtggaagtgtgagaggcacacctctgtgcagaccacatcgagcggatctggccccttcaccgatgttcgtgcagctgtttaccaaccgcagcctcacccccagcctcctccctatggccactgtgtcacagacagtggtgtggtctactctgtggggatgcagtggctgaagacacaaggaaataagcaaatgctttgcacgtgcctgggcaacggagtcagctgccaagagacagctgtaacccagacttacggtggcaactcaaatggagagccatgtgtcttaccattcacctacaatggcaggacgttctactcctgcaccacagaagggcgacaggacggacatctttggtgcagcacaacttcgaattatgagcaggaccagaaatactctttctgcacagaccacactgttttggttcagactcgaggaggaaattccaatggtgccttgtgccacttccccttcctatacaacaaccacaattacactgattgcacttctgagggcagaagagacaacatgaagtggtgtgggaccacacagaactatgatgccgaccagaagtttgggttctgccccatggctgcccacgaggaaatctgcacaaccaatgaaggggtcatgtaccgcattggagatcagtgggataagcagcatgacatgggtcacatgatgaggtgcacgtgtgttgggaatggtcgtggggaatggacatgcattgcctactcgcagcttcgagatcagtgcattgttgatgacatcacttacaatgtgaacgacacattccacaagcgtcatgaagaggggcacatgctgaactgtacatgcttcggtcagggtcggggcaggtggaagtgtgatcccgtcgaccaatgccaggattcagagactgggacgttttatcaaattggagattcatgggagaagtatgtgcatggtgtcagataccagtgctactgctatggccgtggcattggggagtggcattgccaacctttacagacctatccaagctcaagtggtcctgtcgaagtatttatcactgagactccgagtcagcccaactcccaccccatccagtggaatgcaccacagccatctcacatttccaagtacattctcaggtggagacctaaaaattctgtaggccgttggaaggaagctaccataccaggccacttaaactcctacaccatcaaaggcctgaagcctggtgtggtatacgagggccagctcatcagcatccagcagtacggccaccaagaagtgactcgctttgacttcaccaccaccagcaccagcacacctgtgaccagcaacaccgtgacaggagagacgactcccttttctcctcttgtggccacttctgaatctgtgaccgaaatcacagccagtagctttgtggtctcctgggtctcagcttccgacaccgtgtcgggattccgggtggaatatgagctgagtgaggagggagatgagccacagtacctggatcttccaagcacagccacttctgtgaacatccctgacctgcttcctggccgaaaatacattgtaaatgtctatcagatatctgaggatggggagcagagtttgatcctgtctacttcacaaacaacagcgcctgatgccccacctgacccgactgtggaccaagttgatgacacctcaattgttgttcgctggagcagaccccaggctcccatcacagggtacagaatagtctattcgccatcagtagaaggtagcagcacagaactcaaccttcctgaaactgcaaactccgtcaccctcagtgacttgcaacctggtgttcagtataacatcactatctatgctgtggaagaaaatcaagaaagtacacctgttgtcattcaacaagaaaccactggcaccccacgctcagatacagtgccctctcccagggacctgcagtttgtggaagtgacagacgtgaaggtcaccatcatgtggacaccgcctgagagtgcagtgaccggctaccgtgtggatgtgatccccgtcaacctgcctggcgagcacgggcagaggctgcccatcagcaggaacacctttgcagaagtcaccgggctgtcccctggggtcacctattacttcaaagtctttgcagtgagccatgggagggagagcaagcctctgactgctcaacagacaaccaaactggatgctcccactaacctccagtttgtcaatgaaactgattctactgtcctggtgagatggactccacctcgggcccagataacaggataccgactgaccgtgggccttacccgaagaggacagcccaggcagtacaatgtgggtccctctgtctccaagtacccactgaggaatctgcagcctgcatctgagtacaccgtatccctcgtggccataaagggcaaccaagagagccccaaagccactggagtctttaccacactgcagcctgggagctctattccaccttacaacaccgaggtgactgagaccaccattgtgatcacatggacgcctgctccaagaattggttttaagctgggtgtacgaccaagccagggaggagaggcaccacgagaagtgacttcagactcaggaagcatcgttgtgtccggcttgactccaggagtagaatacgtctacaccatccaagtcctgagagatggacaggaaagagatgcgccaattgtaaacaaagtggtgacaccattgtctccaccaacaaacttgcatctggaggcaaaccctgacactggagtgctcacagtctcctgggagaggagcaccaccccagacattactggttatagaattaccacaacccctacaaacggccagcagggaaattctttggaagaagtggtccatgctgatcagagctcctgcacttttgataacctgagtcccggcctggagtacaatgtcagtgtttacactgtcaaggatgacaaggaaagtgtccctatctctgataccatcatcccagctgttcctcctcccactgacctgcgattcaccaacattggtccagacaccatgcgtgtcacctgggctccacccccatccattgatttaaccaacttcctggtgcgttactcacctgtgaaaaatgaggaagatgttgcagagttgtcaatttctccttcagacaatgcagtggtcttaacaaatctcctgcctggtacagaatatgtagtgagtgtctccagtgtctacgaacaacatgagagcacacctcttagaggaagacagaaaacaggtcttgattccccaactggcattgacttttctgatattactgccaactcttttactgtgcactggattgctcctcgagccaccatcactggctacaggatccgccatcatcccgagcacttcagtgggagacctcgagaagatcgggtgccccactctcggaattccatcaccctcaccaacctcactccaggcacagagtatgtggtcagcatcgttgctcttaatggcagagaggaaagtcccttattgattggccaacaatcaacagtttctgatgttccgagggacctggaagttgttgctgcgacccccaccagcctactgatcagctgggatgctcctgctgtcacagtgagatattacaggatcacttacggagaaacaggaggaaatagccctgtccaggagttcactgtgcctgggagcaagtctacagctaccatcagcggccttaaacctggagttgattataccatcactgtgtatgctgtcactggccgtggagacagccccgcaagcagcaagccaatttccattaattaccgaacagaaattgacaaaccatcccagatgcaagtgaccgatgttcaggacaacagcattagtgtcaagtggctgccttcaagttcccctgttactggttacagagtaaccaccactcccaaaaatggaccaggaccaacaaaaactaaaactgcaggtccagatcaaacagaaatgactattgaaggcttgcagcccacagtggagtatgtggttagtgtctatgctcagaatccaagcggagagagtcagcctctggttcagactgcagtaaccactattcctgcaccaactgacctgaagttcactcaggtcacacccacaagcctgagcgcccagtggacaccacccaatgttcagctcactggatatcgagtgcgggtgacccccaaggagaagaccggaccaatgaaagaaatcaaccttgctcctgacagctcatccgtggttgtatcaggacttatggtggccaccaaatatgaagtgagtgtctatgctcttaaggacactttgacaagcagaccagctcagggtgttgtcaccactctggagaatgtcagcccaccaagaagggctcgtgtgacagatgctactgagaccaccatcaccattagctggagaaccaagactgagacgatcactggcttccaagttgatgccgttccagccaatggccagactccaatccagagaaccatcaagccagatgtcagaagctacaccatcacaggtttacaaccaggcactgactacaagatctacctgtacaccttgaatgacaatgctcggagctcccctgtggtcatcgacgcctccactgccattgatgcaccatccaacctgcgtttcctggccaccacacccaattccttgctggtatcatggcagccgccacgtgccaggattaccggctacatcatcaagtatgagaagcctgggtctcctcccagagaagtggtccctcggccccgccctggtgtcacagaggctactattactggcctggaaccgggaaccgaatatacaatttatgtcattgccctgaagaataatcagaagagcgagcccctgattggaaggaaaaagacagacgagcttccccaactggtaacccttccacaccccaatcttcatggaccagagatcttggatgttccttccacagttcaaaagacccctttcgtcacccaccctgggtatgacactggaaatggtattcagcttcctggcacttctggtcagcaacccagtgttgggcaacaaatgatctttgaggaacatggttttaggcggaccacaccgcccacaacggccacccccataaggcataggccaagaccatacccgccgaatgtaggtgaggaaatccaaattggtcacatccccagggaagatgtagactatcacctgtacccacacggtccgggactcaatccaaatgcctctacaggacaagaagctctctctcagacaaccatctcatgggccccattccaggacacttctgagtacatcatttcatgtcatcctgttggcactgatgaagaacccttacagttcagggttcctggaacttctaccagtgccactctgacaggcctcaccagaggtgccacctacaacatcatagtggaggcactgaaagaccagcagaggcataaggttcgggaagaggttgttaccgtgggcaactctgtcaacgaaggcttgaaccaacctacggatgactcgtgctttgacccctacacagtttcccattatgccgttggagatgagtgggaacgaatgtctgaatcaggctttaaactgttgtgccagtgcttaggctttggaagtggtcatttcagatgtgattcatctagatggtgccatgacaatggtgtgaactacaagattggagagaagtgggaccgtcagggagaaaatggccagatgatgagctgcacatgtcttgggaacggaaaaggagaattcaagtgtgaccctcatgaggcaacgtgttacgatgatgggaagacataccacgtaggagaacagtggcagaaggaatatctcggtgccatttgctcctgcacatgctttggaggccagcggggctggcgctgtgacaactgccgcagacctgggggtgaacccagtcccgaaggcactactggccagtcctacaaccagtattctcagagataccatcagagaacaaacactaatgttaattgcccaattgagtgcttcatgcctttagatgtacaggctgacagagaagattcccgagagtaaatcatctttccaatccagaggaacaagcatgtctctctgccaagatccatctaaactggagtgatgttagcagacccagcttagagttcttctttctttcttaagccctttgctctggaggaagttctccagcttcagctcaactcacagcttctccaagcatcaccctgggagtttcctgagggttttctcataaatgagggctgcacattgcctgttctgcttcgaagtattcaataccgctcagtattttaaatgaagtgattctaagatttggtttgggatcaataggaaagcatatgcagccaaccaagatgcaaatgttttgaaatgatatgaccaaaattttaagtaggaaagtcacccaaacacttctgctttcacttaagtgtctggcccgcaatactgtaggaacaagcatgatcttgttactgtgatattttaaatatccacagtactcactttttccaaatgatcctagtaattgcctagaaatatctttctcttacctgttatttatcaatttttcccagtatttttatacggaaaaaattgtattgaaaacacttagtatgcagttgataagaggaatttggtataattatggtgggtgattattttttatactgtatgtgccaaagctttactactgtggaaagacaactgttttaataaaagatttacattccacaacttgaagttcatctatttgatataagacaccttcgggggaaataattcctgtgaatattctttttcaattcagcaaacatttgaaaatctatgatgtgcaagtctaattgttgatttcagtacaagattttctaaatcagttgctacaaaaactgattggtttttgtcacttcatctcttcactaatggagatagcttt

SEQ ID NO: 1489 - DNA, 8272 bp, Homo sapiens
gcccgcgccggctgtgctgcacagggggaggagagggaaccccaggcgcgagcgggaagaggggacctgcagccacaacttctctggtcctctgcatcccttctgtccctccacccgtccccttccccaccctctggcccccaccttcttggaggcgacaacccccgggaggcattagaagggatttttcccgcaggttgcgaagggaagcaaacttggtggcaacttgcctcccggtgcgggcgtctctcccccaccgtctcaacatgcttaggggtccggggcccgggctgctgctgctggccgtccagtgcctggggacagcggtgccctccacgggagcctcgaagagcaagaggcaggctcagcaaatggttcagccccagtccccggtggctgtcagtcaaagcaagcccggttgttatgacaatggaaaacactatcagataaatcaacagtgggagcggacctacctaggcaatgcgttggtttgtacttgttatggaggaagccgaggttttaactgcgagagtaaacctgaagctgaagagacttgctttgacaagtacactgggaacacttaccgagtgggtgacacttatgagcgtcctaaagactccatgatctgggactgtacctgcatcggggctgggcgagggagaataagctgtaccatcgcaaaccgctgccatgaagggggtcagtcctacaagattggtgacacctggaggagaccacatgagactggtggttacatgttagagtgtgtgtgtcttggtaatggaaaaggagaatggacctgcaagcccatagctgagaagtgttttgatcatgctgctgggacttcctatgtggtcggagaaacgtgggagaagccctaccaaggctggatgatggtagattgtacttgcctgggagaaggcagcggacgcatcacttgcacttctagaaatagatgcaacgatcaggacacaaggacatcctatagaattggagacacctggagcaagaaggataatcgaggaaacctgctccagtgcatctgcacaggcaacggccgaggagagtggaagtgtgagaggcacacctctgtgcagaccacatcgagcggatctggccccttcaccgatgttcgtgcagctgtttaccaaccgcagcctcacccccagcctcctccctatggccactgtgtcacagacagtggtgtggtctactctgtggggatgcagtggctgaagacacaaggaaataagcaaatgctttgcacgtgcctgggcaacggagtcagctgccaagagacagctgtaacccagacttacggtggcaactcaaatggagagccatgtgtcttaccattcacctacaatggcaggacgttctactcctgcaccacagaagggcgacaggacggacatctttggtgcagcacaacttcgaattatgagcaggaccagaaatactctttctgcacagaccacactgttttggttcagactcgaggaggaaattccaatggtgccttgtgccacttccccttcctatacaacaaccacaattacactgattgcacttctgagggcagaagagacaacatgaagtggtgtgggaccacacagaactatgatgccgaccagaagtttgggttctgccccatggctgcccacgaggaaatctgcacaaccaatgaaggggtcatgtaccgcattggagatcagtgggataagcagcatgacatgggtcacatgatgaggtgcacgtgtgttgggaatggtcgtggggaatggacatgcattgcctactcgcagcttcgagatcagtgcattgttgatgacatcacttacaatgtgaacgacacattccacaagcgtcatgaagaggggcacatgctgaactgtacatgcttcggtcagggtcggggcaggtggaagtgtgatcccgtcgaccaatgccaggattcagagactgggacgttttatcaaattggagattcatgggagaagtatgtgcatggtgtcagataccagtgctactgctatggccgtggcattggggagtggcattgccaacctttacagacctatccaagctcaagtggtcctgtcgaagtatttatcactgagactccgagtcagcccaactcccaccccatccagtggaatgcaccacagccatctcacatttccaagtacattctcaggtggagacctaaaaattctgtaggccgttggaaggaagctaccataccaggccacttaaactcctacaccatcaaaggcctgaagcctggtgtggtatacgagggccagctcatcagcatccagcagtacggccaccaagaagtgactcgctttgacttcaccaccaccagcaccagcacacctgtgaccagcaacaccgtgacaggagagacgactcccttttctcctcttgtggccacttctgaatctgtgaccgaaatcacagccagtagctttgtggtctcctgggtctcagcttccgacaccgtgtcgggattccgggtggaatatgagctgagtgaggagggagatgagccacagtacctggatcttccaagcacagccacttctgtgaacatccctgacctgcttcctggccgaaaatacattgtaaatgtctatcagatatctgaggatggggagcagagtttgatcctgtctacttcacaaacaacagcgcctgatgcccctcctgacccgactgtggaccaagttgatgacacctcaattgttgttcgctggagcagaccccaggctcccatcacagggtacagaatagtctattcgccatcagtagaaggtagcagcacagaactcaaccttcctgaaactgcaaactccgtcaccctcagtgacttgcaacctggtgttcagtataacatcactatctatgctgtggaagaaaatcaagaaagtacacctgttgtcattcaacaagaaaccactggcaccccacgctcagatacagtgccctctcccagggacctgcagtttgtggaagtgacagacgtgaaggtcaccatcatgtggacaccgcctgagagtgcagtgaccggctaccgtgtggatgtgatccccgtcaacctgcctggcgagcacgggcagaggctgcccatcagcaggaacacctttgcagaagtcaccgggctgtcccctggggtcacctattacttcaaagtctttgcagtgagccatgggagggagagcaagcctctgactgctcaacagacaaccaaactggatgctcccactaacctccagtttgtcaatgaaactgattctactgtcctggtgagatggactccacctcgggcccagataacaggataccgactgaccgtgggccttacccgaagaggacagcccaggcagtacaatgtgggtccctctgtctccaagtacccactgaggaatctgcagcctgcatctgagtacaccgtatccctcgtggccataaagggcaaccaagagagccccaaagccactggagtctttaccacactgcagcctgggagctctattccaccttacaacaccgaggtgactgagaccaccattgtgatcacatggacgcctgctccaagaattggttttaagctgggtgtacgaccaagccagggaggagaggcaccacgagaagtgacttcagactcaggaagcatcgttgtgtccggcttgactccaggagtagaatacgtctacaccatccaagtcctgagagatggacaggaaagagatgcgccaattgtaaacaaagtggtgacaccattgtctccaccaacaaacttgcatctggaggcaaaccctgacactggagtgctcacagtctcctgggagaggagcaccaccccagacattactggttatagaattaccacaacccctacaaacggccagcagggaaattctttggaagaagtggtccatgctgatcagagctcctgcacttttgataacctgagtcccggcctggagtacaatgtcagtgtttacactgtcaaggatgacaaggaaagtgtccctatctctgataccatcatcccagctgttcctcctcccactgacctgcgattcaccaacattggtccagacaccatgcgtgtcacctgggctccacccccatccattgatttaaccaacttcctggtgcgttactcacctgtgaaaaatgaggaagatgttgcagagttgtcaatttctccttcagacaatgcagtggtcttaacaaatctcctgcctggtacagaatatgtagtgagtgtctccagtgtctacgaacaacatgagagcacacctcttagaggaagacagaaaacaggtcttgattccccaactggcattgacttttctgatattactgccaactcttttactgtgcactggattgctcctcgagccaccatcactggctacaggatccgccatcatcccgagcacttcagtgggagacctcgagaagatcgggtgccccactctcggaattccatcaccctcaccaacctcactccaggcacagagtatgtggtcagcatcgttgctcttaatggcagagaggaaagtcccttattgattggccaacaatcaacagtttctgatgttccgagggacctggaagttgttgctgcgacccccaccagcctactgatcagctgggatgctcctgctgtcacagtgagatattacaggatcacttacggagagacaggaggaaatagccctgtccaggagttcactgtgcctgggagcaagtctacagctaccatcagcggccttaaacctggagttgattataccatcactgtgtatgctgtcactggccgtggagacagccccgcaagcagcaagccaatttccattaattaccgaacagaaattgacaaaccatcccagatgcaagtgaccgatgttcaggacaacagcattagtgtcaagtggctgccttcaagttcccctgttactggttacagagtaaccaccactcccaaaaatggaccaggaccaacaaaaactaaaactgcaggtccagatcaaacagaaatgactattgaaggcttgcagcccacagtggagtatgtggttagtgtctatgctcagaatccaagcggagagagtcagcctctggttcagactgcagtaaccactattcctgcaccaactgacctgaagttcactcaggtcacacccacaagcctgagcgcccagtggacaccacccaatgttcagctcactggatatcgagtgcgggtgacccccaaggagaagaccggaccaatgaaagaaatcaaccttgctcctgacagctcatccgtggttgtatcaggacttatggtggccaccaaatatgaagtgagtgtctatgctcttaaggacactttgacaagcagaccagctcagggagttgtcaccactctggagaatgtcagcccaccaagaagggctcgtgtgacagatgctactgagaccaccatcaccattagctggagaaccaagactgagacgatcactggcttccaagttgatgccgttccagccaatggccagactccaatccagagaaccatcaagccagatgtcagaagctacaccatcacaggtttacaaccaggcactgactacaagatctacctgtacaccttgaatgacaatgctcggagctcccctgtggtcatcgacgcctccactgccattgatgcaccatccaacctgcgtttcctggccaccacacccaattccttgctggtatcatggcagccgccacgtgccaggattaccggctacatcatcaagtatgagaagcctgggtctcctcccagagaagtggtccctcggccccgccctggtgtcacagaggctactattactggcctggaaccgggaaccgaatatacaatttatgtcattgccctgaagaataatcagaagagcgagcccctgattggaaggaaaaagacagacgagcttccccaactggtaacccttccacaccccaatcttcatggaccagagatcttggatgttccttccacagttcaaaagacccctttcgtcacccaccctgggtatgacactggaaatggtattcagcttcctggcacttctggtcagcaacccagtgttgggcaacaaatgatctttgaggaacatggttttaggcggaccacaccgcccacaacggccacccccataaggcataggccaagaccatacccgccgaatgtaggtgaggaaatccaaattggtcacatccccagggaagatgtagactatcacctgtacccacacggtccgggactcaatccaaatgcctctacaggacaagaagctctctctcagacaaccatctcatgggccccattccaggacacttctgagtacatcatttcatgtcatcctgttggcactgatgaagaacccttacagttcagggttcctggaacttctaccagtgccactctgacaggcctcaccagaggtgccacctacaacatcatagtggaggcactgaaagaccagcagaggcataaggttcgggaagaggttgttaccgtgggcaactctgtcaacgaaggcttgaaccaacctacggatgactcgtgctttgacccctacacagtttcccattatgccgttggagatgagtgggaacgaatgtctgaatcaggctttaaactgttgtgccagtgcttaggctttggaagtggtcatttcagatgtgattcatctagatggtgccatgacaatggtgtgaactacaagattggagagaagtgggaccgtcagggagaaaatggccagatgatgagctgcacatgtcttgggaacggaaaaggagaattcaagtgtgaccctcatgaggcaacgtgttatgatgatgggaagacataccacgtaggagaacagtggcagaaggaatatctcggtgccatttgctcctgcacatgctttggaggccagcggggctggcgctgtgacaactgccgcagacctgggggtgaacccagtcccgaaggcactactggccagtcctacaaccagtattctcagagataccatcagagaacaaacactaatgttaattgcccaattgagtgcttcatgcctttagatgtacaggctgacagagaagattcccgagagtaaatcatctttccaatccagaggaacaagcatgtctctctgccaagatccatctaaactggagtgatgttagcagacccagcttagagttcttctttctttcttaagccctttgctctggaggaagttctccagcttcagctcaactcacagcttctccaagcatcaccctgggagtttcctgagggttttctcataaatgagggctgcacattgcctgttctgcttcgaagtattcaataccgctcagtattttaaatgaagtgattctaagatttggtttgggatcaataggaaagcatatgcagccaaccaagatgcaaatgttttgaaatgatatgaccaaaattttaagtaggaaagtcacccaaacacttctgctttcacttaagtgtctggcccgcaatactgtaggaacaagcatgatcttgttactgtgatattttaaatatccacagtactcactttttccaaatgatcctagtaattgcctagaaatatctttctcttacctgttatttatcaatttttcccagtatttttatacggaaaaaattgtattgaaaacacttagtatgcagttgataagaggaatttggtataattatggtgggtgattattttttatactgtatgtgccaaagctttactactgtggaaagacaactgttttaataaaagatttacattccacaacttgaagttcatctatttgatataagacaccttcgggggaaataattcctgtgaatattctttttcaattcagcaaacatttgaaaatctatgatgtgcaagtctaattgttgatttcagtacaagattttctaaatcagttgctacaaaaactgattggtttttgtcacttcatctcttcactaatggagatagctttacactttctgctttaatagatttaagtggaccccaatatttattaaaattgctagtttaccgttcagaagtataatagaaataatctttagttgctcttttctaaccattgtaattcttcccttcttccctccacctttccttcattgaataaacctctgttcaaagagattgcctgcaagggaaataaaaatgactaagatattaaaaaaaaaaaaaaaaaa

SEQ ID NO: 1490 - DNA, 8449 bp, Homo sapiens
gcccgcgccggctgtgctgcacagggggaggagagggaaccccaggcgcgagcgggaagaggggacctgcagccacaacttctctggtcctctgcatcccttctgtccctccacccgtccccttccccaccctctggcccccaccttcttggaggcgacaacccccgggaggcattagaagggatttttcccgcaggttgcgaagggaagcaaacttggtggcaacttgcctcccggtgcgggcgtctctcccccaccgtctcaacatgcttaggggtccggggcccgggctgctgctgctggccgtccagtgcctggggacagcggtgccctccacgggagcctcgaagagcaagaggcaggctcagcaaatggttcagccccagtccccggtggctgtcagtcaaagcaagcccggttgttatgacaatggaaaacactatcagataaatcaacagtgggagcggacctacctaggcaatgcgttggtttgtacttgttatggaggaagccgaggttttaactgcgagagtaaacctgaagctgaagagacttgctttgacaagtacactgggaacacttaccgagtgggtgacacttatgagcgtcctaaagactccatgatctgggactgtacctgcatcggggctgggcgagggagaataagctgtaccatcgcaaaccgctgccatgaagggggtcagtcctacaagattggtgacacctggaggagaccacatgagactggtggttacatgttagagtgtgtgtgtcttggtaatggaaaaggagaatggacctgcaagcccatagctgagaagtgttttgatcatgctgctgggacttcctatgtggtcggagaaacgtgggagaagccctaccaaggctggatgatggtagattgtacttgcctgggagaaggcagcggacgcatcacttgcacttctagaaatagatgcaacgatcaggacacaaggacatcctatagaattggagacacctggagcaagaaggataatcgaggaaacctgctccagtgcatctgcacaggcaacggccgaggagagtggaagtgtgagaggcacacctctgtgcagaccacatcgagcggatctggccccttcaccgatgttcgtgcagctgtttaccaaccgcagcctcacccccagcctcctccctatggccactgtgtcacagacagtggtgtggtctactctgtggggatgcagtggctgaagacacaaggaaataagcaaatgctttgcacgtgcctgggcaacggagtcagctgccaagagacagctgtaacccagacttacggtggcaactcaaatggagagccatgtgtcttaccattcacctacaatggcaggacgttctactcctgcaccacagaagggcgacaggacggacatctttggtgcagcacaacttcgaattatgagcaggaccagaaatactctttctgcacagaccacactgttttggttcagactcgaggaggaaattccaatggtgccttgtgccacttccccttcctatacaacaaccacaattacactgattgcacttctgagggcagaagagacaacatgaagtggtgtgggaccacacagaactatgatgccgaccagaagtttgggttctgccccatggctgcccacgaggaaatctgcacaaccaatgaaggggtcatgtaccgcattggagatcagtgggataagcagcatgacatgggtcacatgatgaggtgcacgtgtgttgggaatggtcgtggggaatggacatgcattgcctactcgcagcttcgagatcagtgcattgttgatgacatcacttacaatgtgaacgacacattccacaagcgtcatgaagaggggcacatgctgaactgtacatgcttcggtcagggtcggggcaggtggaagtgtgatcccgtcgaccaatgccaggattcagagactgggacgttttatcaaattggagattcatgggagaagtatgtgcatggtgtcagataccagtgctactgctatggccgtggcattggggagtggcattgccaacctttacagacctatccaagctcaagtggtcctgtcgaagtatttatcactgagactccgagtcagcccaactcccaccccatccagtggaatgcaccacagccatctcacatttccaagtacattctcaggtggagacctaaaaattctgtaggccgttggaaggaagctaccataccaggccacttaaactcctacaccatcaaaggcctgaagcctggtgtggtatacgagggccagctcatcagcatccagcagtacggccaccaagaagtgactcgctttgacttcaccaccaccagcaccagcacacctgtgaccagcaacaccgtgacaggagagacgactcccttttctcctcttgtggccacttctgaatctgtgaccgaaatcacagccagtagctttgtggtctcctgggtctcagcttccgacaccgtgtcgggattccgggtggaatatgagctgagtgaggagggagatgagccacagtacctggatcttccaagcacagccacttctgtgaacatccctgacctgcttcctggccgaaaatacattgtaaatgtctatcagatatctgaggatggggagcagagtttgatcctgtctacttcacaaacaacagcgcctgatgcccctcctgacccgactgtggaccaagttgatgacacctcaattgttgttcgctggagcagaccccaggctcccatcacagggtacagaatagtctattcgccatcagtagaaggtagcagcacagaactcaaccttcctgaaactgcaaactccgtcaccctcagtgacttgcaacctggtgttcagtataacatcactatctatgctgtggaagaaaatcaagaaagtacacctgttgtcattcaacaagaaaccactggcaccccacgctcagatacagtgccctctcccagggacctgcagtttgtggaagtgacagacgtgaaggtcaccatcatgtggacaccgcctgagagtgcagtgaccggctaccgtgtggatgtgatccccgtcaacctgcctggcgagcacgggcagaggctgcccatcagcaggaacacctttgcagaagtcaccgggctgtcccctggggtcacctattacttcaaagtctttgcagtgagccatgggagggagagcaagcctctgactgctcaacagacaaccaaactggatgctcccactaacctccagtttgtcaatgaaactgattctactgtcctggtgagatggactccacctcgggcccagataacaggataccgactgaccgtgggccttacccgaagaggacagcccaggcagtacaatgtgggtccctctgtctccaagtacccactgaggaatctgcagcctgcatctgagtacaccgtatccctcgtggccataaagggcaaccaagagagccccaaagccactggagtctttaccacactgcagcctgggagctctattccaccttacaacaccgaggtgactgagaccaccattgtgatcacatggacgcctgctccaagaattggttttaagctgggtgtacgaccaagccagggaggagaggcaccacgagaagtgacttcagactcaggaagcatcgttgtgtccggcttgactccaggagtagaatacgtctacaccatccaagtcctgagagatggacaggaaagagatgcgccaattgtaaacaaagtggtgacaccattgtctccaccaacaaacttgcatctggaggcaaaccctgacactggagtgctcacagtctcctgggagaggagcaccaccccagacattactggttatagaattaccacaacccctacaaacggccagcagggaaattctttggaagaagtggtccatgctgatcagagctcctgcacttttgataacctgagtcccggcctggagtacaatgtcagtgtttacactgtcaaggatgacaaggaaagtgtccctatctctgataccatcatcccagctgttcctcctcccactgacctgcgattcaccaacattggtccagacaccatgcgtgtcacctgggctccacccccatccattgatttaaccaacttcctggtgcgttactcacctgtgaaaaatgaggaagatgttgcagagttgtcaatttctccttcagacaatgcagtggtcttaacaaatctcctgcctggtacagaatatgtagtgagtgtctccagtgtctacgaacaacatgagagcacacctcttagaggaagacagaaaacaggtcttgattccccaactggcattgacttttctgatattactgccaactcttttactgtgcactggattgctcctcgagccaccatcactggctacaggatccgccatcatcccgagcacttcagtgggagacctcgagaagatcgggtgccccactctcggaattccatcaccctcaccaacctcactccaggcacagagtatgtggtcagcatcgttgctcttaatggcagagaggaaagtcccttattgattggccaacaatcaacagtttctgatgttccgagggacctggaagttgttgctgcgacccccaccagcctactgatcagctgggatgctcctgctgtcacagtgagatattacaggatcacttacggagagacaggaggaaatagccctgtccaggagttcactgtgcctgggagcaagtctacagctaccatcagcggccttaaacctggagttgattataccatcactgtgtatgctgtcactggccgtggagacagccccgcaagcagcaagccaatttccattaattaccgaacagaaattgacaaaccatcccagatgcaagtgaccgatgttcaggacaacagcattagtgtcaagtggctgccttcaagttcccctgttactggttacagagtaaccaccactcccaaaaatggaccaggaccaacaaaaactaaaactgcaggtccagatcaaacagaaatgactattgaaggcttgcagcccacagtggagtatgtggttagtgtctatgctcagaatccaagcggagagagtcagcctctggttcagactgcagtaaccaacattgatcgccctaaaggactggcattcactgatgtggatgtcgattccatcaaaattgcttgggaaagcccacaggggcaagtttccaggtacagggtgacctactcgagccctgaggatggaatccatgagctattccctgcacctgatggtgaagaagacactgcagagctgcaaggcctcagaccgggttctgagtacacagtcagtgtggttgccttgcacgatgatatggagagccagcccctgattggaacccagtccacagctattcctgcaccaactgacctgaagttcactcaggtcacacccacaagcctgagcgcccagtggacaccacccaatgttcagctcactggatatcgagtgcgggtgacccccaaggagaagaccggaccaatgaaagaaatcaaccttgctcctgacagctcatccgtggttgtatcaggacttatggtggccaccaaatatgaagtgagtgtctatgctcttaaggacactttgacaagcagaccagctcagggagttgtcaccactctggagaatgtcagcccaccaagaagggctcgtgtgacagatgctactgagaccaccatcaccattagctggagaaccaagactgagacgatcactggcttccaagttgatgccgttccagccaatggccagactccaatccagagaaccatcaagccagatgtcagaagctacaccatcacaggtttacaaccaggcactgactacaagatctacctgtacaccttgaatgacaatgctcggagctcccctgtggtcatcgacgcctccactgccattgatgcaccatccaacctgcgtttcctggccaccacacccaattccttgctggtatcatggcagccgccacgtgccaggattaccggctacatcatcaagtatgagaagcctgggtctcctcccagagaagtggtccctcggccccgccctggtgtcacagaggctactattactggcctggaaccgggaaccgaatatacaatttatgtcattgccctgaagaataatcagaagagcgagcccctgattggaaggaaaaagacagacgagcttccccaactggtaacccttccacaccccaatcttcatggaccagagatcttggatgttccttccacagttcaaaagacccctttcgtcacccaccctgggtatgacactggaaatggtattcagcttcctggcacttctggtcagcaacccagtgttgggcaacaaatgatctttgaggaacatggttttaggcggaccacaccgcccacaacggccacccccataaggcataggccaagaccatacccgccgaatgtaggacaagaagctctctctcagacaaccatctcatgggccccattccaggacacttctgagtacatcatttcatgtcatcctgttggcactgatgaagaacccttacagttcagggttcctggaacttctaccagtgccactctgacaggcctcaccagaggtgccacctacaacatcatagtggaggcactgaaagaccagcagaggcataaggttcgggaagaggttgttaccgtgggcaactctgtcaacgaaggcttgaaccaacctacggatgactcgtgctttgacccctacacagtttcccattatgccgttggagatgagtgggaacgaatgtctgaatcaggctttaaactgttgtgccagtgcttaggctttggaagtggtcatttcagatgtgattcatctagatggtgccatgacaatggtgtgaactacaagattggagagaagtgggaccgtcagggagaaaatggccagatgatgagctgcacatgtcttgggaacggaaaaggagaattcaagtgtgaccctcatgaggcaacgtgttatgatgatgggaagacataccacgtaggagaacagtggcagaaggaatatctcggtgccatttgctcctgcacatgctttggaggccagcggggctggcgctgtgacaactgccgcagacctgggggtgaacccagtcccgaaggcactactggccagtcctacaaccagtattctcagagataccatcagagaacaaacactaatgttaattgcccaattgagtgcttcatgcctttagatgtacaggctgacagagaagattcccgagagtaaatcatctttccaatccagaggaacaagcatgtctctctgccaagatccatctaaactggagtgatgttagcagacccagcttagagttcttctttctttcttaagccctttgctctggaggaagttctccagcttcagctcaactcacagcttctccaagcatcaccctgggagtttcctgagggttttctcataaatgagggctgcacattgcctgttctgcttcgaagtattcaataccgctcagtattttaaatgaagtgattctaagatttggtttgggatcaataggaaagcatatgcagccaaccaagatgcaaatgttttgaaatgatatgaccaaaattttaagtaggaaagtcacccaaacacttctgctttcacttaagtgtctggcccgcaatactgtaggaacaagcatgatcttgttactgtgatattttaaatatccacagtactcactttttccaaatgatcctagtaattgcctagaaatatctttctcttacctgttatttatcaatttttcccagtatttttatacggaaaaaattgtattgaaaacacttagtatgcagttgataagaggaatttggtataattatggtgggtgattattttttatactgtatgtgccaaagctttactactgtggaaagacaactgttttaataaaagatttacattccacaacttgaagttcatctatttgatataagacaccttcgggggaaataattcctgtgaatattctttttcaattcagcaaacatttgaaaatctatgatgtgcaagtctaattgttgatttcagtacaagattttctaaatcagttgctacaaaaactgattggtttttgtcacttcatctcttcactaatggagatagctttacactttctgctttaatagatttaagtggaccccaatatttattaaaattgctagtttaccgttcagaagtataatagaaataatctttagttgctcttttctaaccattgtaattcttcccttcttccctccacctttccttcattgaataaacctctgttcaaagagattgcctgcaagggaaataaaaatgactaagatattaaaaaaaaaaaaaaaaaa

SEQ ID NO: 1491 - DNA, 7935 bp, Homo sapiens
ggcggggcggggacagcccggcgggtctctcctcccccgcgccccgggcctccagaggggcgggaggggaccgtcccatataagccccggctcccggcgctcggacgcccgcgccggctgtgctgcacagggggaggagagggaaccccaggcgcgagcgggaagaggggacctgcagccacaacttctctggtcctctgcatcccttctgtccctccacccgtccccttccccaccctctggcccccaccttcttggaggcgacaacccccgggaggcattagaagggatttttcccgcaggttgcgaagggaagcaaacttggtggcaacttgcctcccggtgcgggcgtctctcccccaccgtctcaacatgcttaggggtccggggcccgggctgctgctgctggccgtcctgtgcctggggacagcggtgccctccacgggagcctcgaagagcaagaggcaggctcagcaaatggttcagccccagtccccggtggctgtcagtcaaagcaagcccggttgttatgacaatggaaaacactatcagataaatcaacagtgggagcggacctacctaggcaatgcgttggtttgtacttgttatggaggaagccgaggttttaactgcgagagtaaacctgaagctgaagagacttgctttgacaagtacactgggaacacttaccgagtgggtgacacttatgagcgtcctaaagactccatgatctgggactgtacctgcatcggggctgggcgagggagaataagctgtaccatcgcaaaccgctgccatgaagggggtcagtcctacaagattggtgacacctggaggagaccacatgagactggtggttacatgttagagtgtgtgtgtcttggtaatggaaaaggagaatggacctgcaagcccatagctgagaagtgttttgatcatgctgctgggacttcctatgtggtcggagaaacgtgggagaagccctaccaaggctggatgatggtagattgtacttgcctgggagaaggcagcggacgcatcacttgcacttctagaaatagatgcaacgatcaggacacaaggacatcctatagaattggagacacctggagcaagaaggataatcgaggaaacctgctccagtgcatctgcacaggcaacggccgaggagagtggaagtgtgagaggcacacctctgtgcagaccacatcgagcggatctggccccttcaccgatgttcgtgcagctgtttaccaaccgcagcctcacccccagcctcctccctatggccactgtgtcacagacagtggtgtggtctactctgtggggatgcagtggctgaagacacaaggaaataagcaaatgctttgcacgtgcctgggcaacggagtcagctgccaagagacagctgtaacccagacttacggtggcaactcaaatggagagccatgtgtcttaccattcacctacaatggcaggacgttctactcctgcaccacagaagggcgacaggacggacatctttggtgcagcacaacttcgaattatgagcaggaccagaaatactctttctgcacagaccacactgttttggttcagactcgaggaggaaattccaatggtgccttgtgccacttccccttcctatacaacaaccacaattacactgattgcacttctgagggcagaagagacaacatgaagtggtgtgggaccacacagaactatgatgccgaccagaagtttgggttctgccccatggctgcccacgaggaaatctgcacaaccaatgaaggggtcatgtaccgcattggagatcagtgggataagcagcatgacatgggtcacatgatgaggtgcacgtgtgttgggaatggtcgtggggaatggacatgcattgcctactcgcagcttcgagatcagtgcattgttgatgacatcacttacaatgtgaacgacacattccacaagcgtcatgaagaggggcacatgctgaactgtacatgcttcggtcagggtcggggcaggtggaagtgtgatcccgtcgaccaatgccaggattcagagactgggacgttttatcaaattggagattcatgggagaagtatgtgcatggtgtcagataccagtgctactgctatggccgtggcattggggagtggcattgccaacctttacagacctatccaagctcaagtggtcctgtcgaagtatttatcactgagactccgagtcagcccaactcccaccccatccagtggaatgcaccacagccatctcacatttccaagtacattctcaggtggagacctaaaaattctgtaggccgttggaaggaagctaccataccaggccacttaaactcctacaccatcaaaggcctgaagcctggtgtggtatacgagggccagctcatcagcatccagcagtacggccaccaagaagtgactcgctttgacttcaccaccaccagcaccagcacacctgtgaccagcaacaccgtgacaggagagacgactcccttttctcctcttgtggccacttctgaatctgtgaccgaaatcacagccagtagctttgtggtctcctgggtctcagcttccgacaccgtgtcgggattccgggtggaatatgagctgagtgaggagggagatgagccacagtacctggatcttccaagcacagccacttctgtgaacatccctgacctgcttcctggccgaaaatacattgtaaatgtctatcagatatctgaggatggggagcagagtttgatcctgtctacttcacaaacaacagcgcctgatgccccacctgacccgactgtggaccaagttgatgacacctcaattgttgttcgctggagcagaccccaggctcccatcacaggtcagctaaaatagtctattcgccatcagtagaaggtagcagcacagaactcaaccttcctgaaactgcaaactccgtcaccctcagtgacttgcaacctggtgttcagtataacatcactatctatgctgtggaagaaaatcaagaaagtacacctgttgtcattcaacaagaaaccactggcaccccacgctcagatacagtgccctctcccagggacctgcagtttgtggaagtgacagacgtgaaggtcaccatcatgtggacaccgcctgagagtgcagtgaccggctaccgtgtggatgtgatccccgtcaacctgcctggcgagcacgggcagaggctgcccatcagcaggaacacctttgcagaagtcaccgggctgtcccctggggtcacctattacttcaaagtctttgcagtgagccatgggagggagagcaagcctctgactgctcaacagacaaccaaactggatgctcccactaacctccagtttgtcaatgaaactgattctactgtcctggtgagatggactccacctcgggcccagataacaggataccgactgaccgtgggccttacccgaagaggacagcccaggcagtacaatgtgggtccctctgtctccaagtacccactgaggaatctgcagcctgcatctgagtacaccgtatccctcgtggccataaagggcaaccaagagagccccaaagccactggagtctttaccacactgcagcctgggagctctattccaccttacaacaccgaggtgactgagaccaccattgtgatcacatggacgcctgctccaagaattggttttaagctgggtgtacgaccaagccagggaggagaggcaccacgagaagtgacttcagactcaggaagcatcgttgtgtccggcttgactccaggagtagaatacgtctacaccatccaagtcctgagagatggacaggaaagagatgcgccaattgtaaacaaagtggtgacaccattgtctccaccaacaaacttgcatctggaggcaaaccctgacactggagtgctcacagtctcctgggagaggagcaccaccccagacattactggttatagaattaccacaacccctacaaacggccagcagggaaattctttggaagaagtggtccatgctgatcagagctcctgcacttttgataacctgagtcccggcctggagtacaatgtcagtgtttacactgtcaaggatgacaaggaaagtgtccctatctctgataccatcatcccagctgttcctcctcccactgacctgcgattcaccaacattggtccagacaccatgcgtgtcacctgggctccacccccatccattgatttaaccaacttcctggtgcgttactcacctgtgaaaaatgaggaagatgttgcagagttgtcaatttctccttcagacaatgcagtggtcttaacaaatctcctgcctggtacagaatatgtagtgagtgtctccagtgtctacgaacaacatgagagcacacctcttagaggaagacagaaaacaggtcttgattccccaactggcattgacttttctgatattactgccaactcttttactgtgcactggattgctcctcgagccaccatcactggctacaggatccgccatcatcccgagcacttcagtgggagacctcgagaagatcgggtgccccactctcggaattccatcaccctcaccaacctcactccaggcacagagtatgtggtcagcatcgttgctcttaatggcagagaggaaagtcccttattgattggccaacaatcaacagtttctgatgttccgagggacctggaagttgttgctgcgacccccaccagcctactgatcagctgggatgctcctgctgtcacagtgagatattacaggatcacttacggagaaacaggaggaaatagccctgtccaggagttcactgtgcctgggagcaagtctacagctaccatcagcggccttaaacctggagttgattataccatcactgtgtatgctgtcactggccgtggagacagccccgcaagcagcaagccaatttccattaattaccgaacagaaattgacaaaccatcccagatgcaagtgaccgatgttcaggacaacagcattagtgtcaagtggctgccttcaagttcccctgttactggttacagagtaaccaccactcccaaaaatggaccaggaccaacaaaaactaaaactgcaggtccagatcaaacagaaatgactattgaaggcttgcagcccacagtggagtatgtggttagtgtctatgctcagaatccaagcggagagagtcagcctctggttcagactgcagtaaccactattcctgcaccaactgacctgaagttcactcaggtcacacccacaagcctgagcgcccagtggacaccacccaatgttcagctcactggatatcgagtgcgggtgacccccaaggagaagaccggaccaatgaaagaaatcaaccttgctcctgacagctcatccgtggttgtatcaggacttatggtggccaccaaatatgaagtgagtgtctatgctcttaaggacactttgacaagcagaccagctcagggtgttgtcaccactctggagaatgtcagcccaccaagaagggctcgtgtgacagatgctactgagaccaccatcaccattagctggagaaccaagactgagacgatcactggcttccaagttgatgccgttccagccaatggccagactccaatccagagaaccatcaagccagatgtcagaagctacaccatcacaggtttacaaccaggcactgactacaagatctacctgtacaccttgaatgacaatgctcggagctcccctgtggtcatcgacgcctccactgccattgatgcaccatccaacctgcgtttcctggccaccacacccaattccttgctggtatcatggcagccgccacgtgccaggattaccggctacatcatcaagtatgagaagcctgggtctcctcccagagaagtggtccctcggccccgccctggtgtcacagaggctactattactggcctggaaccgggaaccgaatatacaatttatgtcattgccctgaagaataatcagaagagcgagcccctgattggaaggaaaaagacagttcaaaagacccctttcgtcacccaccctgggtatgacactggaaatggtattcagcttcctggcacttctggtcagcaacccagtgttgggcaacaaatgatctttgaggaacatggttttaggcggaccacaccgcccacaacggccacccccataaggcataggccaagaccatacccgccgaatgtaggacaagaagctctctctcagacaaccatctcatgggccccattccaggacacttctgagtacatcatttcatgtcatcctgttggcactgatgaagaacccttacagttcagggttcctggaacttctaccagtgccactctgacaggcctcaccagaggtgccacctacaacatcatagtggaggcactgaaagaccagcagaggcataaggttcgggaagaggttgttaccgtgggcaactctgtcaacgaaggcttgaaccaacctacggatgactcgtgctttgacccctacacagtttcccattatgccgttggagatgagtgggaacgaatgtctgaatcaggctttaaactgttgtgccagtgcttaggctttggaagtggtcatttcagatgtgattcatctagatggtgccatgacaatggtgtgaactacaagattggagagaagtgggaccgtcagggagaaaatggccagatgatgagctgcacatgtcttgggaacggaaaaggagaattcaagtgtgaccctcatgaggcaacgtgttacgatgatgggaagacataccacgtaggagaacagtggcagaaggaatatctcggtgccatttgctcctgcacatgctttggaggccagcggggctggcgctgtgacaactgccgcagacctgggggtgaacccagtcccgaaggcactactggccagtcctacaaccagtattctcagagataccatcagagaacaaacactaatgttaattgcccaattgagtgcttcatgcctttagatgtacaggctgacagagaagattcccgagagtaaatcatctttccaatccagaggaacaagcatgtctctctgccaagatccatctaaactggagtgatgttagcagacccagcttagagttcttctttctttcttaagccctttgctctggaggaagttctccagcttcagctcaactcacagcttctccaagcatcaccctgggagtttcctgagggttttctcataaatgagggctgcacattgcctgttctgcttcgaagtattcaataccgctcagtattttaaatgaagtgattctaagatttggtttgggatcaataggaaagcatatgcagccaaccaagatgcaaatgttttgaaatgattgtctggcccgcaatactgtaggaacaagcatgatcttgttactgtgatattttaaatatccacagtactcactttttccaaatgatcctagtaattgcctagaaatatctttctcttacctgttatttatcaatttttcccagtatttttatacggaaaaaattgtattgaaaacacttagtatgcagttgataagaggaatttggtataattatggtgggtgattattttttatactgtatgtgccaaagctttactactgtggaaagacaactgttttaataaaagatttacattccacaacttgaagttcatctatttgatataagacaccttcgggggaaataattcctgtgaatattctttttcaattcagcaaacatttgaaaatctatgatgtgcaagtctaattgttgatttcagtacaagattttctaaatcagttgctacaaaaactgattggtttttgtcacttcatctcttcactaatggagatagcttt

SEQ ID NO: 1492 - DNA, 8226 bp, Homo sapiens
ggcggggcggggacagcccggcgggtctctcctcccccgcgccccgggcctccagaggggcgggaggggaccgtcccatataagccccggctcccggcgctcggacgcccgcgccggctgtgctgcacagggggaggagagggaaccccaggcgcgagcgggaagaggggacctgcagccacaacttctctggtcctctgcatcccttctgtccctccacccgtccccttccccaccctctggcccccaccttcttggaggcgacaacccccgggaggcattagaagggatttttcccgcaggttgcgaagggaagcaaacttggtggcaacttgcctcccggtgcgggcgtctctcccccaccgtctcaacatgcttaggggtccggggcccgggctgctgctgctggccgtcctgtgcctggggacagcggtgccctccacgggagcctcgaagagcaagaggcaggctcagcaaatggttcagccccagtccccggtggctgtcagtcaaagcaagcccggttgttatgacaatggaaaacactatcagataaatcaacagtgggagcggacctacctaggcaatgcgttggtttgtacttgttatggaggaagccgaggttttaactgcgagagtaaacctgaagctgaagagacttgctttgacaagtacactgggaacacttaccgagtgggtgacacttatgagcgtcctaaagactccatgatctgggactgtacctgcatcggggctgggcgagggagaataagctgtaccatcgcaaaccgctgccatgaagggggtcagtcctacaagattggtgacacctggaggagaccacatgagactggtggttacatgttagagtgtgtgtgtcttggtaatggaaaaggagaatggacctgcaagcccatagctgagaagtgttttgatcatgctgctgggacttcctatgtggtcggagaaacgtgggagaagccctaccaaggctggatgatggtagattgtacttgcctgggagaaggcagcggacgcatcacttgcacttctagaaatagatgcaacgatcaggacacaaggacatcctatagaattggagacacctggagcaagaaggataatcgaggaaacctgctccagtgcatctgcacaggcaacggccgaggagagtggaagtgtgagaggcacacctctgtgcagaccacatcgagcggatctggccccttcaccgatgttcgtgcagctgtttaccaaccgcagcctcacccccagcctcctccctatggccactgtgtcacagacagtggtgtggtctactctgtggggatgcagtggctgaagacacaaggaaataagcaaatgctttgcacgtgcctgggcaacggagtcagctgccaagagacagctgtaacccagacttacggtggcaactcaaatggagagccatgtgtcttaccattcacctacaatggcaggacgttctactcctgcaccacagaagggcgacaggacggacatctttggtgcagcacaacttcgaattatgagcaggaccagaaatactctttctgcacagaccacactgttttggttcagactcgaggaggaaattccaatggtgccttgtgccacttccccttcctatacaacaaccacaattacactgattgcacttctgagggcagaagagacaacatgaagtggtgtgggaccacacagaactatgatgccgaccagaagtttgggttctgccccatggctgcccacgaggaaatctgcacaaccaatgaaggggtcatgtaccgcattggagatcagtgggataagcagcatgacatgggtcacatgatgaggtgcacgtgtgttgggaatggtcgtggggaatggacatgcattgcctactcgcagcttcgagatcagtgcattgttgatgacatcacttacaatgtgaacgacacattccacaagcgtcatgaagaggggcacatgctgaactgtacatgcttcggtcagggtcggggcaggtggaagtgtgatcccgtcgaccaatgccaggattcagagactgggacgttttatcaaattggagattcatgggagaagtatgtgcatggtgtcagataccagtgctactgctatggccgtggcattggggagtggcattgccaacctttacagacctatccaagctcaagtggtcctgtcgaagtatttatcactgagactccgagtcagcccaactcccaccccatccagtggaatgcaccacagccatctcacatttccaagtacattctcaggtggagacctaaaaattctgtaggccgttggaaggaagctaccataccaggccacttaaactcctacaccatcaaaggcctgaagcctggtgtggtatacgagggccagctcatcagcatccagcagtacggccaccaagaagtgactcgctttgacttcaccaccaccagcaccagcacacctgtgaccagtatgtacacaaccaccctcatgcctcctacccccgaggttcctagagctaggctctcctgaggcaatgctttccttctcaattcatattcttccaggaggggcaccaacgttttttaaaatgatgttggcgacgaggacggtaaattttctagatgactgaaggctgactttcccctttctgtgactctctaggcaacaccgtgacaggagagacgactcccttttctcctcttgtggccacttctgaatctgtgaccgaaatcacagccagtagctttgtggtctcctgggtctcagcttccgacaccgtgtcgggattccgggtggaatatgagctgagtgaggagggagatgagccacagtacctggatcttccaagcacagccacttctgtgaacatccctgacctgcttcctggccgaaaatacattgtaaatgtctatcagatatctgaggatggggagcagagtttgatcctgtctacttcacaaacaacagcgcctgatgccccacctgacccgactgtggaccaagttgatgacacctcaattgttgttcgctggagcagaccccaggctcccatcacagggtacagaatagtctattcgccatcagtagaaggtagcagcacagaactcaaccttcctgaaactgcaaactccgtcaccctcagtgacttgcaacctggtgttcagtataacatcactatctatgctgtggaagaaaatcaagaaagtacacctgttgtcattcaacaagaaaccactggcaccccacgctcagatacagtgccctctcccagggacctgcagtttgtggaagtgacagacgtgaaggtcaccatcatgtggacaccgcctgagagtgcagtgaccggctaccgtgtggatgtgatccccgtcaacctgcctggcgagcacgggcagaggctgcccatcagcaggaacacctttgcagaagtcaccgggctgtcccctggggtcacctattacttcaaagtctttgcagtgagccatgggagggagagcaagcctctgactgctcaacagacaaccaaactggatgctcccactaacctccagtttgtcaatgaaactgattctactgtcctggtgagatggactccacctcgggcccagataacaggataccgactgaccgtgggccttacccgaagaggacagcccaggcagtacaatgtgggtccctctgtctccaagtacccactgaggaatctgcagcctgcatctgagtacaccgtatccctcgtggccataaagggcaaccaagagagccccaaagccactggagtctttaccacactgcagcctgggagctctattccaccttacaacaccgaggtgactgagaccaccattgtgatcacatggacgcctgctccaagaattggttttaagctgggtgtacgaccaagccagggaggagaggcaccacgagaagtgacttcagactcaggaagcatcgttgtgtccggcttgactccaggagtagaatacgtctacaccatccaagtcctgagagatggacaggaaagagatgcgccaattgtaaacaaagtggtgacaccattgtctccaccaacaaacttgcatctggaggcaaaccctgacactggagtgctcacagtctcctgggagaggagcaccaccccagacattactggttatagaattaccacaacccctacaaacggccagcagggaaattctttggaagaagtggtccatgctgatcagagctcctgcacttttgataacctgagtcccggcctggagtacaatgtcagtgtttacactgtcaaggatgacaaggaaagtgtccctatctctgataccatcatcccagctgttcctcctcccactgacctgcgattcaccaacattggtccagacaccatgcgtgtcacctgggctccacccccatccattgatttaaccaacttcctggtgcgttactcacctgtgaaaaatgaggaagatgttgcagagttgtcaatttctccttcagacaatgcagtggtcttaacaaatctcctgcctggtacagaatatgtagtgagtgtctccagtgtctacgaacaacatgagagcacacctcttagaggaagacagaaaacaggtcttgattccccaactggcattgacttttctgatattactgccaactcttttactgtgcactggattgctcctcgagccaccatcactggctacaggatccgccatcatcccgagcacttcagtgggagacctcgagaagatcgggtgccccactctcggaattccatcaccctcaccaacctcactccaggcacagagtatgtggtcagcatcgttgctcttaatggcagagaggaaagtcccttattgattggccaacaatcaacagtttctgatgttccgagggacctggaagttgttgctgcgacccccaccagcctactgatcagctgggatgctcctgctgtcacagtgagatattacaggatcacttacggagaaacaggaggaaatagccctgtccaggagttcactgtgcctgggagcaagtctacagctaccatcagcggccttaaacctggagttgattataccatcactgtgtatgctgtcactggccgtggagacagccccgcaagcagcaagccaatttccattaattaccgaacagaaattgacaaaccatcccagatgcaagtgaccgatgttcaggacaacagcattagtgtcaagtggctgccttcaagttcccctgttactggttacagagtaaccaccactcccaaaaatggaccaggaccaacaaaaactaaaactgcaggtccagatcaaacagaaatgactattgaaggcttgcagcccacagtggagtatgtggttagtgtctatgatggaatccatgagctattccctgcacctgatggtgaagaagacactgcagagctgcaaggcctcagaccgggttctgagtacacagtcagtgtggttgccttgcacgatgatatggagagccagcccctgattggaacccagtccacagctattcctgcaccaactgacctgaagttcactcaggtcacacccacaagcctgagcgcccagtggacaccacccaatgttcagctcactggatatcgagtgcgggtgacccccaaggagaagaccggaccaatgaaagaaatcaaccttgctcctgacagctcatccgtggttgtatcaggacttatggtggccaccaaatatgaagtgagtgtctatgctcttaaggacactttgacaagcagaccagctcagggtgttgtcaccactctggagaatgtcagcccaccaagaagggctcgtgtgacagatgctactgagaccaccatcaccattagctggagaaccaagactgagacgatcactggcttccaagttgatgccgttccagccaatggccagactccaatccagagaaccatcaagccagatgtcagaagctacaccatcacaggtttacaaccaggcactgactacaagatctacctgtacaccttgaatgacaatgctcggagctcccctgtggtcatcgacgcctccactgccattgatgcaccatccaacctgcgtttcctggccaccacacccaattccttgctggtatcatggcagccgccacgtgccaggattaccggctacatcatcaagtatgagaagcctgggtctcctcccagagaagtggtccctcggccccgccctggtgtcacagaggctactattactggcctggaaccgggaaccgaatatacaatttatgtcattgccctgaagaataatcagaagagcgagcccctgattggaaggaaaaagacagttcaaaagacccctttcgtcacccaccctgggtatgacactggaaatggtattcagcttcctggcacttctggtcagcaacccagtgttgggcaacaaatgatctttgaggaacatggttttaggcggaccacaccgcccacaacggccacccccataaggcataggccaagaccatacccgccgaatgtaggacaagaagctctctctcagacaaccatctcatgggccccattccaggacacttctgagtacatcatttcatgtcatcctgttggcactgatgaagaacccttacagttcagggttcctggaacttctaccagtgccactctgacaggcctcaccagaggtgccacctacaacatcatagtggaggcactgaaagaccagcagaggcataaggttcgggaagaggttgttaccgtgggcaactctgtcaacgaaggcttgaaccaacctacggatgactcgtgctttgacccctacacagtttcccattatgccgttggagatgagtgggaacgaatgtctgaatcaggctttaaactgttgtgccagtgcttaggctttggaagtggtcatttcagatgtgattcatctagatggtgccatgacaatggtgtgaactacaagattggagagaagtgggaccgtcagggagaaaatggccagatgatgagctgcacatgtcttgggaacggaaaaggagaattcaagtgtgaccctcatgaggcaacgtgttacgatgatgggaagacataccacgtaggagaacagtggcagaaggaatatctcggtgccatttgctcctgcacatgctttggaggccagcggggctggcgctgtgacaactgccgcagacctgggggtgaacccagtcccgaaggcactactggccagtcctacaaccagtattctcagagataccatcagagaacaaacactaatgttaattgcccaattgagtgcttcatgcctttagatgtacaggctgacagagaagattcccgagagtaaatcatctttccaatccagaggaacaagcatgtctctctgccaagatccatctaaactggagtgatgttagcagacccagcttagagttcttctttctttcttaagccctttgctctggaggaagttctccagcttcagctcaactcacagcttctccaagcatcaccctgggagtttcctgagggttttctcataaatgagggctgcacattgcctgttctgcttcgaagtattcaataccgctcagtattttaaatgaagtgattctaagatttggtttgggatcaataggaaagcatatgcagccaaccaagatgcaaatgttttgaaatgattgtctggcccgcaatactgtaggaacaagcatgatcttgttactgtgatattttaaatatccacagtactcactttttccaaatgatcctagtaattgcctagaaatatctttctcttacctgttatttatcaatttttcccagtatttttatacggaaaaaattgtattgaaaacacttagtatgcagttgataagaggaatttggtataattatggtgggtgattattttttatactgtatgtgccaaagctttactactgtggaaagacaactgttttaataaaagatttacattccacaacttgaagttcatctatttgatataagacaccttcgggggaaataattcctgtgaatattctttttcaattcagcaaacatttgaaaatctatgatgtgcaagtctaattgttgatttcagtacaagattttctaaatcagttgctacaaaaactgattggtttttgtcacttcatctcttcactaatggagatagcttt

SEQ ID NO: 1493 - DNA, 8278 bp, Homo sapiens; identical to SEQ ID NO: 1482

SEQ ID NO: 1494 - DNA, 6883 bp, Homo sapiens
gcgctttggccagagtggtttgatggttttgtgttagtcttcctgcagctgagcttccacaagacactttttccctttcagccacccaatatctcgcgagacttgctattctgcgccccctcccaccttgcgcttgcgcagatcttcaaagcagaaggtcgcgcttggaggaagtggcggctttgagtccggtggcccaatcgctgttactacttctctgaagctcctctcggctgcttgccgagacaccctgccgccaagatgcctcgaattatgatcaaggggggcgtatggaggaataccgaggatgaaattctgaaagcagcggtaatgaaatatgggaaaaatcagtggtctaggattgcctcattgctgcatagaaaatcagcaaagcagtgcaaagccagatggtatgaatggctggatccaagcattaagaagacagaatggtccagagaagaagaggaaaaactcttgcacttggccaagttgatgccaactcagtggaggaccattgctccaatcattggaagaacagcggcccagtgcttagaacactatgaatttcttctggataaagctgcccaaagagacaatgaagaggaaacaacagatgatccacgaaaacttaaacctggagaaatagatccaaatccagaaacaaaaccagcgcggcctgatccaattgatatggatgaggatgaacttgagatgctttctgaagccagagcccgcttggctaatactcagggaaagaaggccaagaggaaagcaagagagaaacaattggaagaagcaagacgtcttgctgccctccaaaaaagaagagaacttcgagcagctggcatagaaattcagaagaaaagaaaaaggaagagaggagttgattataatgccgaaatcccatttgaaaaaaagcctgcccttggtttttatgatacttctgaggaaaactaccaagctcttgacgcagatttcaggaaattaagacaacaggatcttgatggggagctaagatctgaaaaagaaggaagagatagaaaaaaagacaaacagcatttgaaaaggaaaaaagaatctgatttaccatcagctattcttcaaactagtggtgtttctgaatttactaaaaagagaagcaaactagtacttcctgcccctcagatttcagatgcagaactccaggaagttgtaaaagtaggccaagcgagtgaaattgcacgtcaaactgccgaggaatctggcataacaaattctgcttccagtacacttttgtctgagtacaatgtcaccaacaacagcgttgctcttagaacaccacgaacaccagcttcccaggacagaattctgcaggaagcccagaacctcatggccctcaccaatgtggacaccccattgaaaggtggacttaataccccattgcatgagagtgacttctcaggtgtaactccacagcgacaagttgtacagactccaaacacagttctctctactccattcaggactccttctaatggagctgaagggctgactccccggagtggaacaactcccaaaccagttattaactctactccgggtagaactcctcttcgagacaagttaaacattaatcccgaggatggaatggcagactatagtgatccctcttacgtgaagcagatggaaagagaatcccgagaacatctccgtttagggttgttgggccttcctgcccctaagaatgattttgaaattgttctaccagaaaatgccgagaaggagctggaagaacgtgaaatagatgatacttacattgaagatgctgctgatgtggatgctcgaaagcaggccatacgagatgcagagcgtgtaaaggaaatgaaacgaatgcataaagctgtccagaaagatctgccaagaccatcagaagtaaatgaaactattctaagacccttaaatgtagaaccgcctttaacagatttacagaaaagtgaagaactaatcaaaaaagaaatgatcacaatgcttcattatgaccttctacatcacccttatgaaccatctggaaataaaaaaggcaaaactgtagggtttggtaccaataattcagagcacattacctatctggaacataatccttatgaaaagttctccaaagaagagctgaaaaaggcccaggatgttttggtgcaggagatggaagtggttaaacaaggaatgagccatggagagctctcaagtgaagcttataaccaggtgtgggaagaatgctacagtcaagttttatatcttcctgggcagagccgctacacacgggccaatctggctagtaaaaaggacagaattgaatcacttgaaaagaggctcgagataaacaggggtcacatgacgacagaagccaagagggctgcaaagatggaaaagaagatgaaaattttgcttgggggttaccagtctcgtgctatggggctcatgaaacagttgaatgacttatgggaccaaattgaacaggctcacttggagttacgcacttttgaagaactcaagaaacatgaagattctgctattccccggaggctagagtgtctaaaagaagacgttcagcgacaacaagaaagagaaaaggaacttcaacatagatatgctgatttgctgctggagaaagagactttaaagtcaaaattctgaagtacagtttatattctgtcacaggattaattaattgccggttttcatactctagaaggctgaaactgatgtttatcttcattgacaaatttacccaccatctgtggtttttcagttgtttattttaaatgatatcgatcttacacattctgtgtataaagaccttaactccacaggacggacattttagagtttaaattattaaggctatcattcttttagtaatgtcatatttgcaaacttttttagttttggcctttaatttaaaaagcctaattttaaagtgctgcctgtgagtaactcttgaataaaaacaaaatataaaaaattgagaatgtagccttttgtttgaagtaattagatacttaagagtgcctgcaaaccagcagctatgtactctgtgtcatatttaatgagtaactcttgggtaatcaaaatggtgatgcagtatcttaaacacttaagaggcagttctttgtggctttgttagtttcagcaaagagtggtcatttctgtatacactgacaagttagattaactttttagtacctcaaattttttttttgttaatatcactttaaagaaggtctcttgtctgccagctacttaaataatttatgggtcagggcttaaaagatttaacttccttgccccattattttcttataagtattttttgacaaaggcattttaaaagttaatttcaagaaggccatcaaacttaaagctctatgtttagcctaagaagtcagttacatcagtgtagaatttggggaatggatagaggtggagatatttaattttatataattcatataaattgatttagttacagtatcagttggctacaagctcattatagactagcaatgttttgacatcaccaaaaacgtttgcccagtcttagaatactagggactataggaagggaagggattcattcattcattcgatattgaatgtataccctgtgccagagtcttagagagagaacaacaaacaaaataggcctagttcttgtttagtagagcttatagtcttttgagaatgacagacaattaaaatccaaatgtttatttggtgattcttatgtgtcagacacttaagtgttgggagataagcagttattaagacagagttcttgctctcatggaggtgacattagtggggaggagatactaagtatgtccagggaaagtatcagaccatgagttttagattctgtggaggaaattaaagtagggtgattatgagatagtgaatgagtggctattttagactggacgatcaaagagacctcttggaaggcagctatgctcaccactataccactgcactgtgccgcaccgtaccactataagctgcacggccaaagagacctcttaaagaagtaacatttaagataacatgtgattgacattttagaatgggctatccttgtgagattcaaggaaagaacatcctaggtggagtgaatagcaaacataaagcctcttttgtatgtttgaggaacaaaaaggacaatgcagctagagtgtcaagaatggcatttctgtatataagacctcgttgtatagagccacataaataaggctataataaggaatttggatcttactttaaatatgataagaatcgatgagaagatctaagcaaaggaatgacatgatcagatttggttttagaaacatcactatctccttagtgtgtaaaatctcaccaggctggagatagggaagccagtccaattaggagcctgatgcagtgatccagacaaaaaaataatagtgattctaactagagtccaggtaatagtagtggagatatgtggagagacatgataggtatatacttaatagtcttatcagacgataaattgatattttcctggtgtgtagtcacttaattcaaatacttttttcagtaagttctgggttttctaggaaaaacttcagtatcatcagtgaataatgatagtgtttcttctgatagttttatttcacttttattgcatgttttgttatctgaaatgtttaggacaatgttaacaataatgatgttagacatttttttttcttattttaatgggaatgtccatagttttaagtttgctgttgggagttagatagtctttatctgaaagacagtgtctctcttttagtttttaaagagtttgaattagaaatggctctggaactttaaacagtataccatttgggcatctattaaagcattcatataattgttctcatttgatgttttgatgaggtatattaatagattttcccacattaaatcatctttgcactcctggaatcaggtagattaatttttaaaagaaattttaaaggatttatagtttatttgcactttttgtagacttgaattatatggatttaaaagttgatctaatattaataaaggctcactttgttttcaaaatttgaagtaattcacatacttatagcctaaaaaaatcggcaggaattacaaaatttcaaaactggcacattgtaaactgcatatgcatttgccaggtagtggtgccacttgaaatggtgaacagacacactgttatcctttgtcagtatcctgtaaagcccaggattctttaccagcaccatacagcgattttggtgactattttaacattcacactgaggccaggggtggtgagtcatgcctgtaatcctagcactttgggaggccaaggtgggaggatcatttgagctcaggagttcaagattagcctgggtaacatagtgagaccctgtctctattaaaaaataataataaaaataacattcacattggtattgttcactaaggtattggttgttaaggcattcattaaggtattgttaaaacttgtgttaagcatgttaaagtctcagtaactttgggatagaaataaaatgtgataaaaagctgaaagaaaccaccacaagggagagtcctttttgaaatattagagacataatgctgtctaataaaaaacgacatcaaagaaaaactacactacagtgactgcagacttaatgttggccaaccatgcatcctccctagaaatgcatttgaatttgatttactaatcttttatttaggaaatttacatttttacattagtgagattggtcttttgggctattgtacttttttttttttttttttgagatggagtcttgctctctcacccaggctggagtgcagtagtgcaatcttggcccactgcaacctctgcctcctgggctcgagtgattctctgcctcagccttccaagtagctgggactacaggcatgtgccaccgcacctggctaatttttgtgtttttagtagagatggggttttgctatgttggccaggctggtcttgaattcctgacctcaggtgatccacctacctcggcctcccaaagtgctagaattacaggtgtgagccaccatgcccagcctggttattgtattttgatattgggattttgctagctctctaaagtaaataggataactgtatatctttttctgtgcattaagcagttataacatgggaatgatttgttcatgaaaggttgaaagtctgtacttacagaacttttgagttcacagtgctttctggaaataatttctttataactgtcagtttcttttgtgactattatgttacctatttttaaatttaagcaactttaaattaaaaaaattgtttttaaaatatattcttccttttatgtttatttagtaaatttaggtaatgtatactttttaagaaatatttttattttgttcaaatttaaacatctgttgttagcagaaaattctaatagcaatttcttttctattaactttgccatttctaagttataggaaatttaccttctcttaattctaccactttttacttgactagacttgttaagggtatacattttctgttcagaaaactagtgtttttattggcttatctattgtgattttgttttaaaatatgttaatttctcaatttaggcttattattttgttttctgtagttttttgactttttgagactgatgcttattttttgcttgtatacaaatgaatgtgttgaagacttttgaactgtcctttgagttcaaatatgttcacatcccagccattttgatatgtagtagtcttgttttctaagtagtatatcattgtgttttaaatttctggttcaataattaagtttttc

SEQ ID NO: 1495 - DNA, 785 bp, Homo sapiens
ggccatcgccgcagatccagcgcccagagagacaccagagaacccaccatggccccctttgagcccctggcttctggcatcctgttgttgctgtggctgatagcccccagcagggcctgcacctgtgtcccaccccacccacagacggccttctgcaattccgacctcgtcatcagggccaagttcgtggggacaccagaagtcaaccagaccaccttataccagcgttatgagatcaagatgaccaagatgtataaagggttccaagccttaggggatgccgctgacatccggttcgtctacacccccgccatggagagtgtctgcggatacttccacaggtcccacaaccgcagcgaggagtttctcattgctggaaaactgcaggatggactcttgcacatcactacctgcagttttgtggctccctggaacagcctgagcttagctcagcgccggggcttcaccaagacctacactgttggctgtgaggaatgcacagtgtttccctgtttatccattccctgcaaactgcagagtggcactcattgcttgtggacggaccagctcctccaaggctctgaaaagggcttccagtcccgtcaccttgcctgcctgcctcgggagccagggctgtgcacctggcagtccctgcggtcccagatagcctgaatcctgcccggagtggaagctgaagcctgcacagtgtccaccctgttcccactcccatctttcttccggacaatgaaataaagagttaccacccagcaaaaaaaaaaaaaaaa

SEQ ID NO: 1496 - DNA, 949 bp, Homo sapiens
cgggtgggagaggaggagggtgtatctcctttcgtcggcccgccccttggcttctgcactgatggtgggtggatgagtaatgcatccaggaagcctggaggcctgtggtttccgcacccgctgccacccccgcccctagcgtggacatttatcctctagcgctcaggccctgccgccatcgccgcagatccagcgcccagagagacaccagagaacccaccatggccccctttgagcccctggcttctggcatcctgttgttgctgtggctgatagcccccagcagggcctgcacctgtgtcccaccccacccacagacggccttctgcaattccgacctcgtcatcagggccaagttcgtggggacaccagaagtcaaccagaccaccttataccagcgttatgagatcaagatgaccaagatgtataaagggttccaagccttaggggatgccgctgacatccggttcgtctacacccccgccatggagagtgtctgcggatacttccacaggtcccacaaccgcagcgaggagtttctcattgctggaaaactgcaggatggactcttgcacatcactacctgcagttttgtggctccctggaacagcctgagcttagctcagcgccggggcttcaccaagacctacactgttggctgtgaggaatgcacagtgtttccctgtttatccatcccctgcaaactgcagagtggcactcattgcttgtggacggaccagctcctccaaggctctgaaaagggcttccagtcccgtcaccttgcctgcctgcctcgggagccagggctgtgcacctggcagtccctgcggtcccagatagcctgaatcctgcccggagtggaagctgaagcctgcacagtgtccaccctgttcccactcccatctttcttccggacaatgaaataaagagttaccacccagcagacact

SEQ ID NO: 1497 - DNA, 889 bp, Homo sapiens
cgggtgggagaggaggagggtgtatctcctttcgtcggcccgccccttggcttctgcactgatggtgggtggatgagtaatgcatccaggaagcctggaggcctgtggtttccgcacccgctgccacccccgcccctagcgtggacatttatcctctagcgctcaggccctgccgccatcgccgcagatccagcgcccagagagacaccagagaacccaccatggccccctttgagcccctggcttctggcatcctgttgttgctgtggctgatagcccccagcagggcctgcacctgtgtcccaccccacccacagacggccttctgcaattccgacctcgtcatcagggccaagttcgtggggacaccagaagtcaaccagaccaccttataccagcgttatgagatcaagatgaccaagatgtataaagggttccaagccttaggggatgccgctgacatccggttcgtctacacccccgccatggagagtgtctgcggatacttccacaggtcccacaaccgcagcgaggagtttctcattgctggaaaactgcaggatggactcttgcacatcactacctgcagttttgtggctccctggaacagcctgagcttagctcagcgccggggcttcaccaagacctacactgttggctgtgaggaatgcacagtgtttccctgtttatccatcccctgcaaactgcagagtggcactcattgcttgtggacggaccagctcctccaagggctgtgcacctggcagtccctgcggtcccagatagcctgaatcctgcccggagtggaagctgaagcctgcacagtgtccaccctgttcccactcccatctttcttccggacaatgaaataaagagttaccacccagca

SEQ ID NO: 1498 - DNA, 3009 bp, Homo sapiens
agacgactgtctgagagaggggccgctacgccgcacagcaaacaagctccgcgacgtttccaggacccggataatcccgcccttagagcagagccggaagaaggcgggacgaaccggaagagggtgaaatgctttcggtaggcactccacggctgtgaagatggcggcggctgcgtggcttcaggtgttgcctgtcattcttctgcttctgggagctcacccgtcaccactgtcgtttttcagtgcgggaccggcaaccgtagctgctgccgaccggtccaaatggcacattccgataccgtcggggaaaaattattttagttttggaaagatcctcttcagaaataccactatcttcctgaagtttgatggagaaccttgtgacctgtctttgaatataacctggtatctgaaaagcgctgattgttacaatgaaatctataacttcaaggcagaagaagtagagttgtatttggaaaaacttaaggaaaaaagaggcttgtctgggaaatatcaaacatcatcaaaattgttccagaactgcagtgaactctttaaaacacagaccttttctggagattttatgcatcgactgcctcttttaggagaaaaacaggaggctaaggagaatggaacaaaccttacctttattggagacaaaaccgcaatgcatgaaccattgcaaacttggcaagatgcaccatacatttttattgtacatattggcatttcatcctcaaaggaatcatcaaaagaaaattcactgagtaatctttttaccatgactgttgaagtgaagggtccctatgaatacctcacacttgaagactatcccttgatgatttttttcatggtgatgtgtattgtatatgtcctgtttggtgttctgtggctggcatggtctgcctgctactggagagatctcctgagaattcagttttggattggtgctgtcatcttcctgggaatgcttgagaaagctgtcttctatgcggaatttcagaatatccgatacaaaggagaatctgtccagggtgctttgatccttgcagagctgctttcagcagtgaaacgctcactggctcgaaccctggtcatcatagtcagtctgggatatggcatcgtcaagccacgccttggagtcactcttcataaggttgtagtagcaggagccctctatcttttgttctctggcatggaaggggtcctcagagttactggggcccagactgatcttgcttccttggcctttatccccttggctttcctagacactgccttgtgctggtggatatttattagcctgactcaaacaatgaagctattaaaacttcggaggaacattgtaaaactctctttgtatcggcatttcaccaacacgcttattttggcagtggcagcatccattgtgtttatcatctggacaaccatgaagttcagaatagtgacatgtcagtcggactggcgggagctgtgggtagacgatgccatctggcgcttgctgttctccatgatcctctttgtcatcatggttctctggcgaccatctgcaaacaaccagaggtttgccttttcaccattgtctgaggaagaggaggaggatgaacaaaaggagcctatgctgaaagaaagctttgaaggaatgaaaatgagaagtaccaaacaagaacccaatggaaatagtaaagttaacaaagcacaggaagatgatttgaagtgggtagaagagaatgttccttcttctgtgacagatgtagcacttccagcccttctggattcagatgaggaacgaatgatcacacactttgaaaggtccaaaatggagtaaggaatgggaagatttgcagttaaagatggctaccatcagggaagagatcagcatctgtgtcagtcttctgtacggctccatgggattaaaggaagcaatgacatcctgatctgttccttgatctttgggcattggagttggcgagaggtgtcagaacaaagagaacatcttactgaaaacaagttcataagatgagaaaaatctacgagcttcttatttacaacactgctgccccctttcctcccagactctgacatggatgttcatgcaacttaagtgtgttgttcctgaactttctgtaatgtttcattttttaaatctgacaaactaaaaagtttaacgtcttctaaaagattgtcatcaacaccataatatgtaatctccaggagcaactgcctgtaatttttatttatttagggagttacataggtgatgggggaaattgttaactacctttcattttcctgggaagtcaaggttacatcttgcagaggttgttttgagaaaaaagggcccttctgagttaaggagccatagttctatcaatgatcaaaagaaaaaaaaaaaaaagagaaactgttacagtatgattcagatcatttaaaaaagcaaaatcaagtgcaattttgtttacaaatggtgtatattaaagatttttctatttcagatgtactttaaagagaaatattagcttaactcttttgacatctgctattgtgacacatcccattgctggcaatgtggtgcacactccgaaacttttaactactgttttgtaagcctccaagggtggcattgcagggtccttaggcaatgttttgtttgcctttatgcagagaggtgctccaagtgctgtgattgagcaccgtgctagaggaactgtaatgcttcagaagttgtagcttatacaaaggaaacaggtcctgctggcttaatttaaacagttattgcatgaagtagcgtggaggccctggactgctgctcgttctttaggatggactgttctggtatctggtattggtttagagactgttaataagggacatcacaaggtgatgggattcatttgaagcactctatttctgttttaatggttttatccaattttgccttcccaagatttttgttctacataaaaagttcatgccactttttaatataaaaaaatttaacaaaattaa

SEQ ID NO: 1499 - DNA, 897 bp, Homo sapiens
agacgactgtctgagagaggggccgctacgccgcacagcaaacaagctccgcgacgtttccaggacccggataatcccgcccttagagcagagccggaagaaggcgggacgaaccggaagagggtgaaatgctttcggtaggcactccacggctgtgaagatggcggcggctgcgtggcttcaggtgttgcctgtcattcttctgcttctgggagctcacccgtcaccactgtcgtttttcagtgcgggaccggcaaccgtagctgctgccgaccggtccaaatggcacattccgataccgtcggggaaaaattattttagttttggaaagatcctcttcagaaataccactatcttcctgaagtttgatggagaaccttgtgacctgtctttgaatataacctggtatctgaaaagcgctgattgttacaatgaaatctataacttcaaggcagaagaagtagagttgtatttggaaaaacttaaggaaaaaagaggcttgtctgggaaatatcaaacatcatcaaaattgttccagaactgcagtgaactctttaaaacacagaccttttctggagattttatgcatcgactgcctcttttaggagaaaaacaggaggctaaggagaatggaacaaaccttacctttattggagacaaaaccattcagatgcctttcttgaagaaacatttcttggattgttgaaagactttaataatttccaaagttccaaaagttgattttgatagtttttgccagtgttttcgttgcttttatggatgagtagattttcagagtttcttattctgccattctgaaagtgttctcactacctaaaccccagttttatttgtacagaattttaactgaatgtaagttaggcatgacagtctttg

SEQ ID NO: 1500 - DNA, 2874 bp, Homo sapiens
agacgactgtctgagagaggggccgctacgccgcacagcaaacaagctccgcgacgtttccaggacccggataatcccgcccttagagcagagccggaagaaggcgggacgaaccggaagagggtgaaatgctttcggtaggcactccacggctgtgaagatggcggcggctgcgtggcttcaggtgttgcctgtcattcttctgcttctgggagctcacccgtcaccactgtcgtttttcagtgcgggaccggcaaccgtagctgctgccgaccggtccaaatggcacattccgataccgtcggggaaaaattattttagttttggaaagatcctcttcagaaataccactatcttcctgaagtttgatggagaaccttgtgacctgtctttgaatataacctggtatctgaaaagcgctgattgttacaatgaaatctataacttcaaggcagaagaagtagagttgtatttggaaaaacttaaggaaaaaagaggcttgtctgggaaatatcaaacatcatcaaaattgttccagaactgcagtgaactctttaaaacacagaccttttctggagattttatgcatcgactgcctcttttaggagaaaaacaggaggctaaggagaatggaacaaaccttacctttattggagacaaaaccgcaatgcatgaaccattgcaaacttggcaagatgcaccatacatttttattgtacatattggcatttcatcctcaaaggaatcatcaaaagaaaattcactgagtaatctttttaccatgactgttgaagtgaagggtccctatgaatacctcacacttgaagactatcccttgatgatttttttcatggtgatgtgtattgtatatgtcctgtttggtgttctgtggctggcatggtctgcctgctactggagagatctcctgagaattcagttttggattggtgctgtcatcttcctgggaatgcttgagaaagctgtcttctatgcggaatttcagaatatccgatacaaaggagaatctgtccagggtgctttgatccttgcagagctgctttcagcagtgaaacgctcactggctcgaaccctggtcatcatagtcagtctgggatatggcatcgtcaagccacgccttggagtcactcttcataaggttgtagtagcaggagccctctatcttttgttctctggcatggaaggggtcctcagagttactggggcccagactgatcttgcttccttggcctttatccccttggctttcctagacactgccttgtgctggtggatatccttctccctgactcaaacaatgaagctattaaaacttcggaggaacattgtaaaactctctttgtatcggcatttcaccaacacgcttattttggcagtggcagcatccattgtgtttatcatctggacaaccatgaagttcagaatagtgacatgtcagtcggactggcgggagctgtgggtagacgatgccatctggcgcttgctgttctccatgatcctctttgtcatcatggttctctggcgaccatctgcaaacaaccagaggtttgccttttcaccattgtctgaggaagaggaggaggatgaacaaaaggagcctatgctgaaagaaagctttgaaggaatgaaaatgagaagtaccaaacaagaacccaatggaaatagtaaagttaacaaagcacaggaagatgatttgaagtgggtagaagagaatgttccttcttctgtgacagatgtagcacttccagcccttctggattcagatgaggaacgaatgatcacacactttgaaaggtccaaaatggagtaaggaatgggaagatttgcagttaaagatggctaccatcagggaagagatcagcatctgtgtcagtcttctgtacggctccatgggattaaaggaagcaatgacatcctgatctgttccttgatctttgggcattggagttggcgagaggtgtcagaacaaagagaacatcttactgaaaacaagttcataagatgagaaaaatctacgagcttcttatttacaacactgctgccccctttcctcccagactctgacatggatgttcatgcaacttaagtttagggagttacataggtgatgggggaaattgttaactacctttcattttcctgggaagtcaaggttacatcttgcagaggttgttttgagaaaaaagggcccttctgagttaaggagccatagttctatcaatgatcaaaagaaaaaaaaaaaaaagagaaactgttacagtatgattcagatcatttaaaaaagcaaaatcaagtgcaattttgtttacaaatggtgtatattaaagatttttctatttcagatgtactttaaagagaaatattagcttaactcttttgacatctgctattgtgacacatcccattgctggcaatgtggtgcacactccgaaacttttaactactgttttgtaagcctccaagggtggcattgcagggtccttaggcaatgttttgtttgcctttatgcagagaggtgctccaagtgctgtgattgagcaccgtgctagaggaactgtaatgcttcagaagttgtagcttatacaaaggaaacaggtcctgctggcttaatttaaacagttattgcatgaagtagcgtggaggccctggactgctgctcgttctttaggatggactgttctggtatctggtattggtttagagactgttaataagggacatcacaaggtgatgggattcatttgaagcactctatttctgttttaatggttttatccaattttgccttcccaagatttttgttctacataaaaagttcatgccactttttaatataaaaaaatttaacaaaattaa

SEQ ID NO: 1501 - DNA, 2275 bp, Homo sapiens
tggtggcgggcgcctgtagtcccagccacccgggaggctgaggcaggagaatggtgtgaacccgggaggcggagcttgcagtgagctgagatcgtgccactgcactccacgcactgctcttcccggtcatggaggcgccagccgccggcttgtttctgctcctgttgcttgggacttgggccccggcgccgggcagcgcctcctccgaggcaccgccgctgatcaatgaggacgtgaagcgcacagtggacctaagcagccacctggctaaggtgacggccgaggtggtcctggcgcacctgggcggcggctccacgtcccgagctacctctttcctgctggctttggagcctgagctcgaggcccggctggcgcacctgggcgtgcaggtaaagggagaagatgaggaagagaacaatttggaagtacgtgaaaccaaaattaagggtaaaagtgggagattcttcacagtcaagctcccagttgctcttgatcctggggccaagatttcagtcattgtggaaacagtctacacccatgtgcttcatccgtatccaacccagatcacccagtcagagaaacagtttgtggtgtttgaggggaaccattatttctactctccctatccaacgaagacacaaaccatgcgtgtgaagcttgcctctcgaaatgtggagagctacaccaagctggggaaccccacgcgctctgaggacctactggattatgggcctttcagagatgtgcctgcctatagtcaggatacttttaaagtacattatgagaacaacagccctttcctgaccatcaccagcatgacccgagtcattgaagtctctcactggggtaatattgctgtggaagaaaatgtggacttaaagcacacaggagctgtgcttaaggggcctttctcacgctatgattaccagagacagccagatagtggaatatcctccatccgttcttttaagaccatccttcctgctgctgcccaggatgtttattaccgggatgagattggcaatgtttctaccagccacctccttattttggatgactctgtagagatggaaatccggcctcgcttccctctctttggcgggtggaagacccattacatcgttggctacaacctcccaagctatgagtacctctataatttgggtgaccagtatgcactgaagatgaggtttgtggaccatgtgtttgatgaacaagtgatagattctctgactgtgaagatcatcctgcctgaaggagccaagaacattgaaattgatagtccctatgaaatcagccgtgccccagatgagctgcactacacctatctggacacatttggccgccctgtgattgttgcctacaagaaaaatctggtagaacagcacattcaggacattgtggtccactacacgttcaacaaggtgctcatgctgcaggagcccctgctggtggtggcggccttctacatcctgttcttcaccgttatcatctatgttcggctggacttctccatcaccaaggatccagccgcagaagccaggatgaaggtagcctgcatcacagagcaggtcttgaccctggtcaacaagagaataggcctttaccgtcactttgacgagaccgtcaataggtacaagcaatcccgggacatctccaccctcaacagtggcaagaagagcctggagactgaacacaaggccttgaccagtgagattgcactgctgcagtccaggctgaagacagagggctctgatctgtgcgacagagtgagcgaaatgcagaagctggatgcacaggtcaaggagctggtgctgaagtcggcggtggaggctgagcgcctggtggctggcaagctcaagaaagacacgtacattgagaatgagaagctcatctcaggaaagcgccaggagctggtcaccaagatcgaccacatcctggatgccctgtagcccctgcccgcatcctccagggggcccagggtgcctgcactttgctgtggcaggcagattgggtggtagtgggaggttgtgcatggaggccagtgaaagctgacatctgtaaaaggccttcaaggaagagaaaccaggccctgcgtcaggcagtgtgagtttgccgtttgtccttaactttctttaagaaaactttaaaaaaactcccattaaaaacaaaacatctttgtgttttgaacaaaggaattttcaatatttgattggtattctgttctgaagtctaagatatttttcagcctataaagccccctgttttatgccct

SEQ ID NO: 1502 - DNA, 2397 bp, Homo sapiens
ttagctaggcatggtggcacatgcctgtaatcccagctactcgggaggctgaggcaggagaattgcttgaacccgggaggcagaggttgcagccggctgagatggcgccatcacactccagcctgctcttcccggtcatggaggcgccagccgccggcttgtttctgctcctgttgcttgggacttgggccccggcgccgggcagcgcctcctccgaggcaccgccgctgatcaatgaggacgtgaagcgcacagtggacctaagcagccacctggctaaggtgacggccgaggtggtcctggcgcacctgggcggcggctccacgtcccgagctacctctttcctgctggctttggagcctgagctcgaggcccggctggcgcacctgggcgtgcaggtaaagggagaagatgaggaagagaacaatttggaagtacgtgaaaccaaaattaagggtaaaagtgggagattcttcacagtcaagctcccagttgctcttgatcctggggccaagatttcagtcattgtggaaacagtctacacccatgtgcttcatccatatccaacccagatcacccagtcagagaaacagtttgtggtgtttgaggggaaccattatttctactctccctatccaacgaagacacaaaccatgcgtgtgaagcttgcctctcgaaatgtggagagctacaccaagctggggaaccccacgcgctctgaggacctactggattatgggcctttcagagatgtgcctgcctatagtcaggatacttttaaagtacattatgagaacaacagccctttcctgaccatcaccagcatgacccgagtcattgaagtctctcactggggtaatattgctgtggaagaaaatgtggacttaaagcacacaggagctgtgcttaaggggcctttctcacgctatgattaccagagacagccagatagtggaatatcctccatccgttcttttaagaccatccttcctgctgctgcccaggatgtttattaccgggatgagattggcaatgtttctaccagccacctccttattttggatgactctgtagagatggaaatccggcctcgcttccctctctttggcgggtggaagacccattacatcgttggctacaacctcccaagctatgagtacctctataatttgggtgaccagtatgcactgaagatgaggtttgtggaccatgtgtttgatgaacaagtgatagattctctgactgtgaagatcatcctgcctgaaggagccaagaacattgaaattgatagtccctatgaaatcagccgtgccccagatgagctgcactacacctatctggatacatttggccgccctgtgattgttgcctacaagaaaaatctggtagaacagcacattcaggacattgtggtccactacacgttcaacaaggtgctcatgctgcaggagcccctgctggtggtggcggccttctacatcctgttcttcaccgttatcatctatgttcggctggacttctccatcaccaaggatccagccgcagaagccaggatgaaggtagcctgcatcacagagcaggtcttgaccctggtcaacaagagaataggcctttaccgtcactttgacgagaccgtcaataggtacaagcaatcccgggacatctccaccctcaacagtggcaagaagagcctggagactgaacacaaggccttgaccagtgagattgcactgctgcagtccaggctgaagacagagggctctgatctgtgcgacagagtgagcgaaatgcagaagctggatgcacaggtcaaggagctggtgctgaagtcggcggtggaggctgagcgcctggtggctggcaagctcaagaaagacacgtacattgagaatgagaagctcatctcaggaaagcgccaggagctggtcaccaagatcgaccacatcctggatgccctgtagcccctgcccgcatcctccagggggcccagggtgcctgcactttgctgtggcaggcagattgggtggtagtgggaggttgtgcatggaggccagtgaaagctgacatctgtaaaaggccttcaaggaagagaaaccaggccctgcgtcaggcagtgtgagtttgccgtttgtccttaactttctttttttttttttttaaaaaagaaaactttaaaaaaactcccattaaaaacaaaacatctttgtgttgtgaacaaaggaattttcaatatttgattggtattctgttctgaagtctaggatatttttcagcctataaagccccctgttttatgcccttctaattctgatgtttgggtattgtgtgagtgcatgtgtttttttttttttttttttaaagcgtgtgtgaacaaatggaaataaagcagggactgtg

SEQ ID NO: 1503 - DNA, 2275 bp, Homo sapiens; identical to SEQ ID NO: 1501

SEQ ID NO: 1504 - DNA, 2275 bp, Homo sapiens; identical to SEQ ID NO: 1501

SEQ ID NO: 1505 - DNA, 1357 bp, Homo sapiens
cccgccgccgccatgcccttctccaacagccacaacgcactgaagctgcgcttcccggccgaggacgagttccccgacctgagcgcccacaacaaccacatggccaaggtgctgacccccgagctgtacgcggagctgcgcgccaagagcacgccgagcggcttcacgctggacgacgtcatccagacaggcgtggacaacccgggccacccgtacatcatgaccgtgggctgcgtggcgggcgacgaggagtcctacgaagtgttcaaggatctcttcgaccccatcatcgaggaccggcacggcggctacaagcccagcgatgagcacaagaccgacctcaaccccgacaacctgcagggcggcgacgacctggaccccaactacgtgctgagctcgcgggtgcgcacgggccgcagcatccgtggcttctgcctccccccgcactgcagccgcggggagcgccgcgccatcgagaagctcgcggtggaagccctgtccagcctggacggcgacctggcgggccgatactacgcgctcaagagcatgacggaggcggagcagcagcagctcatcgacgaccacttcctcttcgacaagcccgtgtcgcccctgctgctggcctcgggcatggcccgcgactggcccgacgcccgcggtatctggcacaatgacaataagaccttcctggtgtgggtcaacgaggaggaccacctgcgggtcatctccatgcagaaggggggcaacatgaaggaggtgttcacccgcttctgcaccggcctcacccagattgaaactctcttcaagtctaaggactatgagttcatgtggaaccctcacctgggctacatcctcacctgcccatccaacctgggcaccgggctgcgggcaggtgtgcatatcaagctgcccaacctgggcaagcatgagaagttctcggaggtgcttaagcggctgcgacttcagaagcgaggcacaggcggtgtggacacggctgcggtgggcggggtcttcgacgtctccaacgctgaccgcctgggcttctcagaggtggagctggtgcagatggtggtggacggagtgaagctgctcatcgagatggaacagcggctggagcagggccaggccatcgacgacctcatgcctgcccagaaatgaagcccggcccacacccgacaccagccctgctgcttcctaacttattgcctgggcagtgcccaccatgcacccctgatgttcgccgtctggcgagcccttagccttgctgtagagacttccgtcacccttggtagagtttatttttttgatggctaagatactgctgatgctgaaataaactagggttttggcctgcctg

SEQ ID NO: 1506 - DNA, 1429 bp, Homo sapiens
atccatatggcggccggccggcgcggtggctctcgcctgtgatcccgcgctttgggaggccgaggcgggaggttcttctgagctgaagagttcgagaccagcccgggaaacgtacccgccgccgccatgcccttctccaacagccacaacgcactgaagctgcgcttcccggccgaggacgagttccccgacctgagcgcccacaacaaccacatggccaaggtgctgacccccgagctgtacgcggagctgcgcgccaagagcacgccgagcggcttcacgctggacgacgtcatccagacaggcgtggacaacccgggccacccgtacatcatgaccgtgggctgcgtggcgggcgacgaggagtcctacgaagtgttcaaggatctcttcgaccccatcatcgaggaccggcacggcggctacaagcccagcgatgagcacaagaccgacctcaaccccgacaacctgcagggcggcgacgacctggaccccaactacgtgctgagctcgcgggtgcgcacgggccgcagcatccgtggcttctgcctccccccgcactgcagccgcggggagcgccgcgccatcgagaagctcgcggtggaagccctgtccagcctggacggcgacctggcgggccgatactacgcgctcaagagcatgacggaggcggagcagcagcagctcatcgacgaccacttcctcttcgacaagcccgtgtcgcccctgctgctggcctcgggcatggcccgcgactggcccgacgcccgcggtatctggcacaatgacaataagaccttcctggtgtgggtcaacgaggaggaccacctgcgggtcatctccatgcagaaggggggcaacatgaaggaggtgttcacccgcttctgcaccggcctcacccagattgaaactctcttcaagtctaaggactatgagttcatgtggaaccctcacctgggctacatcctcacctgcccatccaacctgggcaccgggctgcgggcaggtgtgcatatcaagctgcccaacctgggcaagcatgagaagttctcggaggtgcttaagcggctgcgacttcagaagcgaggcacaggcggtgtggacacggctgcggtgggcggggtcttcgacgtctccaacgctgaccgcctgggcttctcagaggtggagctggtgcagatggtggtggacggagtgaagctgctcatcgagatggaacagcggctggagcagggccaggccatcgacgacctcatccctgctgcttcctaacttattgcctgggcagtgcccaccatgcacccctgatgttcgccgtctggcgagcccttagccttgctgtagagacttccgtcacccttggtagagtttatttttttgatggctaagatactgctgatgctgaaataaactagggttttggcctgcc

SEQ ID NO: 1507 - DNA, 1504 bp, Homo sapiens
agcggccgctgttcgcctgcgtcgctccgggagctgccgacggacggagcgcccccgcccccgcccggccgcccgcccgccgccgccatgcccttctccaacagccacaacgcactgaagctgcgcttcccggccgaggacgagttccccgacctgagcgcccacaacaaccacatggccaaggtgctgacccccgagctgtacgcggagctgcgcgccaagagcacgccgagcggcttcacgctggacgacgtcatccagacaggcgtggacaacccgggccacccgtacatcatgaccgtgggctgcgtggcgggcgacgaggagtcctacgaagtgttcaaggatctcttcgaccccatcatcgaggaccggcacggcggctacaagcccagcgatgagcacaagaccgacctcaaccccgacaacctgcaggtgcggggctgcgggcgggccgggcgggcggggccggggtcttcgggcgctcactcccgtctcgcctcccagggcggcgacgacctggaccccaactacgtgctgagctcgcgggtgcgcacgggccgcagcatccgtggcttctgcctccccccgcactgcagccgcggggagcgccgcgccatcgagaagctcgcggtggaagccctgtccagcctggacggcgacctggcgggccgatactacgcgctcaagagcatgacggaggcggagcagcagcagctcatcgacgaccacttcctcttcgacaagcccgtgtcgcccctgctgctggcctcgggcatggcccgcgactggcccgacgcccgcggtatctggcacaatgacaataagaccttcctggtgtgggtcaacgaggaggaccacctgcgggtcatctccatgcagaaggggggcaacatgaaggaggtgttcacccgcttctgcaccggcctcacccagattgaaactctcttcaagtctaaggactatgagttcatgtggaaccctcacctgggctacatcctcacctgcccatccaacctgggcaccgggctgcgggcaggtgtgcatatcaagctgcccaacctgggcaagcatgagaagttctcggaggtgcttaagcggctgcgacttcagaagcgaggcacaggcggtgtggacacggctgcggtgggcggggtcttcgacgtctccaacgctgaccgcctgggcttctcagaggtggagctggtgcagatggtggtggacggagtgaagctgctcatcgagatggaacagcggctggagcagggccaggccatcgacgacctcatgcctgcccagaaatgaagcccggcccacacccgacaccagccctgctgcttcctaacttattgcctgggcagtgcccaccatgcacccctgatgttcgccgtctggcgagcccttagccttgctgtagagacttccgtcacccttggtagagtttatttttttgatggctaagatactgctgatgctgaaataaactagggttttggcctgcctg

SEQ ID NO: 1508 - DNA, 1221 bp, Homo sapiens
cctgcgtcgctccgggagctgccgacggaccgagcgcccccgcccccgcccggccgcccgcgccccgccgccgccatgcccttctccaacagccacaacgcactgaagctgcgcttcccggccgaggacgagttccccgacctgagcgcccacaacaaccacatggccaaggtgctgacccccgagctgtacgcggagctgcgcgccaagagcacgccgagcggcttcacgctggacgacgtcatccagacaggcgtggacaacccgggccacccgtacatcatgaccgtgggctgcgtggcgggcgacgaggagtcctacgaagtgttcaaggatctcttcgaccccatcatcgaggaccggcacggcggctacaagcccagcgatgagcacaagaccgacctcaaccccgacaacctgcagggcggcgacgacctggaccccaactacgtgctgagctcgcgggtgcgcacgggccgcagcatccgtggcttctgcctccccccgcactgcagccgcggggagcgccgcgccatcgagaagctcgcggtggaagccctgtccagcctggacggcgacctggcgggccggtactacgcgctcaagagtatgacggaggcggagcagcagcagctcatcgacgaccacttcctcttcgacaagcccgtgtcgcccctgctgctggcctcgggcatggcccgcgactggcccgacgcccgcggtatctggcacaatgacaataagaccttcctggtgtgggtcaacgaggaggaccacctgcgggtcatctccatgcagaaggggggcaacatgaaggaggtgttcacccgcttctgcaccggcctcacccagattgaaactctcttcaagtctaaggactatgagttcatgtggaaccctcacctgggctacatcctcacctgcccgtccaacctgggcaccgggctgcgggcaggtgtgcatatcaagctgcccaacctgggcaagcatgagaagttctcggaggtgcttaagcggctgcgacttcagaagcgaggcacaggcggtgtggacacggctgcggtgggcggggtcttcgacgtctccaacgctgaccgcctgggcttctcagaggtggagctggtgcagatggtggtggacggagtgaagctgctcatcgagatggagcagcggctggagcagggccaggccatcgacgacctcatgcctgcccagaaatga

SEQ ID NO: 1509 - DNA, 1693 bp, Homo sapiens
gaggcagagacccaagcagctggaggctctgtgtgtggcctggagaccccacaacctccagccggaggcctgaagcatgaggccatgccaggtgccaggagcagcgactggacccagagccatgtggctgtgccctctggccctcaacctcatcttgatggcagcctctggtgctgtgtgcgaagtgaaggacgtttgtgttggaagccctgactcttccccataatcactgaccagccttgacactccccttgcaaactctcccagcactgcaccccaggcagccactcttagccttggccttcgacataatgacagtaggagagaaggtcttctccagcaatgggcagtccatcacttttgatgccattcaggaggcatgtgccagagcaggcggccgcattgctgtcccaaggaatccagaggaaaatgaggccattgcaagcttcgtgaagaagtacaacacatatgcctatgtaggcctgactgagggtcccagccctggagacttccgctactcagacgggacccctgtaaactacaccaactggtaccgaggggagcccgcaggtcggggaaaagagcagtgtgtggagatgtacacagatgggcagtggaatgacaggaactgcctgtactcccgactgaccatctgtgagttctgagaggcatttaggccatgggacagggaggacgctctctggccttcggcctccatcctgaggctccacttggtctgtgagatgctagaactccctttcaacagaattcacttgtggctattgggactggaggcacccttagccacttcattcctctgatgggccctgactgtgcagagctaaggacacagtggagattctctggcactctgaggtctctgtggcaggcctggtcaggctctccatgaggttagaaggccaggtagtgttccagcagggtggtggccaagccaaccccatgattgatgtgtacgattcactcctttgagtctttgaatggcaactcagccccctgacctgaagacagccagcctaggcctctagggtgacctagagccgccttcagatgtgacccgaataactttcaactgatgaacaaatctgcaccctacttcagatttcagtgggcattcacaccaccccccacaccactggctctgctttctcctttcattaatccattcacccagatatttcattaaaattatcacgtgccaggtcttaggatatgtcgtggggtgggcaaggtaatcagtgacagttgaagatttttttttcccagagcttatgtcttcatctgtgaaatgggaataagatacttgttgctgtcacagttattaccatccccccagctaccaaaattactaccagaactgttactatacacagaggctattgactgagcacctatcatttgccaagaaccttgacaagcacttctaatacagcatattatgtactattcaatctttacacaatgtcacgggaccagtattgtttcctcattttttataaggacactgaagcttggaggagttaaatgttttgagtattattccagagagcaagtggcagaggctggatccaaacccatcttcctggacctgaagcttatgcttccagccaccccactcctgagctgaataaagatgatttaagctaaaaaaaaaaaaaaaaaaaaaaaaaaaaaa

SEQ ID NO: 1510 - DNA, 5466 bp, Homo sapiens
gcgagggtgcgatggcgcggagcccgggacgcgcgtacgccctgctgcttctcctgatctgctttaacgttggaagtggacttcacttacaggtcttaagcacaagaaatgaaaataagctgcttcctaaacatcctcatttagtgcggcaaaagcgcgcctggatcaccgcccccgtggctcttcgggagggagaggatctgtccaagaagaatccaattgccaagatacattctgatcttgcagaagaaagaggactcaaaattacttacaaatacactggaaaagggattacagagccaccttttggtatatttgtctttaacaaagatactggagaactgaatgttaccagcattcttgatcgagaagaaacaccattttttctgctaacaggttacgctttggatgcaagaggaaacaatgtagagaaacccttagagctacgcattaaggttcttgatatcaatgacaacgaaccagtgttcacacaggatgtctttgttgggtctgttgaagagttgagtgcagcacatactcttgtgatgaaaatcaatgcaacagatgcagatgagcccaataccctgaattcgaaaatttcctatagaatcgtatctctggagcctgcttatcctccagtgttctacctaaataaagatacaggagagatttatacaaccagtgttaccttggacagagaggaacacagcagctacactttgacagtagaagcaagagatggcaatggagaagttacagacaaacctgtaaaacaagctcaagttcagattcgtattttggatgtcaatgacaatatacctgtagtagaaaataaagtgcttgaagggatggttgaagaaaatcaagtcaacgtagaagttacgcgcataaaagtgttcgatgcagatgaaataggttctgataattggctggcaaattttacatttgcatcaggaaatgaaggaggttatttccacatagaaacagatgctcaaactaacgaaggaattgtgacccttattaaggaagtagattatgaagaaatgaagaatcttgacttcagtgttattgtcgctaataaagcagcttttcacaagtcgattaggagtaaatacaagcctacacccattcccatcaaggtcaaagtgaaaaatgtgaaagaaggcattcattttaaaagcagcgtcatctcaatttatgttagcgagagcatggatagatcaagcaaaggccaaataattggaaattttcaagcttttgatgaggacactggactaccagcccatgcaagatatgtaaaattagaagatagagataattggatctctgtggattctgtcacatctgaaattaaacttgcaaaacttcctgattttgaatctagatatgttcaaaatggcacatacactgtaaagattgtggccatatcagaagattatcctagaaaaaccatcactggcacagtccttatcaatgttgaagacatcaacgacaactgtcccacactgatagagcctgtgcagacaatctgtcacgatgcagagtatgtgaatgttactgcagaggacctggatggacacccaaacagtggccctttcagtttctccgtcattgacaaaccacctggcatggcagaaaaatggaaaatagcacgccaagaaagtaccagtgtgctgctgcaacaaagtgagaaaaagcttgggagaagtgaaattcagttcctgatttcagacaatcagggttttagttgtcctgaaaagcaggtccttacactcacagtttgtgagtgtctgcatggcagcggctgcagggaagcacagcatgactcctatgtgggcctgggacccgcagcaattgcgctcatgattttggcctttctgctcctgctattggtaccacttttactgctgatgtgccattgcggaaagggcgccaaaggctttacccccatacctggcaccatagagatgctgcatccttggaataatgaaggagcaccacctgaagacaaggtggtgccatcatttctgccagtggatcaagggggcagtctagtaggaagaaatggagtaggaggtatggccaaggaagccacgatgaaaggaagtagctctgcttccattgtcaaagggcaacatgagatgtccgagatggatggaaggtgggaagaacacagaagcctgctttctggtagagctacccagtttacaggggccacaggcgctatcatgaccactgaaaccacgaagaccgcaagggccacaggggcttccagagacatggccggagctcaggcagctgctgttgcactgaacgaagaattcttaagaaattatttcactgataaagcggcctcttacactgaggaagatgaaaatcacacagccaaagattgccttctggtttattctcaggaagaaactgaatcgctgaatgcttctattggttgttgcagttttattgaaggagagctagatgaccgcttcttagatgatttgggacttaaattcaagacactagctgaagtttgcctgggtcaaaaaatagatataaataaggaaattgagcagagacaaaaacctgccacagaaacaagtatgaacacagcttcacattcactctgtgagcaaactatggttaattcagagaatacctactcctctggcagtagcttcccagttccaaaatctttgcaagaagccaatgcagagaaagtaactcaggaaatagtcactgaaagatctgtgtcttctaggcaggcgcaaaaggtagctacacctcttcctgacccaatggcttctagaaatgtgatagcaacagaaacttcctatgtcacagggtccactatgccaccaaccactgtgatcctgggtcctagccagccacagagccttattgtgacagagagggtgtatgctccagcttctaccttggtagatcagccttatgctaatgaaggtacagttgtggtcactgaaagagtaatacagcctcatgggggtggatcgaatcctctggaaggcactcagcatcttcaagatgtaccttacgtcatggtgagggaaagagagagcttccttgcccccagctcaggtgtgcagcctactctggccatgcctaatatagcagtaggacagaatgtgacagtgacagaaagagttctagcacctgcttccactctgcaatccagttaccagattcccactgaaaattctatgacggctaggaacaccacggtgtctggagctggagtccctggccctctgccagattttggtttagaggaatctggtcattctaattctaccataaccacatcttccaccagagttaccaagcatagcactgtacagcattcttactcctaaacagcagtcagccacaaactgacccagagtttaattagcagtgactaatttcatgtttccaatgtacctgatttttcatgagccttacagacacacagagacacatacacattgatcttaaaatttttctcagtcactgatatgcaaaggaccacactgtctctgcttccaggagtattttagaaatgttccacaatttactgaagacatagagatgatgctgctgcttaggtgccttttagcaagctatgcaaacaatcctgataaaacaagatacatagagagtcaatctggcttctgagaatttaccaagtgaacagagtacctagttcatcagccgtccagtaaagcaacccaggaaactgactgggtctctttgcctaccgtattaacattaaacattgatgttctgtattctgtactttactgcacccagcagactttcaacaactcattgatccaaagatacatgcacagtctgagcaccagctatggtgctcataacttctttaagacttgaaccctttcaatctgtgtgattcattaaattggaccattgatgataagaatacacattgtatgtttctgtgcacatgacagtgtgtgtgtgtgcacgtacatactgtatagtcttaaaaatagcattatactggccaggggtggtggctaacgcctgtaatcccagcactttgggaggccgaggcgggtggatcaactgtggtcaggagtttgagatcagccaggccaacctggtgaaaccccgtctctactaaaaatacaaaaattagctgggcgtgatggtgggcgcctgtaatcccagctacttgggaggctgaggcaggagaatcacttgaacccgggaggcggaggttgcagtgagccgagatcgcaccattgcactccagtctgggcaacagagtgagattccgtctcaaaaaaaaaaagaaaaggaaaaaaaaatagcattatacctcttccttgtctcaaccgccatgaaaattctgaacactccaaattcagttgaataatccaaaacaaaatttataagtataaaataattttacttcttatagtaatagtatactttaaaaagcctcagggtatattatcttctaaacagctacaattcagtgcagctacattaaccaactatgttctctagttgagaacaactaggcctatttcactgctgtgtagcctcagtgcctaacatgggtgccaaataaatattcgtagaattacactgaattgtaaaaaccattcgtttttgtttacaattgccaaaaatctcaaaaggccctgtatttatgtaattctttgaaattattattttattttgatttctcagttattgactggctgggtgtgacttagtacataagtactcaatattataaaaacctcaaataattgacttgattttacacaacatccttcccttttctacaagttaatttttttacaaatcatttgggttatctcctaaataggttatattttattgcttctagaaacaatgtttcaaaatatatgtgcattatcagtaataatttgtataaatatttcccacaacaattttcataattttcaaagactaatttcttgactgaagatattttgctagggaagtgaaactttaaaattttgtagattttaaaaaatattgttgaatggtgtcatgcaaaggatttatatagtgtgctcccactaactgtacagatcaggacacatatttttagacatctaagtctgtagcttaaatggaggttactcttccatcatctagaattgtttacttagtaattgttgtttcttttattattatagacttactatcagttttattttgccaagtatgcaacaggtatatcactagtatatgaaaatgtaaatatcacttgtgtactcaaacaaaagttggtcttaagcttccaccttgagcagccttggaaacctaacctgcctcttttagcataatcacattttctaaatgattttctttgttcctgaaaaagtgatttgtattagttttacatttgttttttggaagattatatttgtatatgtatcatcataaaatatttaaataaaaagtatc

SEQ ID NO: 1511 - DNA, 1227 bp, Homo sapiens
atctagaggagggccgtctgtgaggccactacccctccagcaactgggaggtgggactgtcagaagctggcccagggtggtggtcagctgggtcagggacctacggcacctgctggaccacctcgccttctccatcgaagcagggaagtgggagcctcgagccctcgggtggaagctgaccccaagccacccttcacctggacaggatgagagtgtcaggtgtgcttcgcctcctggccctcatctttgccatagtcacgacatggatgtttattcgaagctacatgagcttcagcatgaaaaccatccgtctgccacgctggctggcagcctcgcccaccaaggagatccaggttaaaaagtacaagtgtggcctcatcaagccctgcccagccaactactttgcgtttaaaatctgcagtggggccgccaacgtcgtgggccctactatgtgctttgaagaccgcatgatcatgagtcctgtgaaaaacaatgtgggcagaggcctaaacatcgccctggtgaatggaaccacgggagctgtgctgggacagaaggcatttgacatgtactctggagatgttatgcacctagtgaaattccttaaagaaattccggggggtgcactggtgctggtggcctcctacgacgatccagggaccaaaatgaacgatgaaagcaggaaactcttctctgacttggggagttcctacgcaaaacaactgggcttccgggacagctgggtcttcataggagccaaagacctcaggggtaaaagcccctttgagcagttcttaaagaacagcccagacacaaacaaatacgagggatggccagagctgctggagatggagggctgcatgcccccgaagccattttagggtggctgtggctcttcctcagccaggggcctgaagaagctcctgcctgacttaggagtcagagcccggcaggggctgaggaggaggagcagggggtgctgcgtggaaggtgctgcaggtccttgcacgctgtgtcgcgcctctcctcctcggaaacagaaccctcccacagcacatcctacccggaagaccagcctcagagggtccttctggaaccagctgtctgtggagagaatggggtgctttcgtcagggactgctgacggctggtcctgaggaaggacaaactgcccagacttgagcccaattaaattttatttttgctggttttgaaaaaaaaaaaaaaa

SEQ ID NO: 1512 - DNA, 1308 bp, Homo sapiens
acttcctcaaaggaggggcagagcctgcgcagggcaggagcagctggcccactggcggcccgcaacactccgtctcaccctctgggcccactgcatctagaggagggccgtctgtgaggccactacccctccagcaactgggaggtgggactgtcagaagctggcccagggtggtggtcagctgggtcagggacctacggcacctgctggaccacctcgccttctccatcgaagcagggaagtgggagcctcgagccctcgggtggaagctgaccccaagccacccttcacctggacaggatgagagtgtcaggtgtgcttcgcctcctggccctcatctttgccatagtcacgacatggatgtttattcgaagctacatgagcttcagcatgaaaaccatccgtctgccacgctggctggcagcctcgcccaccaaggagatccaggttaaaaagtacaagtgtggcctcatcaagccctgcccagccaactactttgcgtttaaaatctgcagtggggccgccaacgtcgtgggccctactatgtgctttgaagaccgcatgatcatgagtcctgtgaaaaacaatgtgggcagaggcctaaacatcgccctggtgaatggaaccacgggagctgtgctgggacagaaggcatttgacatgtactctggagatgttatgcacctagtgaaattccttaaagaaattccggggggtgcactggtgctggtggcctcctacgacgatccagggaccaaaatgaacgatgaaagcaggaaactcttctctgacttggggagttcctacgcaaaacaactgggcttccgggacagctgggtcttcataggagccaaagacctcaggggtaaaagcccctttgagcagttcttaaagaacagcccagacacaaacaaatacgagggatggccagagctgctggagatggagggctgcatgcccccgaagccattttagggtggctgtggctcttcctcagccaggggcctgaagaagctcctgcctgacttaggagtcagagcccggcaggggctgaggaggaggagcagggggtgctgcgtggaaggtgctgcaggtccttgcacgctgtgtcgcgcctctcctcctcggaaacagaaccctcccacagcacatcctacccggaagaccagcctcagagggtccttctggaaccagctgtctgtggagagaatggggtgctttcgtcagggactgctgacggctggtcctgaggaaggacaaactgcccagacttgagcccaattaaattttatttttgctggttttgaa

SEQ ID NO: 1513 - DNA, 2337 bp, Homo sapiens
atggctcgtgcagggtggactggcctccttccactatatgtgtgtctactgctgacctgtggctttgccaaggcagggaagctgctggtagtgcccatggatgggagccactggttcaccatgcagtcggtggtggagaaactcatcctcagggggcatgaggtggtcgtagtcatgccagaggtgagttggcaactgggaagatcactgaattgcacagtgaagacttactcaacctcatacactctggaggatcaggaccgggagttcatggtttttgccgatgctcgctggacggcaccattgcgaagtgcattttctctattaacaagttcatccaatggtatttttgacttatttttttcaaattgcaggagtttgtttaaggacaaaaaattagtagaatacttaaaggagagttgttttgatgcagtgtttctcgatccttttgatgcctgtggcttaattgttgccaaatatttctccctcccctctgtggtcttcgccaggggaatattttgccactatcttgaagaaggtgcacagtgccctgctcctctttcctatgtccccagacttctcttagggttctcagacgccatgactttcaaggagagagtatggaaccacatcatgcacttggaggaacatttattttgcccctattttttcaaaaatgtcttagaaatagcctctgaaattctccaaacccctgtcacggcatatgatctctacagccacacatcaatttggttgttgcgaactgactttgttttggagtatcccaaacccgtgatgcccaatatgatcttcattggtggtatcaactgtcatcagggaaagccagtgcctatggaatttgaagcctacattaatgcttctggagaacatggaattgtggttttctctttgggatcaatggtctcagaaattccagagaagaaagctatggcaattgctgatgctttgggcaaaatccctcagacagtcctgtggcggtacactggaacccgaccatcgaatcttgcgaacaacacgatacttgttaagtggctaccccaaaacgatctgcttggtcacccgatgacccgtgcctttatcacccatgctggttcccatggtgtttatgaaagcatatgcaatggcgttcccatggtgatgatgcccttgtttggtgatcagatggacaatgcaaagcgcatggagactaagggagctggagtgaccctgaatgttctggaaatgacttctgaagatttagaaaatgctctaaaagcagtcatcaatgacaaaagttacaaggagaacatcatgcgcctctccagccttcacaaggaccgcccggtggagccgctggacctggccgtgttctgggtggagtttgtgatgaggcacaagggcgcgccacacctgcgccccgcagcccacgacctcacctggtaccagtaccattccttggacgtgattggtttcctcttggccgtcgtgctgacagtggccttcatcacctttaaatgttgtgcttatggctaccggaaatgcttggggaaaaaagggcgagttaagaaagcccacaaatccaagacccattgagaagtgggtgggaaataaggtaaaattttgaaccattccctagtcatttccaaacttgaaaacagaatcagtgttaaattcattttattcttattaaggaaatactttgcataaattaatcagccccagagtgctttaaaaaattctcttaaataaaaataatagactcgctagtcagtaaagatatttgaatatgtatcgtgccccctccggtgtctttgatcaggatgacatgtgccatttttcagaggacgtgcagacaggctggcattctagattacttttcttactctgaaacatggcctgtttgggagtgcgggattcaaaggtggtcccaccgctgcccctactgcaaatggcagttttaatcttatcttttggcttctgcagatggttgcaattgatccttaaccaataatggtcagtcctcatctctgtcgtgcttcataggtgccaccttgtgtgtttaaagaagggaagctttgtacctttagagtgtaggtgaaatgaatgaatggcttggagtgcactgagaacagcatatgatttcttgctttggggaaaaagaatgatgctatgaaattggtgggtggtgtatttgagaagataatcattgcttatgtcaaatggagctgaatttgataaaaacccaaaatacagctatgaagtgctgggcaagtttactttttttctgatgtttcctacaactaaaaataaattaataaatttatataaattctattt

SEQ ID NO: 1514 - DNA, 2439 bp, Homo sapiens
gaaaagcagtggttagtttagggaaaatacctaggagccctgtgatttggagagtgaaaactctttattaccgttgttactttaactctttccaggatggcctgcctccttcgctcatttcagagaatttctgcaggggttttcttcttagcactttggggcatggttgtaggtgacaagctgctggtggtccctcaggacggaagccactggcttagtatgaaggatatagttgaggttctcagtgaccggggtcatgagattgtagtggtggtgcctgaagttaatttgcttttgaaagaatccaaatactacacaagaaaaatctatccagtgccgtatgaccaagaagagctgaagaaccgttaccaatcatttggaaacaatcactttgctgagcgatcattcctaactgctcctcagacagagtacaggaataacatgattgttattggcctgtacttcatcaactgccagagcctcctgcaggacagggacaccctgaacttctttaaggagagcaagtttgatgctcttttcacagacccagccttaccctgtggggtgatcctggctgagtatttgggcctaccatctgtgtacctcttcaggggttttccgtgttccctggagcatacattcagcagaagcccagaccctgtgtcctacattcccaggtgctacacaaagttttcagaccacatgactttttcccaacgagtggccaacttccttgttaatttgttggagccctatctattttattgtctgttttcaaagtatgaagaactcgcatcagctgtcctcaagagagatgtggatataatcaccttatatcagaaggtctctgtttggctgttaagatatgactttgtgcttgaatatcctaggccggtcatgcccaacatggtcttcattggaggtatcaactgtaagaagaggaaagacttgtctcaggaatttgaagcctacattaatgcttctggagaacatggaattgtggttttctctttgggatcaatggtctcagaaattccagagaagaaagctatggcaattgctgatgctttgggcaaaatccctcagacagtcctgtggcggtacactggaacccgaccatcgaatcttgcgaacaacacgatacttgttaagtggctaccccaaaacgatctgcttggtcacccgatgacccgtgcctttatcacccatgctggttcccatggtgtttatgaaagcatatgcaatggcgttcccatggtgatgatgcccttgtttggtgatcagatggacaatgcaaagcgcatggagactaagggagctggagtgaccctgaatgttctggaaatgacttctgaagatttagaaaatgctctaaaagcagtcatcaatgacaaaagttacaaggagaacatcatgcgcctctccagccttcacaaggaccgcccggtggagccgctggacctggccgtgttctgggtggagtttgtgatgaggcacaagggcgcgccacacctgcgccccgcagcccacgacctcacctggtaccagtaccattccttggacgtgattggtttcctcttggccgtcgtgctgacagtggccttcatcacctttaaatgttgtgcttatggctaccggaaatgcttggggaaaaaagggcgagttaagaaagcccacaaatccaagacccattgagaagtgggtgggaaataaggtaaaattttgaaccattccctagtcatttccaaacttgaaaacagaatcagtgttaaattcattttattcttattaaggaaatactttgcataaattaatcagccccagagtgctttaaaaaattctcttaaataaaaataatagactcgctagtcagtaaagatatttgaatatgtatcgtgccccctccggtgtctttgatcaggatgacatgtgccatttttcagaggacgtgcagacaggctggcattctagattacttttcttactctgaaacatggcctgtttgggagtgcgggattcaaaggtggtcccaccgctgcccctactgcaaatggcagttttaatcttatcttttggcttctgcagatggttgcaattgatccttaaccaataatggtcagtcctcatctctgtcgtgcttcataggtgccaccttgtgtgtttaaagaagggaagctttgtacctttagagtgtaggtgaaatgaatgaatggcttggagtgcactgagaacagcatatgatttcttgctttggggaaaaagaatgatgctatgaaattggtgggtggtgtatttgagaagataatcattgcttatgtcaaatggagctgaatttgataaaaacccaaaatacagctatgaagtgctgggcaagtttactttttttctgatgtttcctacaactaaaaataaattaataaatttatataaattctattt

SEQ ID NO: 1515 - DNA, 2399 bp, Homo sapiens
atagcagcttagaatcccagctgctggctcgggctgcagttctctcatggctcgcgcagggtggaccagccccgttcctttatgtgtgtgtctactgctgacctgtggctttgccgaggcagggaagctgctggtagtgcccatggatgggagtcactggttcaccatgcagtcggtggtggagaaacttatcctcagggggcatgaggtggttgtagtcatgccagaggtgagttggcaactggaaagatcactgaattgcacagtgaagacttactcaacctcgtacactctggaagatcagaaccgggaattcatggttttcgcccatgctcaatggaaagcacaggcacaaagtatattttctctattaatgagttcatccagtggttttcttgacttatttttttcgcattgcaggagtttgtttaatgaccgaaaattagtagaatacttaaaggagagttcttttgatgcagtgtttctggatccttttgatacctgtggcttaattgttgctaaatatttctccctcccctctgtggtcttcaccaggggaatattttgccaccatcttgaagaaggtgcacagtgccctgctcctctttcctatgtccccaatgatctcttagggttctcagatgccatgactttcaaggagagagtatggaaccacatcgtgcacttggaggaccatttattttgccagtatctttttagaaatgccctagaaatagcctctgaaattctccaaacccctgtcacggcatatgatctctacagtcacacatcaatttggttgttgcgaacggactttgttttggactatcccaaacccgtgatgcccaacatgatcttcattggtggtatcaactgtcatcagggaaagccattgcctatggaatttgaagcctacattaatgcttctggagaacatggaattgtggttttctctttgggatcaatggtctcagaaattccagagaagaaagctatggcaattgctgatgctttgggcaaaatccctcagacagtcctgtggcggtacactggaacccgaccatcgaatcttgcgaacaacacgatacttgttaagtggctaccccaaaacgatctgcttggtcacccgatgacccgtgcctttatcacccatgctggttcccatggtgtttatgaaagcatatgcaatggcgttcccatggtgatgatgcccttgtttggtgatcagatggacaatgcaaagcgcatggagactaagggagctggagtgaccctgaatgttctggaaatgacttctgaagatttagaaaatgctctaaaagcagtcatcaatgacaaaagttacaaggagaacatcatgcgcctctccagccttcacaaggaccgcccggtggagccgctggacctggccgtgttctgggtggagtttgtgatgaggcacaagggcgcgccacacctgcgccccgcagcccacgacctcacctggtaccagtaccattccttggacgtgattggtttcctcttggccgtcgtgctgacagtggccttcatcacctttaaatgttgtgcttatggctaccggaaatgcttggggaaaaaagggcgagttaagaaagcccacaaatccaagacccattgagaagtgggtgggaaataaggtaaaattttgaaccattccctagtcatttccaaacttgaaaacagaatcagtgttaaattcattttattcttattaaggaaatactttgcataaattaatcagccccagagtgctttaaaaaattctcttaaataaaaataatagactcgctagtcagtaaagatatttgaatatgtatcgtgccccctctggtgtctttgatcaggatgacatgtgccatttttcagaggacgtgcagacaggctggcattctagattacttttcttactctgaaacatggcctgtttgggagtgcgggattcaaaggtggtcccacggctgcccctactgcaaatggcagttttaatcttatcttttggcttctgcagatggttgcaattgatccttaaccaataatggtcagtcctcatctctgtcgtgcttcataggtgccaccttgtgtgtttaaagaagggaagctttgtacctttagagtgtaggtgaaatgaatgaatggcttggagtgcactgagaacagcatatgatttcttgctttggggaaaaagaatgatgctatgaaattggtgggtggtgtatttgagaagataatcattgcttatgtcaaatggagctgaatttgataaaaacccaaaatacagctatgaagtgctgggcaagtttactttttttctgatgtttcctacaactaaaaataaattaataaatttatataaattctatttaaaaaaaaaaaaaaaa

SEQ ID NO: 1516 - DNA, 2378 bp, Homo sapiens
acagtcagctgtcggtggcttctgctgagatggccagaggactccaggttcccctgccgcggctggccacaggactgctgctcctcctcagtgtccagccctgggctgagagtggaaaggtgttggtggtgcccactgatggcagcccctggctcagcatgcgggaggccttgcgggagctccatgccagaggccaccaggcggtggtcctcaccccagaggtgaatatgcacatcaaagaagagaaatttttcaccctgacagcctatgctgttccatggacccagaaggaatttgatcgcgttacgctgggctacactcaagggttctttgaaacagaacatcttctgaagagatattctagaagtatggcaattatgaacaatgtatctttggcccttcataggtgttgtgtggagctactgcataatgaggccctgatcaggcacctgaatgctacttcctttgatgtggttttaacagaccccgttaacctctgcggggcggtgctggctaagtacctgtcgattcctgctgtgtttttttggaggtacattccatgtgacttagactttaagggcacacagtgtccaaatccttcctcctatattcctaagttactaacgaccaattcagaccacatgacattcctgcaaagggtcaagaacatgctctaccctctggccctgtcctacatttgccatactttttctgccccttatgcaagtcttgcctctgagctttttcagagagaggtgtcagtggtggatcttgtcagctatgcatccgtgtggctgttccgaggggactttgtgatggactaccccaggccgatcatgcccaacatggtcttcattgggggcatcaactgtgccaacgggaagccactatctcaggaatttgaagcctacattaatgcttctggagaacatggaattgtggttttctctttgggatcaatggtctcagaaattccagagaagaaagctatggcaattgctgatgctttgggcaaaatccctcagacagtcctgtggcggtacactggaacccgaccatcgaatcttgcgaacaacacgatacttgttaagtggctaccccaaaacgatctgcttggtcacccgatgacccgtgcctttatcacccatgctggttcccatggtgtttatgaaagcatatgcaatggcgttcccatggtgatgatgcccttgtttggtgatcagatggacaatgcaaagcgcatggagactaagggagctggagtgaccctgaatgttctggaaatgacttctgaagatttagaaaatgctctaaaagcagtcatcaatgacaaaagttacaaggagaacatcatgcgcctctccagccttcacaaggaccgcccggtggagccgctggacctggccgtgttctgggtggagtttgtgatgaggcacaagggcgcgccacacctgcgccccgcagcccacgacctcacctggtaccagtaccattccttggacgtgattggtttcctcttggccgtcgtgctgacagtggccttcatcacctttaaatgttgtgcttatggctaccggaaatgcttggggaaaaaagggcgagttaagaaagcccacaaatccaagacccattgagaagtgggtgggaaataaggtaaaattttgaaccattccctagtcatttccaaacttgaaaacagaatcagtgttaaattcattttattcttattaaggaaatactttgcataaattaatcagccccagagtgctttaaaaaattctcttaaataaaaataatagactcgctagtcagtaaagatatttgaatatgtatcgtgccccctccggtgtctttgatcaggatgacatgtgccatttttcagaggacgtgcagacaggctggcattctagattacttttcttactctgaaacatggcctgtttgggagtgcgggattcaaaggtggtcccaccgctgcccctactgcaaatggcagttttaatcttatcttttggcttctgcagatggttgcaattgatccttaaccaataatggtcagtcctcatctctgtcgtgcttcataggtgccaccttgtgtgtttaaagaagggaagctttgtacctttagagtgtaggtgaaatgaatgaatggcttggagtgcactgagaacagcatatgatttcttgctttggggaaaaagaatgatgctatgaaattggtgggtggtgtatttgagaagataatcattgcttatgtcaaatggagctgaatttgataaaaacccaaaatacagctatgaagtgctgggcaagtttactttttttctgatgtttcctacaactaaaaataaattaataaatttatataaattctattt

SEQ ID NO: 1517 - DNA, 2333 bp, Homo sapiens
atggctcgtgcagggtggactggcctccttcccctatatgtgtgtctactgctgacctgtggctttgccaaggcagggaagctgctggtagtgcccatggatgggagccactggttcaccatgcagtcggtggtggagaaactcatcctcagggggcatgaggtggtcgtagtcatgccagaggtgagttggcaactgggaagatcactgaattgcacagtgaagacttactcaacctcatacactctggaggatcaggaccgggagttcatggtttttgccgatgctcgctggacggcaccattgcgaagtgcattttctctattaacaagttcatccaatggtatttttgacttatttttttcaaattgcaggagtttgtttaatgaccgaaaattagtagaatacttaaaggagagttgttttgatgcagtgtttctcgatccttttgatgcctgtggcttaattgttgccaaatatttctccctcccctctgtggtcttcgccaggggaatattttgccactatcttgaagaaggtgcacagtgccctgctcctctttcctatgtccccagacttctcttagggttctcagacgccatgactttcaaggagagagtatggaaccacatcatgcacttggaggaacatttattttgcccctattttttcaaaaatgtcttagaaatagcctctgaaattctccaaacccctgtcacggcatatgatctctacagccacacatcaatttggttgttgcgaactgactttgttttggagtatcccaaacccgtgatgcccaatatgatcttcattggtggtatcaactgtcatcagggaaagccagtgcctatggaatttgaagcctacattaatgcttctggagaacatggaattgtggttttctctttgggatcaatggtctcagaaattccagagaagaaagctatggcaattgctgatgctttgggcaaaatccctcagacagtcctgtggcggtacactggaacccgaccatcgaatcttgcgaacaacacgatacttgttaagtggctaccccaaaacgatctgcttggtcacccgatgacccgtgcctttatcacccatgctggttcccatggtgtttatgaaagcatatgcaatggcgttcccatggtgatgatgcccttgtttggtgatcagatggacaatgcaaagcgcatggagactaagggagctggagtgaccctgaatgttctggaaatgacttctgaagatttagaaaatgctctaaaagcagtcatcaatgacaaaagttacaaggagaacatcatgcgcctctccagccttcacaaggaccgcccggtggagccgctggacctggccgtgttctgggtggagtttgtgatgaggcacaagggcgcgccacacctgcgccccgcagcccacgacctcacctggtaccagtaccattccttggacgtgattggtttcctcttggccgtcgtgctgacagtggccttcatcacctttaaatgttgtgcttatggctaccggaaatgcttggggaaaaaagggcgagttaagaaagcccacaaatccaagacccattgagaagtgggtgggaaataaggtaaaattttgaaccattccctagtcatttccaaacttgaaaacagaatcagtgttaaattcattttattcttattaaggaaatactttgcataaattaatcagccccagagtgctttaaaaaattctcttaaataaaaataatagactcgctagtcagtaaagatatttgaatatgtatcgtgccccctctggtgtctttgatcaggatgacatgtgccatttttcagaggacgtgcagacaggctggcattctagattacttttcttactctgaaacatggcctgtttgggagtgcgggattcaaaggtggtcccacggctgcccctactgcaaatggcagttttaatcttatcttttggcttctgcagatggttgcaattgatccttaaccaataatggtcagtcctcatctctgtcgtgcttcataggtgccaccttgtgtgtttaaagaagggaagctttgtacctttagagtgtaggtgaaatgaatgaatggcttggagtgcactgagaacagcatatgatttcttgctttggggaaaaagaatgatgctatgaaattggtgggtggtgtatttgagaagataatcattgcttatgtcaaatggagctgaatttgataaaaacccaaaatacagctatgaagtgctgggcaagtttactttttttctgatgtttcctacaactaaaaataaattaataaatttatataaattct

SEQ ID NO: 1518 - DNA, 2400 bp, Homo sapiens
cttccgcctactgtatcatagcagcttagaatcccagctgctggctcgggctgcagttctctcatggctcgcacagggtggaccagccccattcccctatgtgtttctctgctgctgacctgtggctttgctgaggcagggaagctgctggtagtgcccatggatgggagtcactggttcaccatgcagtcggtggtggagaaacttatcctcagggggcatgaggtggttgtagtcatgccagaggtgagttggcaactgggaaaatcactgaattgcacagtgaagacttactcaacctcatacactctggaggatctggaccgggaattcatggatttcgccgatgctcaatggaaagcacaagtacgaagtttgttttctctatttctgagttcatccaatggtttttttaacttatttttttcgcattgcaggagtttgtttaatgaccgaaaattagtagaatacttaaaggagagttcttttgatgcggtgtttcttgatccttttgatgcctgtggcttaattgttgccaaatatttctccctcccctctgtggtcttcgccaggggaatagcttgccactatcttgaagaaggtgcacagtgccctgctcctctttcctatgtccccagaattctcttagggttctcagatgccatgactttcaaggagagagtacggaaccacatcatgcacttggaggaacatttattttgccagtatttttccaaaaatgccctagaaatagcctctgaaattctccaaacacctgtcacagcatatgatctctacagccacacatcaatttggttgttgcgaacagactttgttttggactatcccaaacccgtgatgcccaatatgatcttcattggtggtatcaactgccatcagggaaagccattgcctatggaatttgaagcctacattaatgcttctggagaacatggaattgtggttttctctttgggatcaatggtctcagaaattccagagaagaaagctatggcaattgctgatgctttgggcaaaatccctcagacagtcctgtggcggtacactggaacccgaccatcgaatcttgcgaacaacacgatacttgttaagtggctaccccaaaacgatctgcttggtcacccgatgacccgtgcctttatcacccatgctggttcccatggtgtttatgaaagcatatgcaatggcgttcccatggtgatgatgcccttgtttggtgatcagatggacaatgcaaagcgcatggagactaagggagctggagtgaccctgaatgttctggaaatgacttctgaagatttagaaaatgctctaaaagcagtcatcaatgacaaaagttacaaggagaacatcatgcgcctctccagccttcacaaggaccgcccggtggagccgctggacctggccgtgttctgggtggagtttgtgatgaggcacaagggcgcgccacacctgcgccccgcagcccacgacctcacctggtaccagtaccattccttggacgtgattggtttcctcttggccgtcgtgctgacagtggccttcatcacctttaaatgttgtgcttatggctaccggaaatgcttggggaaaaaagggcgagttaagaaagcccacaaatccaagacccattgagaagtgggtgggaaataaggtaaaattttgaaccattccctagtcatttccaaacttgaaaacagaatcagtgttaaattcattttattcttattaaggaaatactttgcataaattaatcagccccagagtgctttaaaaaattctcttaaataaaaataatagactcgctagtcagtaaagatatttgaatatgtatcgtgccccctccggtgtctttgatcaggatgacatgtgccatttttcagaggacgtgcagacaggctggcattctagattacttttcttactctgaaacatggcctgtttgggagtgcgggattcaaaggtggtcccaccgctgcccctactgcaaatggcagttttaatcttatcttttggcttctgcagatggttgcaattgatccttaaccaataatggtcagtcctcatctctgtcgtgcttcataggtgccaccttgtgtgtttaaagaagggaagctttgtacctttagagtgtaggtgaaatgaatgaatggcttggagtgcactgagaacagcatatgatttcttgctttggggaaaaagaatgatgctatgaaattggtgggtggtgtatttgagaagataatcattgcttatgtcaaatggagctgaatttgataaaaacccaaaatacagctatgaagtgctgggcaagtttactttttttctgatgtttcctacaactaaaaataaattaataaatttatataaattctattt

SEQ ID NO: 1519 - DNA, 2388 bp, Homo sapiens
ataagtaggagagggcgaacctctggcaggagcaaaggcgccatggctgtggagtcccagggcggacgcccacttgtcctgggcctgctgctgtgtgtgctgggcccagtggtgtcccatgctgggaagatactgttgatcccagtggatggcagccactggctgagcatgcttggggccatccagcagctgcagcagaggggacatgaaatagttgtcctagcacctgacgcctcgttgtacatcagagacggagcattttacaccttgaagacgtaccctgtgccattccaaagggaggatgtgaaagagtcttttgttagtctcgggcataatgtttttgagaatgattctttcctgcagcgtgtgatcaaaacatacaagaaaataaaaaaggactctgctatgcttttgtctggctgttcccacttactgcacaacaaggagctcatggcctccctggcagaaagcagctttgatgtcatgctgacggaccctttccttccttgcagccccatcgtggcccagtacctgtctctgcccactgtattcttcttgcatgcactgccatgcagcctggaatttgaggctacccagtgccccaacccattctcctacgtgcccaggcctctctcctctcattcagatcacatgaccttcctgcagcgggtgaagaacatgctcattgccttttcacagaactttctgtgcgacgtggtttattccccgtatgcaacccttgcctcagaattccttcagagagaggtgactgtccaggacctattgagctctgcatctgtctggctgtttagaagtgactttgtgaaggattaccctaggcccatcatgcccaatatggtttttgttggtggaatcaactgccttcaccaaaatccactatcccaggaatttgaagcctacattaatgcttctggagaacatggaattgtggttttctctttgggatcaatggtctcagaaattccagagaagaaagctatggcaattgctgatgctttgggcaaaatccctcagacagtcctgtggcggtacactggaacccgaccatcgaatcttgcgaacaacacgatacttgttaagtggctaccccaaaacgatctgcttggtcacccgatgacccgtgcctttatcacccatgctggttcccatggtgtttatgaaagcatatgcaatggcgttcccatggtgatgatgcccttgtttggtgatcagatggacaatgcaaagcgcatggagactaagggagctggagtgaccctgaatgttctggaaatgacttctgaagatttagaaaatgctctaaaagcagtcatcaatgacaaaagttacaaggagaacatcatgcgcctctccagccttcacaaggaccgcccggtggagccgctggacctggccgtgttctgggtggagtttgtgatgaggcacaagggcgcgccacacctgcgccccgcagcccacgacctcacctggtaccagtaccattccttggacgtgattggtttcctcttggccgtcgtgctgacagtggccttcatcacctttaaatgttgtgcttatggctaccggaaatgcttggggaaaaaagggcgagttaagaaagcccacaaatccaagacccattgagaagtgggtgggaaataaggtaaaattttgaaccattccctagtcatttccaaacttgaaaacagaatcagtgttaaattcattttattcttattaaggaaatactttgcataaattaatcagccccagagtgctttaaaaaattctcttaaataaaaataatagactcgctagtcagtaaagatatttgaatatgtatcgtgccccctccggtgtctttgatcaggatgacatgtgccatttttcagaggacgtgcagacaggctggcattctagattacttttcttactctgaaacatggcctgtttgggagtgcgggattcaaaggtggtcccaccgctgcccctactgcaaatggcagttttaatcttatcttttggcttctgcagatggttgcaattgatccttaaccaataatggtcagtcctcatctctgtcgtgcttcataggtgccaccttgtgtgtttaaagaagggaagctttgtacctttagagtgtaggtgaaatgaatgaatggcttggagtgcactgagaacagcatatgatttcttgctttggggaaaaagaatgatgctatgaaattggtgggtggtgtatttgagaagataatcattgcttatgtcaaatggagctgaatttgataaaaacccaaaatacagctatgaagtgctgggcaagtttactttttttctgatgtttcctacaactaaaaataaattaataaatttatataaattctattt

SEQ ID NO: 1520 - DNA, 2345 bp, Homo sapiens
atggccacaggactccaggttcccctgccgcagctggccacaggactgctgcttctcctcagtgtccagccctgggctgagagtgggaaggtgctggtggtgcccactgatggcagccactggctcagcatgcgggaggccttgcgggacctccatgcgagaggccaccaggtggtggtcctcaccctggaggtgaatatgtacatcaaagaagagaactttttcaccctgacaacgtatgccatttcatggacccaggacgaatttgatcgccttttgctgggtcacactcaatcgttctttgaaacagaacatcttctgatgaaattttctagaagaatggcaattatgaacaatatgtctttgatcatacataggtcttgtgtggagctactgcataatgaggccctgatcaggcacctgcatgctacttcctttgatgtggttctaacagacccctttcacctctgcgcggcggtgctggctaagtacctgtcgattcctgctgtgtttttcttgaggaacattccatgtgatttagactttaagggcacacagtgtccaaacccttcctcctatattcctagattactaacgaccaattcagaccacatgacattcctgcaaagggtcaagaacatgctctaccctctggccctgtcctacctttgccatgctgtttctgctccttatgcaagccttgcctctgagctttttcagagagaggtgtcagtggtggatcttgtcagccatgcatctgtgtggctgttccgaggggactttgtgatggattaccccaggccgatcatgcccaacatggtcttcattgggggcatcaactgtgccaacgggaagccactatctcaggaatttgaagcctacattaatgcttctggagaacatggaattgtggttttctctttgggatcaatggtctcagaaattccagagaagaaagctatggcaattgctgatgctttgggcaaaatccctcagacagtcctgtggcggtacactggaacccgaccatcgaatcttgcgaacaacacgatacttgttaagtggctaccccaaaacgatctgcttggtcacccgatgacccgtgcctttatcacccatgctggttcccatggtgtttatgaaagcatatgcaatggcgttcccatggtgatgatgcccttgtttggtgatcagatggacaatgcaaagcgcatggagactaagggagctggagtgaccctgaatgttctggaaatgacttctgaagatttagaaaatgctctaaaagcagtcatcaatgacaaaagttacaaggagaacatcatgcgcctctccagccttcacaaggaccgcccggtggagccgctggacctggccgtgttctgggtggagtttgtgatgaggcacaagggcgcgccacacctgcgccccgcagcccacgacctcacctggtaccagtaccattccttggacgtgattggtttcctcttggccgtcgtgctgacagtggccttcatcacctttaaatgttgtgcttatggctaccggaaatgcttggggaaaaaagggcgagttaagaaagcccacaaatccaagacccattgagaagtgggtgggaaataaggtaaaattttgaaccattccctagtcatttccaaacttgaaaacagaatcagtgttaaattcattttattcttattaaggaaatactttgcataaattaatcagccccagagtgctttaaaaaattctcttaaataaaaataatagactcgctagtcagtaaagatatttgaatatgtatcgtgccccctctggtgtctttgatcaggatgacatgtgccatttttcagaggacgtgcagacaggctggcattctagattacttttcttactctgaaacatggcctgtttgggagtgcgggattcaaaggtggtcccacggctgcccctactgcaaatggcagttttaatcttatcttttggcttctgcagatggttgcaattgatccttaaccaataatggtcagtcctcatctctgtcgtgcttcataggtgccaccttgtgtgtttaaagaagggaagctttgtacctttagagtgtaggtgaaatgaatgaatggcttggagtgcactgagaacagcatatgatttcttgctttggggaaaaagaatgatgctatgaaattggtgggtggtgtatttgagaagataatcattgcttatgtcaaatggagctgaatttgataaaaacccaaaatacagctatgaagtgctgggcaagtttactttttttctgatgtttcctacaactaaaaataaattaataaatttatataaattct

SEQ ID NO: 1521 - DNA, 1691 bp, Homo sapiens
agaaacctgaagctcaggagaggagtcactcccctggcagatgggtggctgggccagaagcagataccaggctttctgactcctgctctaggattctcaccacgtactggctagacttatacttctcaaatcttaatttcctaaaggccggtcatgcccaacatggtcttcattggaggtatcaactgtaagaagaggaaagacttgtctcaggaatttgaagcctacattaatgcttctggagaacatggaattgtggttttctctttgggatcaatggtctcagaaattccagagaagaaagctatggcaattgctgatgctttgggcaaaatccctcagacagtcctgtggcggtacactggaacccgaccatcgaatcttgcgaacaacacgatacttgttaagtggctaccccaaaacgatctgcttggtcacccgatgacccgtgcctttatcacccatgctggttcccatggtgtttatgaaagcatatgcaatggcgttcccatggtgatgatgcccttgtttggtgatcagatggacaatgcaaagcgcatggagactaagggagctggagtgaccctgaatgttctggaaatgacttctgaagatttagaaaatgctctaaaagcagtcatcaatgacaaaagttacaaggagaacatcatgcgcctctccagccttcacaaggaccgcccggtggagccgctggacctggccgtgttctgggtggagtttgtgatgaggcacaagggcgcgccacacctgcgccccgcagcccacgacctcacctggtaccagtaccattccttggacgtgattggtttcctcttggccgtcgtgctgacagtggccttcatcacctttaaatgttgtgcttatggctaccggaaatgcttggggaaaaaagggcgagttaagaaagcccacaaatccaagacccattgagaagtgggtgggaaataaggtaaaattttgaaccattccctagtcatttccaaacttgaaaacagaatcagtgttaaattcattttattcttattaaggaaatactttgcataaattaatcagccccagagtgctttaaaaaattctcttaaataaaaataatagactcgctagtcagtaaagatatttgaatatgtatcgtgccccctctggtgtctttgatcaggatgacatgtgccatttttcagaggacgtgcagacaggctggcattctagattacttttcttactctgaaacatggcctgtttgggagtgcgggattcaaaggtggtcccacggctgcccctactgcaaatggcagttttaatcttatcttttggcttctgcagatggttgcaattgatccttaaccaataatggtcagtcctcatctctgtcgtgcttcataggtgccaccttgtgtgtttaaagaagggaagctttgtacctttagagtgtaggtgaaatgaatgaatggcttggagtgcactgagaacagcatatgatttcttgctttggggaaaaagaatgatgctatgaaattggtgggtggtgtatttgagaagataatcattgcttatgtcaaatggagctgaatttgataaaaacccaaaatacagctatgaagtgctgggcaagtttactttttttctgatgtttcctacaactaaaaataaattaataaatttatataaattct

SEQ ID NO: 1522 - DNA, 2406 bp, Homo sapiens
gtacttcttccgcctactgtatcatagcagcttagaatcccagctgctggctcgggctgcagttctctcatggctcgcgcagggtggaccagccccgttcctttatgtgtgtgtctactgctgacctgtggctttgccgaggcagggaagctgctggtagtgcccatggatgggagtcactggttcaccatgcagtcggtggtggagaaacttatcctcagggggcatgaggtggttgtagtcatgccagaggtgagttggcaactggaaagatcactgaattgcacagtgaagacttactcaacctcgtacactctggaagatcagaaccgggaattcatggttttcgcccatgctcaatggaaagcacaggcacaaagtatattttctctattaatgagttcatccagtggttttcttgacttatttttttcgcattgcaggagtttgtttaatgaccgaaaattagtagaatacttaaaggagagttcttttgatgcagtgtttctggatccttttgatacctgtggcttaattgttgctaaatatttctccctcccctctgtggtcttcaccaggggaatattttgccaccatcttgaagaaggtgcacagtgccctgctcctctttcctatgtccccaatgatctcttagggttctcagatgccatgactttcaaggagagagtatggaaccacatcgtgcacttggaggaccatttattttgccagtatctttttagaaatgccctagaaatagcctctgaaattctccaaacccctgtcacggcatatgatctctacagtcacacatcaatttggttgttgcgaacggactttgttttggactatcccaaacccgtgatgcccaacatgatcttcattggtggtatcaactgtcatcagggaaagccattgcctatggaatttgaagcctacattaatgcttctggagaacatggaattgtggttttctctttgggatcaatggtctcagaaattccagagaagaaagctatggcaattgctgatgctttgggcaaaatccctcagacagtcctgtggcggtacactggaacccgaccatcgaatcttgcgaacaacacgatacttgttaagtggctaccccaaaacgatctgcttggtcacccgatgacccgtgcctttatcacccatgctggttcccatggtgtttatgaaagcatatgcaatggcgttcccatggtgatgatgcccttgtttggtgatcagatggacaatgcaaagcgcatggagactaagggagctggagtgaccctgaatgttctggaaatgacttctgaagatttagaaaatgctctaaaagcagtcatcaatgacaaaagttacaaggagaacatcatgcgcctctccagccttcacaaggaccgcccggtggagccgctggacctggccgtgttctgggtggagtttgtgatgaggcacaagggcgcgccacacctgcgccccgcagcccacgacctcacctggtaccagtaccattccttggacgtgattggtttcctcttggccgtcgtgctgacagtggccttcatcacctttaaatgttgtgcttatggctaccggaaatgcttggggaaaaaagggcgagttaagaaagcccacaaatccaagacccattgagaagtgggtgggaaataaggtaaaattttgaaccattccctagtcatttccaaacttgaaaacagaatcagtgttaaattcattttattcttattaaggaaatactttgcataaattaatcagccccagagtgctttaaaaaattctcttaaataaaaataatagactcgctagtcagtaaagatatttgaatatgtatcgtgccccctccggtgtctttgatcaggatgacatgtgccatttttcagaggacgtgcagacaggctggcattctagattacttttcttactctgaaacatggcctgtttgggagtgcgggattcaaaggtggtcccaccgctgcccctactgcaaatggcagttttaatcttatcttttggcttctgcagatggttgcaattgatccttaaccaataatggtcagtcctcatctctgtcgtgcttcataggtgccaccttgtgtgtttaaagaagggaagctttgtacctttagagtgtaggtgaaatgaatgaatggcttggagtgcactgagaacagcatatgatttcttgctttggggaaaaagaatgatgctatgaaattggtgggtggtgtatttgagaagataatcattgcttatgtcaaatggagctgaatttgataaaaacccaaaatacagctatgaagtgctgggcaagtttactttttttctgatgtttcctacaactaaaaataaattaataaatttatataaattctattt

SEQ ID NO: 1523 - DNA, 2355 bp, Homo sapiens
gctgagatggccacaggactccaggttcccctgccgcagctggccacaggactgctgcttctcctcagtgtccagccctgggctgagagtgggaaggtgctggtggtgcccactgatggcagccactggctcagcatgcgggaggccttgcgggacctccatgcgagaggccaccaggtggtggtcctcaccctggaggtgaatatgtacatcaaagaagagaactttttcaccctgacaacgtatgccatttcatggacccaggacgaatttgatcgccttttgctgggtcacactcaatcgttctttgaaacagaacatcttctgatgaaattttctagaagaatggcaattatgaacaatatgtctttgatcatacataggtcttgtgtggagctactgcataatgaggccctgatcaggcacctgcatgctacttcctttgatgtggttctaacagacccctttcacctctgcgcggcggtgctggctaagtacctgtcgattcctgctgtgtttttcttgaggaacattccatgtgatttagactttaagggcacacagtgtccaaacccttcctcctatattcctagattactaacgaccaattcagaccacatgacattcctgcaaagggtcaagaacatgctctaccctctggccctgtcctacctttgccatgctgtttctgctccttatgcaagccttgcctctgagctttttcagagagaggtgtcagtggtggatcttgtcagccatgcatctgtgtggctgttccgaggggactttgtgatggactaccccaggccgatcatgcccaacatggtcttcattgggggcatcaactgtgccaacgggaagccactatctcaggaatttgaagcctacattaatgcttctggagaacatggaattgtggttttctctttgggatcaatggtctcagaaattccagagaagaaagctatggcaattgctgatgctttgggcaaaatccctcagacagtcctgtggcggtacactggaacccgaccatcgaatcttgcgaacaacacgatacttgttaagtggctaccccaaaacgatctgcttggtcacccgatgacccgtgcctttatcacccatgctggttcccatggtgtttatgaaagcatatgcaatggcgttcccatggtgatgatgcccttgtttggtgatcagatggacaatgcaaagcgcatggagactaagggagctggagtgaccctgaatgttctggaaatgacttctgaagatttagaaaatgctctaaaagcagtcatcaatgacaaaagttacaaggagaacatcatgcgcctctccagccttcacaaggaccgcccggtggagccgctggacctggccgtgttctgggtggagtttgtgatgaggcacaagggcgcgccacacctgcgccccgcagcccacgacctcacctggtaccagtaccattccttggacgtgattggtttcctcttggccgtcgtgctgacagtggccttcatcacctttaaatgttgtgcttatggctaccggaaatgcttggggaaaaaagggcgagttaagaaagcccacaaatccaagacccattgagaagtgggtgggaaataaggtaaaattttgaaccattccctagtcatttccaaacttgaaaacagaatcagtgttaaattcattttattcttattaaggaaatactttgcataaattaatcagccccagagtgctttaaaaaattctcttaaataaaaataatagactcgctagtcagtaaagatatttgaatatgtatcgtgccccctccggtgtctttgatcaggatgacatgtgccatttttcagaggacgtgcagacaggctggcattctagattacttttcttactctgaaacatggcctgtttgggagtgcgggattcaaaggtggtcccaccgctgcccctactgcaaatggcagttttaatcttatcttttggcttctgcagatggttgcaattgatccttaaccaataatggtcagtcctcatctctgtcgtgcttcataggtgccaccttgtgtgtttaaagaagggaagctttgtacctttagagtgtaggtgaaatgaatgaatggcttggagtgcactgagaacagcatatgatttcttgctttggggaaaaagaatgatgctatgaaattggtgggtggtgtatttgagaagataatcattgcttatgtcaaatggagctgaatttgataaaaacccaaaatacagctatgaagtgctgggcaagtttactttttttctgatgtttcctacaactaaaaataaattaataaatttatataaattctattt

SEQ ID NO: 1524 - DNA, 2394 bp, Homo sapiens
cttccgcctactgtatcatagcagcttagaatcccagctgctggctcgggctgcagttctctcatggctcgcacagggtggaccagccccattcccctatgtgtttctctgctgctgacctgtggctttgctgaggcagggaagctgctggtagtgcccatggatgggagtcactggttcaccatgcagtcggtggtggagaaacttatcctcagggggcatgaggtggttgtagtcatgccagaggtgagttggcaactgggaaaatcactgaattgcacagtgaagacttactcaacctcatacactctggaggatctggaccgggaattcatggatttcgccgatgctcaatggaaagcacaagtacgaagtttgttttctctatttctgagttcatccaatggtttttttaacttatttttttcgcattgcaggagtttgtttaatgaccgaaaattagtagaatacttaaaggagagttcttttgatgcggtgtttcttgatccttttgatgcctgtggcttaattgttgccaaatatttctccctcccctctgtggtcttcgccaggggaatagcttgccactatcttgaagaaggtgcacagtgccctgctcctctttcctatgtccccagaattctcttagggttctcagatgccatgactttcaaggagagagtacggaaccacatcatgcacttggaggaacatttattttgccagtatttttccaaaaatgccctagaaatagcctctgaaattctccaaacacctgtcacagcatatgatctctacagccacacatcaatttggttgttgcgaacagactttgttttggactatcccaaacccgtgatgcccaatatgatcttcattggtggtatcaactgccatcagggaaagccattgcctatggaatttgaagcctacattaatgcttctggagaacatggaattgtggttttctctttgggatcaatggtctcagaaattccagagaagaaagctatggcaattgctgatgctttgggcaaaatccctcagacagtcctgtggcggtacactggaacccgaccatcgaatcttgcgaacaacacgatacttgttaagtggctaccccaaaacgatctgcttggtcacccgatgacccgtgcctttatcacccatgctggttcccatggtgtttatgaaagcatatgcaatggcgttcccatggtgatgatgcccttgtttggtgatcagatggacaatgcaaagcgcatggagactaagggagctggagtgaccctgaatgttctggaaatgacttctgaagatttagaaaatgctctaaaagcagtcatcaatgacaaaagttacaaggagaacatcatgcgcctctccagccttcacaaggaccgcccggtggagccgctggacctggccgtgttctgggtggagtttgtgatgaggcacaagggcgcgccacacctgcgccccgcagcccacgacctcacctggtaccagtaccattccttggacgtgattggtttcctcttggccgtcgtgctgacagtggccttcatcacctttaaatgttgtgcttatggctaccggaaatgcttggggaaaaaagggcgagttaagaaagcccacaaatccaagacccattgagaagtgggtgggaaataaggtaaaattttgaaccattccctagtcatttccaaacttgaaaacagaatcagtgttaaattcattttattcttattaaggaaatactttgcataaattaatcagccccagagtgctttaaaaaattctcttaaataaaaataatagactcgctagtcagtaaagatatttgaatatgtatcgtgccccctccggtgtctttgatcaggatgacatgtgccatttttcagaggacgtgcagacaggctggcattctagattacttttcttactctgaaacatggcctgtttgggagtgcgggattcaaaggtggtcccaccgctgcccctactgcaaatggcagttttaatcttatcttttggcttctgcagatggttgcaattgatctcttaaccaataatggtcagtcctcatctctgtcctgcttcataggtgccaccttgtgtgtttaaagaagggaagctttgtacctttagagtgtaggtgaaatgaatgaatggcttggagtgcactgagaacagcatatgattttttgctttggggaaaaagaatgatgctatgaaattggtgggtggtgtatttgagaagataatcattgcttatgtcaaatggagctgaatttgataaaaacccaaaatacagctatgaagtgctgggcaagtttactttttttttgatgtttcctccaactaaaaataaattaataaatttatataaat

SEQ ID NO: 1525 - DNA, 2427 bp, Homo sapiens
tggggtcaggttttgtgctggtatttctcccacctactgtatcataggagcttagattcccagctgcttgctctcagctgcagttctctgatggcttgcacagggtggaccagcccccttcctctatgtgtgtgtctgctgctgacctgtggctttgccgaggcagggaagctactggtagtgcccatggatgggagccactggttcaccatgaggtcggtggtggagaaactcattctcagggggcatgaggtggttgtagtcatgccagaggtgagttggcaactgggaagatcactgaattgcacagtgaagacttattcaacttcatataccctggaggatctggaccgggagttcaaggcttttgcccatgctcaatggaaagcacaagtacgaagtatatattctctattaatgggttcatacaatgacatttttgacttatttttttcaaattgcaggagtttgtttaaagacaaaaaattagtagaatacttaaaggagagttcttttgatgcagtgtttctcgatccttttgataactgtggcttaattgttgccaaatatttctccctcccctccgtggtcttcgccaggggaatactttgccactatcttgaagaaggtgcacagtgccctgctcctctttcctatgtccccagaattctcttagggttctcagatgccatgactttcaaggagagagtacggaaccacatcatgcacttggaggaacatttattatgccaccgttttttcaaaaatgccctagaaatagcctctgaaattctccaaacacctgttacggagtatgatctctacagccacacatcaatttggttgttgcgaacggactttgttttggactatcccaaacccgtgatgcccaacatgatcttcattggtggtatcaactgccatcagggaaagccgttgcctatggaatttgaagcctacattaatgcttctggagaacatggaattgtggttttctctttgggatcaatggtctcagaaattccagagaagaaagctatggcaattgctgatgctttgggcaaaatccctcagacagtcctgtggcggtacactggaacccgaccatcgaatcttgcgaacaacacgatacttgttaagtggctaccccaaaacgatctgcttggtcacccgatgacccgtgcctttatcacccatgctggttcccatggtgtttatgaaagcatatgcaatggcgttcccatggtgatgatgcccttgtttggtgatcagatggacaatgcaaagcgcatggagactaagggagctggagtgaccctgaatgttctggaaatgacttctgaagatttagaaaatgctctaaaagcagtcatcaatgacaaaagttacaaggagaacatcatgcgcctctccagccttcacaaggaccgcccggtggagccgctggacctggccgtgttctgggtggagtttgtgatgaggcacaagggcgcgccacacctgcgccccgcagcccacgacctcacctggtaccagtaccattccttggacgtgattggtttcctcttggccgtcgtgctgacagtggccttcatcacctttaaatgttgtgcttatggctaccggaaatgcttggggaaaaaagggcgagttaagaaagcccacaaatccaagacccattgagaagtgggtgggaaataaggtaaaattttgaaccattccctagtcatttccaaacttgaaaacagaatcagtgttaaattcattttattcttattaaggaaatactttgcataaattaatcagccccagagtgctttaaaaaattctcttaaataaaaataatagactcgctagtcagtaaagatatttgaatatgtatcgtgccccctccggtgtctttgatcaggatgacatgtgccatttttcagaggacgtgcagacaggctggcattctagattacttttcttactctgaaacatggcctgtttgggagtgcgggattcaaaggtggtcccaccgctgcccctactgcaaatggcagttttaatcttatcttttggcttctgcagatggttgcaattgatccttaaccaataatggtcagtcctcatctctgtcgtgcttcataggtgccaccttgtgtgtttaaagaagggaagctttgtacctttagagtgtaggtgaaatgaatgaatggcttggagtgcactgagaacagcatatgatttcttgctttggggaaaaagaatgatgctatgaaattggtgggtggtgtatttgagaagataatcattgcttatgtcaaatggagctgaatttgataaaaacccaaaatacagctatgaagtgctgggcaagtttactttttttctgatgtttcctacaactaaaaataaattaataaatttatataaattctattt

SEQ ID NO: 1526 - DNA, 2349 bp, Homo sapiens
atggccacaggactccaggttcccctgccgtggctggccacaggactgctgcttctcctcagtgtccagccctgggctgagagtggaaaggtgttggtggtgcccattgatggcagccactggctcagcatgcgggaggtcttgcgggagctccatgccagaggccaccaggcagtggtcctcaccccagaggtgaatatgcacatcaaagaagagaactttttcaccctgacaacctatgccatttcgtggacccaggatgaatttgatcgccatgtgctgggccacactcaactgtactttgaaacagaacattttctgaagaaatttttcagaagtatggcaatgttgaacaatatgtctttggtctatcataggtcttgtgtggagctactacataatgaggccctgatcaggcacctgaatgctacttcctttgatgtggttttaacagaccccgttaacctctgcgcggcggtgctggctaagtacctgtcgattcctactgtgttttttttgaggaacattccatgtgatttagactttaagggcacacagtgtccaaacccttcctcctatattcctagattactaacaaccaattcagaccacatgacattcatgcaaagggtcaagaacatgctctaccctctggccctgtcctacatttgccatgctttttctgctccttatgcaagccttgcctctgagctttttcagagagaggtgtcagtggtggatattctcagtcatgcatctgtgtggctgttccgaggggactttgtgatggactaccccaggccaatcatgcccaacatggtcttcattgggggcatcaactgtgccaacaggaagccactatctcaggaatttgaagcctacattaatgcttctggagaacatggaattgtggttttctctttgggatcaatggtctcagaaattccagagaagaaagctatggcaattgctgatgctttgggcaaaatccctcagacagtcctgtggcggtacactggaacccgaccatcgaatcttgcgaacaacacgatacttgttaagtggctaccccaaaacgatctgcttggtcacccgatgacccgtgcctttatcacccatgctggttcccatggtgtttatgaaagcatatgcaatggcgttcccatggtgatgatgcccttgtttggtgatcagatggacaatgcaaagcgcatggagactaagggagctggagtgaccctgaatgttctggaaatgacttctgaagatttagaaaatgctctaaaagcagtcatcaatgacaaaagttacaaggagaacatcatgcgcctctccagccttcacaaggaccgcccggtggagccgctggacctggccgtgttctgggtggagtttgtgatgaggcacaagggcgcgccacacctgcgccccgcagcccacgacctcacctggtaccagtaccattccttggacgtgattggtttcctcttggccgtcgtgctgacagtggccttcatcacctttaaatgttgtgcttatggctaccggaaatgcttggggaaaaaagggcgagttaagaaagcccacaaatccaagacccattgagaagtgggtgggaaataaggtaaaattttgaaccattccctagtcatttccaaacttgaaaacagaatcagtgttaaattcattttattcttattaaggaaatactttgcataaattaatcagccccagagtgctttaaaaaattctcttaaataaaaataatagactcgctagtcagtaaagatatttgaatatgtatcgtgccccctccggtgtctttgatcaggatgacatgtgccatttttcagaggacgtgcagacaggctggcattctagattacttttcttactctgaaacatggcctgtttgggagtgcgggattcaaaggtggtcccaccgctgcccctactgcaaatggcagttttaatcttatcttttggcttctgcagatggttgcaattgatccttaaccaataatggtcagtcctcatctctgtcgtgcttcataggtgccaccttgtgtgtttaaagaagggaagctttgtacctttagagtgtaggtgaaatgaatgaatggcttggagtgcactgagaacagcatatgatttcttgctttggggaaaaagaatgatgctatgaaattggtgggtggtgtatttgagaagataatcattgcttatgtcaaatggagctgaatttgataaaaacccaaaatacagctatgaagtgctgggcaagtttactttttttctgatgtttcctacaactaaaaataaattaataaatttatataaattctattt

SEQ ID NO: 1527 - DNA, 2604 bp, Homo sapiens
ctggagtcggagttgtaacgctccactgactgatagagcgaccggccgaccatggcgcccggagtggcccgcgggccgacgccgtactggaggttgcgcctcggtggcgccgcgctgctcctgctgctcatcccggtggccgccgcgcaggagcctcccggagctgcttgttctcagaacacaaacaaaacctgtgaagagtgcctgaagaacgtctcctgtctttggtgcaacactaacaaggcttgtctggactacccagttacaagcgtcttgccaccggcttccctttgtaaattgagctctgcacgctggggagtttgttgggtgaactttgaggcgctgatcatcaccatgtcggtagtcgggggaaccctcctcctgggcattgccatctgctgctgctgctgctgcaggaggaagaggagccggaagccggacaggagtgaggagaaggccatgcgtgagcgggaggagaggcggatacggcaggaggaacggagagcagagatgaagacaagacatgatgaaatcagaaaaaaatatggcctgtttaaagaagaaaacccgtatgctagatttgaaaacaactaaagcgctccagcacatcagtcccgacgcttcctgtgaggtgcacgctccgcagcccagcccagccgggagaccacgtggccattgcggtctcctgaccttggccagtgaacctgccagccttccaggacaggcggccggagagctgcccctgaaggacagtcctctcgtcttgcagactggtgaccttctattccctgttcatctctgtttctagatttagtcacttgaaataagaaatctttggggtttgggcttttttatactcttctcagtttgtgaaacgctaactgcacacgaagccgcctgacggcacccagcgctgtggctgtcattctcccagggcagaaccctgcgtttctctctgtccactaacaagcttcacacgcaacacagggaagtcggtttgacttttgtcatgagtagaactgaccagccctcatcattccccataaaaccacggacagcgtctgtgtgcgcatcttgagtcttcacacctgttgactcacacggcttttgctgatgacacggggctccagtacacagtctgataaggacttaacgtcctaacctcaattgtattaaatagcattggggaatagctaaacctttttaaaaaaatttattggattttcctccctgcttaaaagatttcaccagaaaaccttcatataaaaattcaggccctttttggacaatttttaaaatttgtatctttactagaacatgagaatctttttcccttggaagcttgaattataaatgtggtgtttggcctgcctcagcagcaccagttgactgctcgtgtgccagcggtgtggggaggacggggcaggacgctgcagctctctccagccctgttggcatcctcagtgcctgcaggcctctcgctgcctgttgggctgtctggggggtggccatttagggatcgtggggacggggtccaccccaagaagaaagaaaggcccgtccacaggcccggctctgggccacgtgccccggaagcaggtgtgtccagagtcagctgagggctctccccacaccacccagcaggcgctggtgctccttctgcctcatgggaccagtccagcttccagccgctctggctcgagggtggtctgaccacttccttctgagtgggcttctctgggagctctccagtggcactgctggacctgcccacgtttctgtaaaatcaggatacgtggctttagtaagcagaccaagcgcttcgtggcagggaaagcagcgtgcggggaagtcactgaaaagtgctgcctaaggaagtttggaaatagtccctgttccagattgccttgaattttaaaacattttgctttgggaaagtaggtcagcagcacctaagatcaaggatgcgttccattttcacacttcacagtcatgaaaactgagaagactgtcttcagcgtgaactaaagttcacaggcagatcactgatccagaacacttcaagaactcgtcaaacagctcgataagcctttttgactgtgtacatctgtaccgggaataacattcctaggctgaaatttccacaaagaatagaacctgtacccagttcttcaggctgatttccctgacctttgggcatttgtatttgtagtaaagtattgcagagattcctaagtattttatagcagccatcaaaattggactttgtattgtttattcataaaagacacttggtaatagacttcagtgaactctgtatgaatgcagtagtgtgtgtgcaaaatccgcttcctgagcgtagggtgctgagctggcgctagggctcggttgtgaaatacagcgtagtcagcccttgcgctcagtgtagaaacccacgtctgtaaggtcggtcttcgtccatctgcttttttctgaaatacactaagagcagccacaaaactgtaacctcaaggaaaccataaagcttggagtgccttaatttttaaccagtttccaataaaacggtttactacctgcgtgtgtttagaaaaaaaaaaaaaaaaa

SEQ ID NO: 1528 - DNA, 3023 bp, Homo sapiens
cgtttcagcccattctggggccgtttctagtgtggttaacgtacaaaaataaacaaatcccctaaaagtcccacgcggacatcggcgggagcccagggccggacgccgcggtgtggagcgagggcgccggcgcggactatgagggcccaccgcgcctcgtccagggctcacttaagagcagcgtgagcagcgcttgggaccgccgtccgggacgcccgcagccctttaggatggaggccaccgtgacctccgccaccgaagcaccgcgctcccctagtcccctcagccggtcgccgttccccgccgcgcaggcgcaggagccgcggcgagcccctcggtcacgcctcgcccctcggtcacgcctcgcccctcggtcacgcctcgcccctcggtcacgcctcgcccctcggtcacgcctcgcccctcggtcacgcctcgcccatccgcgccgcgcaggcgcactgagcctcagccgctctcctcgctaccaggctcctttcctctatcgcgcaggcgcactgaacctcagccgcgccgggaggcgagcccgttggcgaggggcggggcggatggcgagggagcggggcgagctgctttttgaggctgcgcactcgcatggccccacctcgcaggtccacttccggcgccgcggctgttccgggcggagaccgcttgtgctggagtcggagttgtaacgctccactgactgatagagcgaccggccgaccatggcgcccggagtggcccgcgggccgacgccgtactggaggttgcgcctcggtggcgccgcgctgctcctgctgctcatcccggtggccgccgcgcaggagcctcccggagctgcttgttctcagaacacaaacaaaacctgtgaagagtgcctgaagaacgtctcctgtctttggtgcaacactaacaaggcttgtctggactacccagttacaagcgtcttgccaccggcttccctttgtaaattgagctctgcacgctggggagtttgttgggtgaactttgaggcgctgatcatcaccatgtcggtagtcgggggaaccctcctcctgggcattgccatctgctgctgctgctgctgcaggaggaagaggagccggaagccggacaggagtgaggagaaggccatgcgtgagcgggaggagaggcggatacggcaggaggaacggagagcagagatgaagacaagacatgatgaaatcagaaaaaaatatggcctgtttaaagaagaaaacccgtatgctagatttgaaaacaactaaagcgctccagcacatcagtcccgacgcttcctgtgaggtgcacactccgcagcccagcccagccgggagaccacgtggccattgcggtctcctgaccttggccagtgaacctgccagccttccaggacaggcggccggagagctgcccctgaaggacagtcctctcgtcttgcagactggtgaccttctattccctgttcatctctgtttctagatttagtcacttgaaataagaaatctttggggtttgggcttttttatactcttctcagtttgtgaaacgctaactgcacacgaagccgcctgacggcacccagcgctgtggctgtcattctcccagggcagaaccctgcgtttctctctgtccactaacaagcttcacacgcaacacagggaagtcggtttgacttttgtcatgaggagaactgaccagccctcatcattcccctcacacggcttttgctgatgacacggggctccagtacacagtctgataaggacttaacgtcctaacctcaattgtattaaatagcattggggaatagctaaacctttttaaaaaaatttattggattttcctccctgcttaaaagatttcaccagaaaaccttcatataaaaattcaggccctttttggacaatttttaaaatttgtatctttactagaacatgagaatctttttcccttggaagcttgaattataaatgtggtgtttggcctgcctcagcagcaccagttgactgctcgtgtgccagcggtgtggggaggacggggcaggacgctgcagctctctccagccctgttggcatcctcagtgcctgcaggcctctcgctgcctgttgggctgtctggggggtggccatttagggatcgtggggacggggtccacccgccacgtgccccggaagcaggtgtgtccagagtcagctgagggctctccccacaccacccagcaggcgctggtgctccttctgcctcatgggaccagtccagcttccagccgctctggctcgagggtggtctgagcacttccttctgagtgggcttctctgggagctctccagtggcactgctggacctgcccacgtttctgtaaaatcaggatacgtggctttagtaagcagaccaagcgcttcgtggcagggaaagcagcgtgcggggaagtcactgaaaagtgctgcctaaggaagtttggaaatagtccccgttccagattgccttgaattttaaaacattttgctttgggaaagtaggtcagcagcacctaagatcaaggatgcgttccattttcacacttcacagtcatgaaaactgagaagactgtcttcagcgtgaactaaagttcacaggcagatcactgatccagaacacttcaagaactcgtcaaacagctcgataagcctttttgactgtgtacatctgtaccgggaataacattcctaggctgaaatttccacaaagaatagaacctgtacccagaaaattggactttgtattgtttattcataaaagacacttggtaatagacttcagtgaactctgtatgaatgcagtagtgtgcgtgcaaaatccgcttcctgagcgtagggtgctgagctggcgctagggctcggttgtgaaatacagcgtagtcagcccttgcgctcagtgtagaaacccacgtctgtaaggtcggtcttcgtccatctgcttttttctgaaatacactaagagcagccacaaaactgtaacctcaaggaaaccataaagct

SEQ ID NO: 1529 - DNA, 1694 bp, Homo sapiens
ccttgctgggctattggcgcccccagggctgcagctcgcccggcctccgcagtgccaggtcgacccccagcgcctacacccacgcgggttcagacctgccgagcgcccgccgccgcgggaggggcttgaggccggggcggggcggggccggggcggggcgtccccctcgtaggctccgggccgcgcattctcagcgctgggagccgccgcccccgcagctgccgccgccgccagggcccggactcggacgcgtggtagccccaggatgggtgagttcaacgagaagaagacaacatgtggcaccgtttgcctcaagtacctgctgtttacctacaattgctgcttctggctggctggcctggctgtcatggcagtgggcatctggacgctggccctcaagagtgactacatcagcctgctggcctcaggcacctacctggccacagcctacatcctggtggtggcgggcactgtcgtcatggtgactggggtcttgggctgctgcgccaccttcaaggagcgtcggaacctgctgcgcctgtacttcatcctgctcctcatcatctttctgctggagatcatcgctggtatcctcgcctacgcctactaccagcagctgaacacggagctcaaggagaacctgaaggacaccatgaccaagcgctaccaccagccgggccatgaggctgtgaccagcgctgtggaccagctgcagcaggagttccactgctgtggcagcaacaactcacaggactggcgagacagtgagtggatccgctcacaggaggccggtggccgtgtggtcccagacagctgctgcaagacggtggtggctctttgtggacagcgagaccatgcctccaacatctacaaggtggagggcggctgcatcaccaagttggagaccttcatccaggagcacctgagggtcattggggctgtggggatcggcattgcctgtgtgcaggtctttggcatgatcttcacgtgctgcctgtacaggagtctcaagctggagcactactgaccctgccttgggccttgctgctgctgcacccaactactgagctgagaccactgagtaccaggggctgggctccctgatgacacccaccctgtgccatcaccataacctctggggaccccaacctcagaggcagcttcaagtgccttttgctgcgcaccaatgcccagcaggggaggtgaggggggctggcggggcgaagtttggggggtgttttgtggggctccccggacatactctctgcctggtggtcagatgcaggttggaaggggccttgctgagtggcgcaaggccgagcgttcccagcagggggagaaacccttcacaccccaggcccttcaggaactggggctttgccttgcagccacatggccccatcccagttggggaagccaggtgagctctgacccttgggcctgggcctctgcccctcccaacccagccgtcgtctccctcgacagcgcccctgctgtcttccccaccgcagtcaccaccacccgaaatgccacgtggtcactgtgcactgccctgttcatgtgcctctgcggggcagggccttcctggttttgtacactgctgtacccagatgcctacaaccatccctgccacatacaggtgctcaataaacacttgtagagcagatggacgagctcgctgtgctggtaacaga

SEQ ID NO: 1530 - DNA, 1694 bp, Homo sapiens; identical to SEQ ID NO: 1529

SEQ ID NO: 1531 - DNA, 1694 bp, Homo sapiens; identical to SEQ ID NO: 1529

SEQ ID NO: 1532 - DNA, 1694 bp, Homo sapiens; identical to SEQ ID NO: 1529

SEQ ID NO: 1533 - DNA, 2183 bp, Homo sapiens
agggccgggtcgccacagcccagggcctctggctaggctggtcgccgtcttacctccgggcccgcctcccgcccagctcctccgtccttggacgggatgggcccttgctgggctattggcgcccccagggctgcagctcgcccggcctccgcagtgccaggtcgacccccagcgcctacacccacgcgggttcagacctgccgagcgcccgccgccgcgggaggggcttgaggccggggcggggcggggccggggcggggcgtccccctcgtaggctccgggccgcgcattctcagcgctgggagccgccgcccccgcagctgccgccgccgccagggcccggactcggacgcgtggtagcctagagtcctggggagcttctgtccacctgtcctgcagaggagtcgtttccagcccggctgccccaggatgggtgagttcaacgagaagaagacaacatgtggcaccgtttgcctcaagtacctgctgtttacctacaattgctgcttctggctggctggcctggctgtcatggcagtgggcatctggacgctggccctcaagagtgactacatcagcctgctggcctcaggcacctacctggccacagcctacatcctggtggtggcgggcactgtcgtcatggtgactggggtcttgggctgctgcgccaccttcaaggagcgtcggaacctgctgcgcctggtcaggagggcgcagggccacggggtgggggtggtgcagatgggcccaaggaggttgtcgctgcaggctttgaacctgtgccttgctgtgctcacctgggggggggtcacggtccttccacacctgcctagtcctgtgggtccccacgttcctgctggaccagctgagggaagacaccagctccgcaagaaagcttcagggagggtggccgcccctcagcccccacctggagcctggggagccggggtggggactctgctctgaggtgcactaggtctaggcactaggcctcagaacaagggtgcccttgtgctgccccccccagtacttcatcctgctcctcatcatctttctgctggagatcatcgctggtatcctcgcctacgcctactaccagcagctgaacacggagctcaaggagaacctgaaggacaccatgaccaagcgctaccaccagccgggccatgaggctgtgaccagcgctgtggaccagctgcagcaggagttccactgctgtggcagcaacaactcacaggactggcgagacagtgagtggatccgctcacaggaggccggtggccgtgtggtcccagacagctgctgcaagacggtggtggctctttgtggacagcgagaccatgcctccaacatctacaaggtggagggcggctgcatcaccaagttggagaccttcatccaggagcacctgagggtcattggggctgtggggatcggcattgcctgtgtgcaggtctttggcatgatcttcacgtgctgcctgtacaggagtctcaagctggagcactactgaccctgccttgggccttgctgctgctgcacccaactactgagctgagaccactgagtaccaggggctgggctccctgatgacacccaccctgtgccatcaccataacctctggggaccccaacctcagaggcagcttcaagtgccttttgctgcgcaccaatgcccagcaggggaggtgaggggggctggcggggcgaagtttggggggtgttttgtggggctccccggacatactctctgcctggtggtcagatgcaggttggaaggggccttgctgagtggcgcaaggccgagcgttcccagcagggggagaaacccttcacaccccaggcccttcaggaactggggctttgccttgcagccacatggccccatcccagttggggaagccaggtgagctctgacccttgggcctgggcctctgcccctcccaacccagccgtcgtctccctcgacagcgcccctgctgtcttccccaccgcagtcaccaccacccgaaatgccacgtggtcactgtgcactgccctgttcatgtgcctctgcggggcagggccttcctggttttgtacactgctgtacccagatgcctacaaccatccctgccacatacaggtgctcaataaacacttgtagagcagatggacgagctcgctgtgctggtaacaga

SEQ ID NO: 1534 - DNA, 1805 bp, Homo sapiens
ctccgggcccgcctcccgcccagctcctccgtccttggacgggatgggcccttgctgggctattggcgcccccagggctgcagctcgcccggcctccgcagtgccaggtcgacccccagcgcctacacccacgcgggttcagacctgccgagcgcccgccgccgcgggaggggcttgaggccggggcggggcggggccggggcggggcgtccccctcgtaggctccgggccgcgcattctcagcgctgggagccgccgcccccgcagctgccgccgccgccagggcccggactcggacgcgtggtagcctagagtcctggggagcttctgtccacctgtcctgcagaggagtcgtttccagcccggctgccccaggatgggtgagttcaacgagaagaagacaacatgtggcaccgtttgcctcaagtacctgctgtttacctacaattgctgcttctggctggctggcctggctgtcatggcagtgggcatctggacgctggccctcaagagtgactacatcagcctgctggcctcaggcacctacctggccacagcctacatcctggtggtggcgggcactgtcgtcatggtgactggggtcttgggctgctgcgccaccttcaaggagcgtcggaacctgctgcgcctgtacttcatcctgctcctcatcatctttctgctggagatcatcgctggtatcctcgcctacgcctactaccagcagctgaacacggagctcaaggagaacctgaaggacaccatgaccaagcgctaccaccagccgggccatgaggctgtgaccagcgctgtggaccagctgcagcaggagttccactgctgtggcagcaacaactcacaggactggcgagacagtgagtggatccgctcacaggaggccggtggccgtgtggtcccagacagctgctgcaagacggtggtggctctttgtggacagcgagaccatgcctccaacatctacaaggtggagggcggctgcatcaccaagttggagaccttcatccaggagcacctgagggtcattggggctgtggggatcggcattgcctgtgtgcaggtctttggcatgatcttcacgtgctgcctgtacaggagtctcaagctggagcactactgaccctgccttgggccttgctgctgctgcacccaactactgagctgagaccactgagtaccaggggctgggctccctgatgacacccaccctgtgccatcaccataacctctggggaccccaacctcagaggcagcttcaagtgccttttgctgcgcaccaatgcccagcaggggaggtgaggggggctggcggggcgaagtttggggggtgttttgtggggctccccggacatactctctgcctggtggtcagatgcaggttggaaggggccttgctgagtggcgcaaggccgagcgttcccagcagggggagaaacccttcacaccccaggcccttcaggaactggggctttgccttgcagccacatggccccatcccagttggggaagccaggtgagctctgacccttgggcctgggcctctgcccctcccaacccagccgtcgtctccctcgacagcgcccctgctgtcttccccaccgcagtcaccaccacccgaaatgccacgtggtcactgtgcactgccctgttcatgtgcctctgcggggcagggccttcctggttttgtacactgctgtacccagatgcctacaaccatccctgccacatacaggtgctcaataaacacttgtagagcagatggacgagctcgctgtgctggtaacaga

SEQ ID NO: 1535 - DNA, 1964 bp, Homo sapiens
tggttccgcgcgccggagcgcgctagccgcattgcgagccgaacccgggagctggcgccatggtgctgttgcacgtgctgtttgagcacgcggtcggctacgcgctgctggcgctgaaggaagtggaggagatcagtctgctgcagccgcaggtggaggagtccgtgctcaacctgggcaaattccacagcatcgttcgtctggtggccttttgtccctttgcctcatcccaggttgccttggaaaatgccaacgccgtgtctgaaggggttgttcatgaggacctccgcctgctcttggagacccacctgccgtccaaaaagaagaaagtactcttgggagttggggatcccaagattggtgccgcaatacaggaggagttagggtacaactgccagactggaggagtcatagctgagatcctgcgaggagttcgtctgcacttccacaatctggtgaagggtctgaccgatctgtcagcttgtaaagcacagctggggctgggacacagctattcccgtgccaaagttaagtttaatgtgaaccgggtggacaatatgatcatccagtccattagcctcctggaccagctggataaggacatcaataccttctctatgcgtgtcagggagtggtacgggtatcactttccggagctggtgaagatcatcaacgacaatgccacatactgccgtcttgcccagtttattggaaaccgaagggaactgaatgaggacaagctggagaagctggaggagctgacaatggatggggccaaggctaaggctattctggatgcctcacggtcctccatgggcatggacatatctgccattgacttgataaacatcgagagcttctccagtcgtgtggtgtctttatctgaataccgccagagcctacacacttacctgcgctccaagatgagccaagtagcccccagcctgtcagccctaattggggaagcggtaggtgcacgtctcatcgcacatgctggcagcctcaccaacctggccaagtatccagcatccacagtgcagatccttggggctgaaaaggccctgttcagagccctgaagacaaggggtaacactccaaaatatggactcattttccactccaccttcattggccgagcagctgccaagaacaaaggccgcatctcccgatacctggcaaacaaatgcagtattgcctcacgaatcgattgcttctctgaggtgcccacgagtgtattcggggagaagcttcgagaacaagttgaagagcgactgtccttctatgagactggagagataccacgaaagaatctggatgtcatgaaggaagcaatggttcaggtcacacttttctttgaccaggcagaggaagcggctgctgagattactaggaagctggagaaacaggagaagaaacgcttaaagaaggaaaagaaacggctggctgcacttgccctcgcgtcttcagaaaacagcagtagtactccagaggagtgtgaggagatgagtgaaaaacccaaaaagaagaaaaagcaaaagccccaggaggttcctcaggagaatggaatggaagacccatctatctctttctccaaacccaagaaaaagaaatctttttccaaggaggagttgatgagtagcgatcttgaagagaccgctggcagcaccagtattcccaagaggaagaagtctacacccaaggaggaaacagttaatgaccctgaggaggcaggccacagaagtggctccaagaaaaagaggaaattctccaaagaggagccggtcagcagtgggcctgaagaggcggctggcaagagcagctccaagaagaagaaaaagttccataaagcatcccaggaagattagaatgcaaatggacattctctgggaggtggggcataccatagcccaaggtgacatttcccaccctgtgccgtgttccccaataaaaacaaattcacaaga

SEQ ID NO: 1536 - DNA, 2080 bp, Homo sapiens
cccgggagctggcgccatggtgaggagtggttgcggggcgcgggcgacgcgacggtgggggtttcggcctgcgttcgggccgcagacaggggcctgggcctgggcctgggcctgcggcctgcgcctgcgcctgccctgggaacgggttccggcagacgctgaggttgcgttgacgctcgcgccccggctcccgttccaggtgctgttgcacgtgctgtttgagcacgcggtcggctacgcgctgctggcgctgaaggaagtggaggagatcagtctgctgcagccgcaggtggaggagtccgtgctcaacctgggcaaattccacagcatcgttcgtctggtggccttttgtccctttgcctcatcccaggttgccttggaaaatgccaacgccgtgtctgaaggggttgttcatgaggacctccgcctgctcttggagacccacctgccgtccaaaaagaagaaagtactcttgggagttggggatcccaagattggtgccgcaatacaggaggagttagggtacaactgccagactggaggagtcatagctgagatcctgcgaggagttcgtctgcacttccacaatctggtgaagggtctgaccgatctgtcagcttgtaaagcacagctggggctgggacacagctattcccgtgccaaagttaagtttaatgtgaaccgggtggacaatatgatcatccagtccattagcctcctggaccagctggataaggacatcaataccttctctatgcgtgtcagggagtggtacgggtatcactttccggagctggtgaagatcatcaacgacaatgccacatactgccgtcttgcccagtttattggaaaccgaagggaactgaatgaggacaagctggagaagctggaggagctgacaatggatggggccaaggctaaggctattctggatgcctcacggtcctccatgggcatggacatatctgccattgacttgataaacatcgagagcttctccagtcgtgtggtgtctttatctgaataccgccagagcctacacacttacctgcgctccaagatgagccaagtagcccccagcctgtcagccctaattggggaagcggtaggtgcacgtctcatcgcacatgctggcagcctcaccaacctggccaagtatccagcatccacagtgcagatccttggggctgaaaaggccctgttcagagccctgaagacaaggggtaacactccaaaatatggactcattttccactccaccttcattggccgagcagctgccaagaacaaaggccgcatctcccgatacctggcaaacaaatgcagtattgcctcacgaatcgattgcttctctgaggtgcccacgagtgtattcggggagaagcttcgagaacaagttgaagagcgactgtccttctatgagactggagagataccacgaaagaatctggatgtcatgaaggaagcaatggttcaggtcaaggaagcggctgctgagattactaggaagctggagaaacaggagaagaaacgcttaaagaaggaaaagaaacggctggctgcacttgccctcgcgtcttcagaaaacagcagtagtactccagaggagtgtgaggagatgagtgaaaaacccaaaaagaagaaaaagcaaaagccccaggaggttcctcaggagaatggaatggaagacccatctatctctttctccaaacccaagaaaaagaaatctttttccaaggaggagttgatgagtagcgatcttgaagagaccgctggcagcaccagtattcccaagaggaagaagtctacacccaaggaggaaacagttaatgaccctgaggaggcaggccacagaagtggctccaagaaaaagaggaaattctccaaagaggagccggtcagcagtgggcctgaagaggcggctggcaagagcagctccaagaagaagaaaaagttccataaagcatcccaggaagattagaatgcaaatggacattctctgggaggtggggcataccatagcccaaggtgacatttcccaccctgtgccgtgttccccaataaaaacaaattcacaaga

SEQ ID NO: 1537 - DNA, 1964 bp, Homo sapiens; identical to SEQ ID NO: 1535

SEQ ID NO: 1538 - DNA, 2084 bp, Homo sapiens
cccgggagctggcgccatggtgaggagtggttgcggggcgcgggcgacgcgacggtgggggtttcggcctgcgttcgggccgcagacaggggcctgggcctgggcctgggcctgcggcctgcgcctgcgcctgccctgggaacgggttccggcagacgctgaggttgcgttgacgctcgcgccccggctcccgttccaggtgctgttgcacgtgctgtttgagcacgcggtcggctacgcgctgctggcgctgaaggaagtggaggagatcagtctgctgcagccgcaggtggaggagtccgtgctcaacctgggcaaattccacagcatcgttcgtctggtggccttttgtccctttgcctcatcccaggttgccttggaaaatgccaacgccgtgtctgaaggggttgttcatgaggacctccgcctgctcttggagacccacctgccgtccaaaaagaagaaagtactcttgggagttggggatcccaagattggtgccgcaatacaggaggagttagggtacaactgccagactggaggagtcatagctgagatcctgcgaggagttcgtctgcacttccacaatctggtgaagggtctgaccgatctgtcagcttgtaaagcacagctggggctgggacacagctattcccgtgccaaagttaagtttaatgtgaaccgggtggacaatatgatcatccagtccattagcctcctggaccagctggataaggacatcaataccttctctatgcgtgtcagggagtggtacgggtatcactttccggagctggtgaagatcatcaacgacaatgccacatactgccgtcttgcccagtttattggaaaccgaagggaactgaatgaggacaagctggagaagctggaggagctgacaatggatggggccaaggctaaggctattctggatgcctcacggtcctccatgggcatggacatatctgccattgacttgataaacatcgagagcttctccagtcgtgtggtgtctttatctgaataccgccagagcctacacacttacctgcgctccaagatgagccaagtagcccccagcctgtcagccctaattggggaagcggtaggtgcacgtctcatcgcacatgctggcagcctcaccaacctggccaagtatccagcatccacagtgcagatccttggggctgaaaaggccctgttcagagccctgaagacaaggggtaacactccaaaatatggactcattttccactccaccttcattggccgagcagctgccaagaacaaaggccgcatctcccgatacctggcaaacaaatgcagtattgcctcacgaatcgattgcttctctgaggtgcccacgagtgtattcggggagaagcttcgagaacaagttgaagagcgactgtccttctatgagactggagagataccacgaaagaatctggatgtcatgaaggaagcaatggttcaggtcagcagaggaagcggctgctgagattactaggaagctggagaaacaggagaagaaacgcttaaagaaggaaaagaaacggctggctgcacttgccctcgcgtcttcagaaaacagcagtagtactccagaggagtgtgaggagatgagtgaaaaacccaaaaagaagaaaaagcaaaagccccaggaggttcctcaggagaatggaatggaagacccatctatctctttctccaaacccaagaaaaagaaatctttttccaaggaggagttgatgagtagcgatcttgaagagaccgctggcagcaccagtattcccaagaggaagaagtctacacccaaggaggaaacagttaatgaccctgaggaggcaggccacagaagtggctccaagaaaaagaggaaattctccaaagaggagccggtcagcagtgggcctgaagaggcggctggcaagagcagctccaagaagaagaaaaagttccataaagcatcccaggaagattagaatgcaaatggacattctctgggaggtggggcataccatagcccaaggtgacatttcccaccctgtgccgtgttccccaataaaaacaaattcacaaga

SEQ ID NO: 1539 - DNA, 2083 bp, Homo sapiens
cccgggagctggcgccatggtgaggagtggttgcggggcgcgggcgacgcgacggtgggggtttcggcctgcgttcgggccgcagacaggggcctgggcctgggcctgggcctgcggcctgcgcctgcgcctgccctgggaacgggttccggcagacgctgaggttgcgttgacgctcgcgccccggctcccgttccaggtgctgttgcacgtgctgtttgagcacgcggtcggctacgcgctgctggcgctgaaggaagtggaggagatcagtctgctgcagccgcaggtggaggagtccgtgctcaacctgggcaaattccacagcatcgttcgtctggtggccttttgtccctttgcctcatcccaggttgccttggaaaatgccaacgccgtgtctgaaggggttgttcatgaggacctccgcctgctcttggagacccacctgccgtccaaaaagaagaaagtactcttgggagttggggatcccaagattggtgccgcaatacaggaggagttagggtacaactgccagactggaggagtcatagctgagatcctgcgaggagttcgtctgcacttccacaatctggtgaagggtctgaccgatctgtcagcttgtaaagcacagctggggctgggacacagctattcccgtgccaaagttaagtttaatgtgaaccgggtggacaatatgatcatccagtccattagcctcctggaccagctggataaggacatcaataccttctctatgcgtgtcagggagtggtacgggtatcactttccggagctggtgaagatcatcaacgacaatgccacatactgccgtcttgcccagtttattggaaaccgaagggaactgaatgaggacaagctggagaagctggaggagctgacaatggatggggccaaggctaaggctattctggatgcctcacggtcctccatgggcatggacatatctgccattgacttgataaacatcgagagcttctccagtcgtgtggtgtctttatctgaataccgccagagcctacacacttacctgcgctccaagatgagccaagtagcccccagcctgtcagccctaattggggaagcggtaggtgcacgtctcatcgcacatgctggcagcctcaccaacctggccaagtatccagcatccacagtgcagatccttggggctgaaaaggccctgttcagagccctgaagacaaggggtaacactccaaaatatggactcattttccactccaccttcattggccgagcagctgccaagaacaaaggccgcatctcccgatacctggcaaacaaatgcagtattgcctcacgaatcgattgcttctctgaggtgcccacgagtgtattcggggagaagcttcgagaacaagttgaagagcgactgtccttctatgagactggagagataccacgaaagaatctggatgtcatgaaggaagcaatggttcaggcagaggaagcggctgctgagattactaggaagctggagaaacaggagaagaaacgcttaaagaaggaaaagaaacggctggctgcacttgccctcgcgtcttcagaaaacagcagtagtactccagaggagtgtgaggaggagatgagtgaaaaacccaaaaagaagaaaaagcaaaagccccaggaggttcctcaggagaatggaatggaagacccatctatctctttctccaaacccaagaaaaagaaatctttttccaaggaggagttgatgagtagcgatcttgaagagaccgctggcagcaccagtattcccaagaggaagaagtctacacccaaggaggaaacagttaatgaccctgaggaggcaggccacagaagtggctccaagaaaaagaggaaattctccaaagaggagccggtcagcagtgggcctgaagaggcggctggcaagagcagctccaagaagaagaaaaagttccataaagcatcccaggaagattagaatgcaaatggacattctctgggaggtggggcataccatagcccaaggtgacatttcccaccctgtgccgtgttccccaataaaaacaaattcacaaga

SEQ ID NO: 1540 - DNA, 2083 bp, Homo sapiens; identical to SEQ ID NO: 1539

SEQ ID NO: 1541 - DNA, 2234 bp, Homo sapiens
gagacagaggctctgtcgcccaggctggagtgcagtggcgcgatcttttctcttctgtcaaccccacacgcctttggcacaatgaagtgggtaacctttatttcccttctttttctctttagctcggcttattccaggggtgtgtttcgtcgagatgcacacaagagtgaggttgctcatcggtttaaagatttgggagaagaaaatttcaaagccttggtgttgattgcctttgctcagtatcttcagcagtgtccatttgaagatcatgtaaaattagtgaatgaagtaactgaatttgcaaaaacatgtgttgctgatgagtcagctgaaaattgtgacaaatcacttcataccctttttggagacaaattatgcacagttgcaactcttcgtgaaacctatggtgaaatggctgactgctgtgcaaaacaagaacctgagagaaatgaatgcttcttgcaacacaaagatgacaacccaaacctcccccgattggtgagaccagaggttgatgtgatgtgcactgcttttcatgacaatgaagagacatttttgaaaaaatacttatatgaaattgccagaagacatccttacttttatgccccggaactccttttctttgctaaaaggtataaagctgcttttacagaatgttgccaagctgctgataaagctgcctgcctgttgccaaagctcgatgaacttcgggatgaagggaaggcttcgtctgccaaacagagactcaagtgtgccagtctccaaaaatttggagaaagagctttcaaagcatgggcagtagctcgcctgagccagagatttcccaaagctgagtttgcagaagtttccaagttagtgacagatcttaccaaagtccacacggaatgctgccatggagatctgcttgaatgtgctgatgacagggcggaccttgccaagtatatctgtgaaaatcaagattcgatctccagtaaactgaaggaatgctgtgaaaaacctctgttggaaaaatcccactgcattgccgaagtggaaaatgatgagatgcctgctgacttgccttcattagctgctgattttgttgaaagtaaggatgtttgcaaaaactatgctgaggcaaaggatgtcttcctgggcatgtttttgtatgaatatgcaagaaggcatcctgattactctgtcgtgctgctgctgagacttgccaagacatatgaaaccactctagagaagtgctgtgccgctgcagatcctcatgaatgctatgccaaagtgttcgatgaatttaaacctcttgtggaagagcctcagaatttaatcaaacaaaattgtgagctttttgagcagcttggagagtacaaattccagaatgcgctattagttcgttacaccaagaaagtaccccaagtgtcaactccaactcttgtagaggtctcaagaaacctaggaaaagtgggcagcaaatgttgtaaacatcctgaagcaaaaagaatgccctgtgcagaagactatttatgtgtgttgcatgagaaaacgccagtaagtgacagagtcaccaaatgctgcacagaatccttggtgaacaggcgaccatgcttttcagctctggaagtcgatgaaacatacgttcccaaagagtttaatgctgaaacattcaccttccatgcagatatatgcacactttctgagaaggagagacaaatcaagaaacaaactgcacttgttgagctcgtgaaacacaagcccaaggcaacaaaagagcaactgaaagctgttatggatgatttcgcagcttttgtagagaagtgctgcaaggctgacgataaggagacctgctttgccgaggagggtaaaaaacttgttgctgcaagtcaagctgccttaggcttataacatcacatttaaaagcatctcagcctaccatgagaataagagaaagaaaatgaagatcaaaagcttattcatctgtttttctttttcgttggtgtaaagccaacaccctgtctaaaaaacataaatttctttaatcattttgcctcttttctctgtgcttcaattaataaaaaatggaaagaatctaatagagtggtacagcactgttatttttcaaagatgtgttgctatcctgaaaattctgtaggttctgtggaagttccagtgttctctcttattccacttcggtagaggatttctagtttcttgtgggctaattaaataaatcattaatactcttctaa

SEQ ID NO: 1542 - DNA, 2366 bp, Homo sapiens
aagatgagtctagttaataatctacaattattggttaaagaagtatattagtgctaatttccctccgtttgtcctagcttttctcttctgtcaaccccacacgcctttggcacaatgaagtgggtaacctttatttcccttctttttctctttagctcggcttattccaggggtgtgtttcgtcgagatgcacacaagagtgaggttgctcatcggtttaaagatttgggagaagaaaatttcaaagccttggtgttgattgcctttgctcagtatcttcagcagtgtccatttgaagatcatgtaaaattagtgaatgaagtaactgaatttgcaaaaacatgtgttgctgatgagtcagctgaaaattgtgacaaatcacttcataccctttttggagacaaattatgcacagttgcaactcttcgtgaaacctatggtgaaatggctgactgctgtgcaaaacaagaacctgagagaaatgaatgcttcttgcaacacaaagatgacaacccaaacctcccccgattggtgagaccagaggttgatgtgatgtgcactgcttttcatgacaatgaagagacatttttgaaaaaatacttatatgaaattgccagaagacatccttacttttatgccccggaactccttttctttgctaaaaggtataaagctgcttttacagaatgttgccaagctgctgataaagctgcctgcctgttgccaaagctcgatgaacttcgggatgaagggaaggcttcgtctgccaaacagagactcaagtgtgccagtctccaaaaatttggagaaagagctttcaaagcatgggcagtagctcgcctgagccagagatttcccaaagctgagtttgcagaagtttccaagttagtgacagatcttaccaaagtccacacggaatgctgccatggagatctgcttgaatgtgctgatgacagggcggaccttgccaagtatatctgtgaaaatcaagattcgatctccagtaaactgaaggaatgctgtgaaaaacctctgttggaaaaatcccactgcattgccgaagtggaaaatgatgagatgcctgctgacttgccttcattagctgctgattttgttgaaagtaaggatgtttgcaaaaactatgctgaggcaaaggatgtcttcctgggcatgtttttgtatgaatatgcaagaaggcatcctgattactctgtcgtgctgctgctgagacttgccaagacatatgaaaccactctagagaagtgctgtgccgctgcagatcctcatgaatgctatgccaaagtgttcgatgaatttaaacctcttgtggaagagcctcagaatttaatcaaacaaaattgtgagctttttgagcagcttggagagtacaaattccagaatgcgctattagttcgttacaccaagaaagtaccccaagtgtcaactccaactcttgtagaggtctcaagaaacctaggaaaagtgggcagcaaatgttgtaaacatcctgaagcaaaaagaatgccctgtgcagaagactatctatccgtggtcctgaaccagttatgtgtgttgcatgagaaaacgccagtaagtgacagagtcaccaaatgctgcacagaatccttggtgaacaggcgaccatgcttttcagctctggaagtcgatgaaacatacgttcccaaagagtttaatgctgaaacattcaccttccatgcagatatatgcacactttctgagaaggagagacaaatcaagaaacaaactgcacttgttgagctcgtgaaacacaagcccaaggcaacaaaagagcaactgaaagctgttatggatgatttcgcagcttttgtagagaagtgctgcaaggctgacgataaggagacctgctttgccgaggagggtaaaaaacttgttgctgcaagtcaagctgccttaggcttataacatcacatttaaaagcatctcagcctaccatgagaataagagaaagaaaatgaagatcaaaagcttattcatctgtttttctttttcgttggtgtaaagccaacaccctgtctaaaaaacataaatttctttaatcattttgcctcttttctctgtgcttcaattaataaaaaatggaaagaatctaatagagtggtacagcactgttatttttcaaagatgtgttgctatcctgaaaattctgtaggttctgtggaagttccagtgttctctcttattccacttcggtagaggatttctagtttcttgtgggctaattaaataaatcattaatactcttctaagttatggattataaacattcaaaataatattttgacattatgataattctgaataaaagaacaaaaaccatggtatag

SEQ ID NO: 1543 - DNA, 2039 bp, Homo sapiens
ggcacaatgaagtgggtaacctttatttcccttctttttctctttagctcggcttattccaggggtgtgtttcgtcgagatgcacacaagagtgaggttgctcatcggtttaaagatttgggagaagaaaatttcaaagccttggtgttgattgcctttgctcagtatcttcagcagtgtccatttgaagatcatgtaaaattagtgaatgaagtaactgaatttgcaaaaacatgtgttgctgatgagtcagctgaaaattgtgacaaatcacttcataccctttttggagacaaattatgcacagttgcaactcttcgtgaaacctatggtgaaatggctgactgctgtgcaaaacaagaacctgagagaaatgaatgcttcttgcaacacaaagatgacaacccaaacctcccccgattggtgagaccagaggttgatgtgatgtgcactgcttttcatgacaatgaagagacatttttgaaaaaatacttatatgaaattgccagaagacatccttacttttatgccccggaactccttttctttgctaaaaggtataaagctgcttttacagaatgttgccaagctgctgataaagctgcctgcctgttgccaaagctcgatgaacttcgggatgaagggaaggcttcgtctgccaaacagagactcaagtgtgccagtctccaaaaatttggagaaagagctttcaaagcatgggcagtagctcgcctgagccagagatttcccaaagctgagtttgcagaagtttccaagttagtgacagatcttaccaaagtccacacggaatgctgccatggagatctgcttgaatgtgctgatgacagggcggaccttgccaagtatatctgtgaaaatcaagattcgatctccagtaaactgaaggaatgctgtgaaaaacctctgttggaaaaatcccactgcattgccgaagtggaaaatgatgagatgcctgctgacttgccttcattagctgctgattttgttgaaagtaaggatgtttgcaaaaactatgctgaggcaaaggatgtcttcctgggcatgtttttgtatgaatatgcaagaaggcatcctgattactctgtcgtgctgctgctgagacttgccaagacatatgaaaccactctagagaagtgctgtgccgctgcagatcctcatgaatgctatgccaaagtgttcgatgaatttaaacctcttgtggaagagcctcagaatttaatcaaacaaaattgtgagctttttgagcagcttggagagtacaaattccagaatgcgctattagttcgttacaccaagaaggtaccccaagtgtcaactccaactcttgtagaggtctcaagaaacctaggaaaagtgggcagcaaatgttgtaaacatcctgaagcaaaaagaatgccctgtgcagaagactatctatccgtggtcctgaaccagttatgtgtgttgcatgagaaaacgccagtaagtgacagagtcaccaaatgctgcacagaatccttggtgaacaggcgaccatgcttttcagctctggaagtcgatgaaacatacgttcccaaagagtttaatgctgaaacattcaccttccatgcagatatatgcacactttctgagaaggagagacaaatcaagaaacaaactgcacttgttgagctcgtgaaacacaagcccaaggcaacaaaagagcaactgaaagctgttatggatgatttcgcagcttttgtagagaagtgctgcaaggctgacgataaggagacctgctttgccgaggagggtaaaaaacttgttgctgcaagtcaagctgccttaggcttataacatcacatttaaaagcatctcagcctaccatgagaataagagaaagaaaatgaagatcaaaagcttattcatctgtttttctttttcgttggtgtagagccaacaccctgtctaaaaaacataaatttctttaatcattttgcctcttttctctgtgcttcaattaataaaaaatggaaagaatctaaaaaaaaaaaaaaaaa

SEQ ID NO: 1544 - DNA, 2151 bp, Homo sapiens
cttctgtcaaccccacacgcctttggcacaatgaagtgggtaacctttatttcccttctttttctctttagctcggcttattccaggggtgtgtttcgtcgagatgcacacaagagtgaggttgctcatcggtttaaagatttgggagaagaaaatttcaaagccttggtgttgattgcctttgctcagtatcttcagcagtgtccatttgaagatcatgtaaaattagtgaatgaagtaactgaatttgcaaaaacatgtgttgctgatgagtcagctgaaaattgtgacaaatcacttcataccctttttggagacaaattatgcacagttgcaactcttcgtgaaacctatggtgaaatggctgactgctgtgcaaaacaagaacctgagagaaatgaatgcttcttgcaacacaaagatgacaacccaaacctcccccgattggtgagaccagaggttgatgtgatgtgcactgcttttcatgacaatgaagagacatttttgaaaaaatacttatatgaaattgccagaagacatccttacttttatgccccggaactccttttctttgtattcctttttgtagctcgatgaacttcgggatgaagggaaggcttcgtctgccaaacagagactcaagtgtgccagtctccaaaaatttggagaaagagctttcaaagcatgggcagtagctcgcctgagccagagatttcccaaagctgagtttgcagaagtttccaagttagtgacagatcttaccaaagtccacacggaatgctgccatggagatctgcttgaatgtgctgatgacagggcggaccttgccaagtatatctgtgaaaatcaagattcgatctccagtaaactgaaggaatgctgtgaaaaacctctgttggaaaaatcccactgcattgccgaagtggaaaatgatgagatgcctgctgacttgccttcattagctgctgattttgttgaaagtaaggatgtttgcaaaaactatgctgaggcaaaggatgtcttcctgggcatgtttttgtatgaatatgcaagaaggcatcctgattactctgtcgtgctgctgctgagacttgccaagacatatgaaaccactctagagaagtgctgtgccgctgcagatcctcatgaatgctatgccaaagtgttcgatgaatttaaacctcttgtggaagagcctcagaatttaatcaaacaaaattgtgagctttttgagcagcttggagagtacaaattccagaatgcgctattagttcgttacaccaagaaagtaccccaagtgtcaactccaactcttgtagaggtctcaagaaacctaggaaaagtgggcagcaaatgttgtaaacatcctgaagcaaaaagaatgccctgtgcagaagactatctatccgtggtcctgaaccagttatgtgtgttgcatgagaaaacgccagtaagtgacagagtcaccaaatgctgcacagaatccttggtgaacaggcgaccatgcttttcagctctggaagtcgatgaaacatacgttcccaaagagtttaatgctgaaacattcaccttccatgcagatatatgcacactttctgagaaggagagacaaatcaagaaacaaactgcacttgttgagctcgtgaaacacaagcccaaggcaacaaaagagcaactgaaagctgttatggatgatttcgcagcttttgtagagaagtgctgcaaggctgacgataaggagacctgctttgccgaggagggtaaaaaacttgttgctgcaagtcaagctgccttaggcttataacatcacatttaaaagcatctcagcctaccatgagaataagagaaagaaaatgaagatcaaaagcttattcatctgtttttctttttcgttggtgtaaagccaacaccctgtctaaaaaacataaatttctttaatcattttgcctcttttctctgtgcttcaattaataaaaaatggaaagaatctaatagagtggtacagcactgttatttttcaaagatgtgttgctatcctgaaaattctgtaggttctgtggaagttccagtgttctctcttattccacttcggtagaggatttctagtttcttgtgggctaattaaataaatcattaatactcttctaagtt

SEQ ID NO: 1545 - DNA, 2166 bp, Homo sapiens
agcttttctcttctgtcaaccccacacgcctttggcacaatgaagtgggtaacctttatttcccttctttttctctttagctcggcttattccaggggtgtgtttcgtcgagatgcacacaagagtgaggttgctcatcggtttaaagatttgggagaagaaaatttcaaagccttggtgttgattgcctttgctcataactgaatttgcaaaaacatgtgttgctgatgagtcagctgaaaattgtgacaaatcacttcataccctttttggagacaaattatgcacagttgcaactcttcgtgaaacctatggtgaaatggctgactgctgtgcaaaacaagaacctgagagaaatgaatgcttcttgcaacacaaagatgacaacccaaacctcccccgattggtgagaccagaggttgatgtgatgtgcactgcttttcatgacaatgaagagacatttttgaaaaaatacttatatgaaattgccagaagacatccttacttttatgccccggaactccttttctttgctaaaaggtataaagctgcttttacagaatgttgccaagctgctgataaagctgcctgcctgttgccaaagctcgatgaacttcgggatgaagggaaggcttcgtctgccaaacagagactcaagtgtgccagtctccaaaaatttggagaaagagctttcaaagcatgggcagtagctcgcctgagccagagatttcccaaagctgagtttgcagaagtttccaagttagtgacagatcttaccaaagtccacacggaatgctgccatggagatctgcttgaatgtgctgatgacagggcggaccttgccaagtatatctgtgaaaatcaagattcgatctccagtaaactgaaggaatgctgtgaaaaacctctgttggaaaaatcccactgcattgccgaagtggaaaatgatgagatgcctgctgacttgccttcattagctgctgattttgttgaaagtaaggatgtttgcaaaaactatgctgaggcaaaggatgtcttcctgggcatgtttttgtatgaatatgcaagaaggcatcctgattactctgtcgtgctgctgctgagacttgccaagacatatgaaaccactctagagaagtgctgtgccgctgcagatcctcatgaatgctatgccaaagtgttcgatgaatttaaacctcttgtggaagagcctcagaatttaatcaaacaaaattgtgagctttttgagcagcttggagagtacaaattccagaatgcgctattagttcgttacaccaagaaagtaccccaagtgtcaactccaactcttgtagaggtctcaagaaacctaggaaaagtgggcagcaaatgttgtaaacatcctgaagcaaaaagaatgccctgtgcagaagactatctatccgtggtcctgaaccagttatgtgtgttgcatgagaaaacgccagtaagtgacagagtcaccaaatgctgcacagaatccttggtgaacaggcgaccatgcttttcagctctggaagtcgatgaaacatacgttcccaaagagtttaatgctgaaacattcaccttccatgcagatatatgcacactttctgagaaggagagacaaatcaagaaacaaactgcacttgttgagctcgtgaaacacaagcccaaggcaacaaaagagcaactgaaagctgttatggatgatttcgcagcttttgtagagaagtgctgcaaggctgacgataaggagacctgctttgccgaggagggtaaaaaacttgttgctgcaagtcaagctgccttaggcttataacatcacatttaaaagcatctcagcctaccatgagaataagagaaagaaaatgaagatcaaaagcttattcatctgtttttctttttcgttggtgtaaagccaacaccctgtctaaaaaacataaatttctttaatcattttgcctcttttctctgtgcttcaattaataaaaaatggaaagaatctaatagagtggtacagcactgttatttttcaaagatgtgttgctatcctgaaaattctgtaggttctgtggaagttccagtgttctctcttattccacttcggtagaggatttctagtttcttgtgggctaattaaataaatcattaatactcttctaagtt

SEQ ID NO: 1546 - DNA, 2366 bp, Homo sapiens; identical to SEQ ID NO: 1542

SEQ ID NO: 1547 - DNA, 2148 bp, Homo sapiens
tgtcaaccccacacgcctttggcacaatgaagtgggtaacctttatttcccttctttttctctttagctcggcttattccaggggtgtgtttcgtcgagatgcacacaagagtgaggttgctcatcggtttaaagatttgggagaagaaaatttcaaagccttggtgttgattgcctttgctcagtatcttcagcagtgtccatttgaagatcatgtaaaattagtgaatgaagtaactgaatttgcaaaaacatgtgttgctgatgagtcagctgaaaattgtgacaaatcacttcataccctttttggagacaaattatgcacagttgcaactcttcgtgaaacctatggtgaaatggctgactgctcccaaacctcccccgattggtgagaccagaggttgatgtgatgtgcactgcttttcatgacaatgaagagacatttttgaaaaaatacttatatgaaattgccagaagacatccttacttttatgccccggaactccttttctttgctaaaaggtataaagctgcttttacagaatgttgccaagctgctgataaagctgcctgcctgttgccaaagctcgatgaacttcgggatgaagggaaggcttcgtctgccaaacagagactcaagtgtgccagtctccaaaaatttggagaaagagctttcaaagcatgggcagtagctcgcctgagccagagatttcccaaagctgagtttgcagaagtttccaagttagtgacagatcttaccaaagtccacacggaatgctgccatggagatctgcttgaatgtgctgatgacagggcggaccttgccaagtatatctgtgaaaatcaagattcgatctccagtaaactgaaggaatgctgtgaaaaacctctgttggaaaaatcccactgcattgccgaagtggaaaatgatgagatgcctgctgacttgccttcattagctgctgattttgttgaaagtaaggatgtttgcaaaaactatgctgaggcaaaggatgtcttcctgggcatgtttttgtatgaatatgcaagaaggcatcctgattactctgtcgtgctgctgctgagacttgccaagacatatgaaaccactctagagaagtgctgtgccgctgcagatcctcatgaatgctatgccaaagtgttcgatgaatttaaacctcttgtggaagagcctcagaatttaatcaaacaaaattgtgagctttttgagcagcttggagagtacaaattccagaatgcgctattagttcgttacaccaagaaagtaccccaagtgtcaactccaactcttgtagaggtctcaagaaacctaggaaaagtgggcagcaaatgttgtaaacatcctgaagcaaaaagaatgccctgtgcagaagactatctatccgtggtcctgaaccagttatgtgtgttgcatgagaaaacgccagtaagtgacagagtcaccaaatgctgcacagaatccttggtgaacaggcgaccatgcttttcagctctggaagtcgatgaaacatacgttcccaaagagtttaatgctgaaacattcaccttccatgcagatatatgcacactttctgagaaggagagacaaatcaagaaacaaactgcacttgttgagctcgtgaaacacaagcccaaggcaacaaaagagcaactgaaagctgttatggatgatttcgcagcttttgtagagaagtgctgcaaggctgacgataaggagacctgctttgccgaggagggtaaaaaacttgttgctgcaagtcaagctgccttaggcttataacatcacatttaaaagcatctcagcctaccatgagaataagagaaagaaaatgaagatcaaaagcttattcatctgtttttctttttcgttggtgtaaagccaacaccctgtctaaaaaacataaatttctttaatcattttgcctcttttctctgtgcttcaattaataaaaaatggaaagaatctaatagagtggtacagcactgttatttttcaaagatgtgttgctatcctgaaaattctgtaggttctgtggaagttccagtgttctctcttattccacttcggtagaggatttctagtttcttgtgggctaattaaataaatcattaatactcttctaagtt

SEQ ID NO: 1548 - DNA, 2134 bp, Homo sapiens
cacgcctttggcacaatgaagtgggtaacctttatttcccttctttttctctttagctcggcttattccaggggtgtgtttcgtcgagatgcacacaagagtgaggttgctcatcggtttaaagatttgggagaagaaaatttcaaagccttggtgttgattgcctttgctcagtatcttcagcagtgtccatttgaagatcatgtaaaattagtgaatgaagtaactgaatttgcaaaaacatgtgttgctgatgagtcagctgaaaattgtgacaaatcacttcataccctttttggagacaaattatgcacagttgcaactcttcgtgaaacctatggtgaaatggctgactgctgtgcaaaacaagaacctgagagaaatgaatgcttcttgcaacacaaagatgacaacccaaacctcccccgattggtgagaccagaggttgatgtgatgtgcactgcttttcatgacaatgaagagacatttttgaaaaaatacttatatgaaattgccagaagacatccttacttttatgccccggaactccttttctttgctaaaagttgtagctcgatgaacttcgggatgaagggaaggcttcgtctgccaaacagagactcaagtgtgccagtctccaaaaatttggagaaagagctttcaaagcatgggcagtagctcgcctgagccagagatttcccaaagctgagtttgcagaagtttccaagttagtgacagatcttaccaaagtccacacggaatgctgccatggagatctgcttgaatgtgctgatgacagggcggaccttgccaagtatatctgtgaaaatcaagattcgatctccagtaaactgaaggaatgctgtgaaaaacctctgttggaaaaatcccactgcattgccgaagtggaaaatgatgagatgcctgctgacttgccttcattagctgctgattttgttgaaagtaaggatgtttgcaaaaactatgctgaggcaaaggatgtcttcctgggcatgtttttgtatgaatatgcaagaaggcatcctgattactctgtcgtgctgctgctgagacttgccaagacatatgaaaccactctagagaagtgctgtgccgctgcagatcctcatgaatgctatgccaaagtgttcgatgaatttaaacctcttgtggaagagcctcagaatttaatcaaacaaaattgtgagctttttgagcagcttggagagtacaaattccagaatgcgctattagttcgttacaccaagaaagtaccccaagtgtcaactccaactcttgtagaggtctcaagaaacctaggaaaagtgggcagcaaatgttgtaaacatcctgaagcaaaaagaatgccctgtgcagaagactatctatccgtggtcctgaaccagttatgtgtgttgcatgagaaaacgccagtaagtgacagagtcaccaaatgctgcacagaatccttggtgaacaggcgaccatgcttttcagctctggaagtcgatgaaacatacgttcccaaagagtttaatgctgaaacattcaccttccatgcagatatatgcacactttctgagaaggagagacaaatcaagaaacaaactgcacttgttgagctcgtgaaacacaagcccaaggcaacaaaagagcaactgaaagctgttatggatgatttcgcagcttttgtagagaagtgctgcaaggctgacgataaggagacctgctttgccgaggagggtaaaaaacttgttgctgcaagtcaagctgccttaggcttataacatcacatttaaaagcatctcagcctaccatgagaataagagaaagaaaatgaagatcaaaagcttattcatctgtttttctttttcgttggtgtaaagccaacaccctgtctaaaaaacataaatttctttaatcattttgcctcttttctctgtgcttcaattaataaaaaatggaaagaatctaatagagtggtacagcactgttatttttcaaagatgtgttgctatcctgaaaattctgtaggttctgtggaagttccagtgttctctcttattccacttcggtagaggatttctagtttcttgtgggctaattaaataaatcattaatactcttctaagtt

SEQ ID NO: 1549 - DNA, 2050 bp, Homo sapiens
gcctttggcacaatgaagtgggtaacctttatttcccttctttttctctttagctcggcttattccaggggtgtgtttcgtcgagatgcacacaagagtgaggttgctcatcggtttaaagatttgggagaagaaaatttcaaagccttggtgttgattgcctttgctcagtatcttcagcagtgtccatttgaagatcatgtaaaattagtgaatgaagtaactgaatttgcaaaaacatgtgttgctgatgagtcagctgaaaattgtgacaaatcacttcataccctttttggagacaaattatgcacagttgcaactcttcgtgaaacctatggtgaaatggctgactgctgtgcaaaacaagaacctgagagaaatgaatgcttcttgcaacacaaagatgacaacccaaacctcccccgattggtgagaccagaggttgatgtgatgtgcactgcttttcatgacaatgaagagacatttttgaaaaaatacttatatgaaattgccagaagacatccttacttttatgccccggaactccttttctttgctaaaaggtataaagctgcttttacagaatgttgccaagctgctgataaagctgcctgcctgttgccaaagctcgatgaacttcgggatgaagggaaggcttcgtctgccaaacagagactcaagtgtgccagtctccaatttcccaaagctgagtttgcagaagtttccaagttagtgacagatcttaccaaagtccacacggaatgctgccatggagatctgcttgaatgtgctgatgacagggcggaccttgccaagtatatctgtgaaaatcaagattcgatctccagtaaactgaaggaatgctgtgaaaaacctctgttggaaaaatcccactgcattgccgaagtggaaaatgatgagatgcctgctgacttgccttcattagctgctgattttgttgaaagtaaggatgtttgcaaaaagtttttgtatgaatatgcaagaaggcatcctgattactctgtcgtgctgctgctgagacttgccaagacatatgaaaccactctagagaagtgctgtgccgctgcagatcctcatgaatgctatgccaaagtgttcgatgaatttaaacctcttgtggaagagcctcagaatttaatcaaacaaaattgtgagctttttgagcagcttggagagtacaaattccagaatgcgctattagttcgttacaccaagaaagtaccccaagtgtcaactccaactcttgtagaggtctcaagaaacctaggaaaagtgggcagcaaatgttgtaaacatcctgaagcaaaaagaatgccctgtgcagaagactatctatccgtggtcctgaaccagttatgtgtgttgcatgagaaaacgccagtaagtgacagactctggaagtcgatgaaacatacgttcccaaagagtttaatgctgaaacattcaccttccatgcagatatatgcacactttctgagaaggagagacaaatcaagaaacaaactgcacttgttgagctcgtgaaacacaagcccaaggcaacaaaagagcaactgaaagctgttatggatgatttcgcagcttttgtagagaagtgctgcaaggctgacgataaggagacctgctttgccgaggagggtaaaaaacttgttgctgcaagtcaagctgccttaggcttataacatcacatttaaaagcatctcagcctaccatgagaataagagaaagaaaatgaagatcaaaagcttattcatctgtttttctttttcgttggtgtaaagccaacaccctgtctaaaaaacataaatttctttaatcattttgcctcttttctctgtgcttcaattaataaaaaatggaaagaatctaatagagtggtacagcactgttatttttcaaagatgtgttgctatcctgaaaattctgtaggttctgtggaagttccagtgttctctcttattccacttcggtagaggatttctagtttcttgtgggctaattaaataaatcattaatactcttctaagtt

SEQ ID NO: 1550 - DNA, 2147 bp, Homo sapiens
gtcaaccccacacgcctttggcacaatgaagtgggtaacctttatttcccttctttttctctttagctcggcttattccaggggtgtgtttcgtcgagatgcacacaagagtgaggttgctcatcggtttaaagatttgggagaagaaaatttcaaagccttggtgttgattgcctttgctcagtatcttcagcagtgtccatttgaagatcatgtaaaattagtgaatgaagtaactgaatttgcaaaaacatgtgttgctgatgagtcagctgaaaattgtgacaaatcacttcataccctttttggagacaaattatgcacagttgcaactcttcgtgaaacctatggtgaaatggctgactgctgtgcaaaacaagaacctgagagaaatgaatgcttcttgcaacacaaagatgacaacccaaacctcccccgattggtgagaccagaggttgatgtgatgtgcactgcttttcatgacaatgaagagacatttttgaaaaaatacttatatgaaattgccagaagacatccttacttttatgccccggaactccttttctttgctgcctgttgccaaagctcgatgaacttcgggatgaagggaaggcttcgtctgccaaacagagactcaagtgtgccagtctccaaaaatttggagaaagagctttcaaagcatgggcagtagctcgcctgagccagagatttcccaaagctgagtttgcagaagtttccaagttagtgacagatcttaccaaagtccacacggaatgctgccatggagatctgcttgaatgtgctgatgacagggcggaccttgccaagtatatctgtgaaaatcaagattcgatctccagtaaactgaaggaatgctgtgaaaaacctctgttggaaaaatcccactgcattgccgaagtggaaaatgatgagatgcctgctgacttgccttcattagctgctgattttgttgaaagtaaggatgtttgcaaaaactatgctgaggcaaaggatgtcttcctgggcatgtttttgtatgaatatgcaagaaggcatcctgattactctgtcgtgctgctgctgagacttgccaagacatatgaaaccactctagagaagtgctgtgccgctgcagatcctcatgaatgctatgccaaagtgttcgatgaatttaaacctcttgtggaagagcctcagaatttaatcaaacaaaattgtgagctttttgagcagcttggagagtacaaattccagaatgcgctattagttcgttacaccaagaaagtaccccaagtgtcaactccaactcttgtagaggtctcaagaaacctaggaaaagtgggcagcaaatgttgtaaacatcctgaagcaaaaagaatgccctgtgcagaagactatctatccgtggtcctgaaccagttatgtgtgttgcatgagaaaacgccagtaagtgacagagtcaccaaatgctgcacagaatccttggtgaacaggcgaccatgcttttcagctctggaagtcgatgaaacatacgttcccaaagagtttaatgctgaaacattcaccttccatgcagatatatgcacactttctgagaaggagagacaaatcaagaaacaaactgcacttgttgagctcgtgaaacacaagcccaaggcaacaaaagagcaactgaaagctgttatggatgatttcgcagcttttgtagagaagtgctgcaaggctgacgataaggagacctgctttgccgaggagggtaaaaaacttgttgctgcaagtcaagctgccttaggcttataacatcacatttaaaagcatctcagcctaccatgagaataagagaaagaaaatgaagatcaaaagcttattcatctgtttttctttttcgttggtgtaaagccaacaccctgtctaaaaaacataaatttctttaatcattttgcctcttttctctgtgcttcaattaataaaaaatggaaagaatctaatagagtggtacagcactgttatttttcaaagatgtgttgctatcctgaaaattctgtaggttctgtggaagttccagtgttctctcttattccacttcggtagaggatttctagtttcttgtgggctaattaaataaatcattaatactcttctaagtt

SEQ ID NO: 1551 - DNA, 2227 bp, Homo sapiens
agcttttctcttctgtcaaccccacacgcctttggcacaatgaagtgggtaacctttatttcccttctttttctctttagctcggcttattccaggggtgtgtttcgtcgagatgcacacaagagtgaggttgctcatcggtttaaagatttgggagaagaaaatttcaaagccttggtgttgattgcctttgctcagtatcttcagcagtgtccatttgaagatcatgtaaaattagtgaatgaagtaactgaatttgcaaaaacatgtgttgctgatgagtcagctgaaaattgtgacaaatcacttcataccctttttggagacaaattatgcacagttgcaactcttcgtgaaacctatggtgaaatggctgactgctgtgcaaaacaagaacctgagagaaatgaatgcttcttgcaacacaaagatgacaacccaaacctcccccgattggtgagaccagaggttgatgtgatgtgcactgcttttcatgacaatgaagagacatttttgaaaaaatacttatatgaaattgccagaagacatccttacttttatgccccggaactccttttctttgctaaaagctcgatgaacttcgggatgaagggaaggcttcgtctgccaaacagagactcaagtgtgccagtctccaaaaatttggagaaagagctttcaaagcatgggcagtagctcgcctgagccagagatttcccaaagctgagtttgcagaagtttccaagttagtgacagatcttaccaaagtccacacggaatgctgccatggagatctgcttgaatgtgctgatgacagggcggaccttgccaagtatatctgtgaaaatcaagattcgatctccagtaaactgaaggaatgctgtgaaaaacctctgttggaaaaatcccactgcattgccgaagtggaaaatgatgagatgcctgctgacttgccttcattagctgctgattttgttgaaagtaaggatgtttgcaaaaactatgctgaggcaaaggatgtcttcctgggcatgtttttgtatgaatatgcaagaaggcatcctgattactctgtcgtgctgctgctgagacttgccaagacatatgaaaccactctagagaagtgctgtgccgctgcagatcctcatgaatgctatgccaaagtgttcgatgaatttaaacctcttgtggaagagcctcagaatttaatcaaacaaaattgtgagctttttgagcagcttggagagtacaaattccagaatgcgctattagttcgttacaccaagaaagtaccccaagtgtcaactccaactcttgtagaggtctcaagaaacctaggaaaagtgggcagcaaatgttgtaaacatcctgaagcaaaaagaatgccctgtgcagaagactatctatccgtggtcctgaaccagttatgtgtgttgcatgagaaaacgccagtaagtgacagagtcaccaaatgctgcacagaatccttggtgaacaggcgaccatgcttttcagctctggaagtcgatgaaacatacgttcccaaagagtttaatgctgaaacattcaccttccatgcagatatatgcacactttctgagaaggagagacaaatcaagaaacaaactgcacttgttgagctcgtgaaacacaagcccaaggcaacaaaagagcaactgaaagctgttatggatgatttcgcagcttttgtagagaagtgctgcaaggctgacgataaggagacctgctttgccgaggagggtaaaaaacttgttgctgcaagtcaagctgccttaggcttataacatcacatttaaaagcatctcagcctaccatgagaataagagaaagaaaatgaagatcaaaagcttattcatctgtttttctttttcgttggtgtaaagccaacaccctgtctaaaaaacataaatttctttaatcattttgcctcttttctctgtgcttcaattaataaaaaatggaaagaatctaatagagtggtacagcactgttatttttcaaagatgtgttgctatcctgaaaattctgtaggttctgtggaagttccagtgttctctcttattccacttcggtagaggatttctagtttcttgtgggctaattaaataaatcattaatactcttctaagttatggattataaacattcaaaataatattttgacattatgataattctgaataaaagaacaaaaaccatggtatag

SEQ ID NO: 1552 - DNA, 1642 bp, Homo sapiens
ctagcttttctcttctgtcaaccccacacgcctttggcacaatgaagtgggtaacctttatttcccttctttttctctttagctcggcttattccaggggtgtgtttcgtcgagatgcacacaagagtgaggttgctcatcggtttaaagatttgggagaagaaaatttcaaagccttggcagtagctcgcctgagccagagatttcccaaagctgagtttgcagaagtttccaagttagtgacagatcttaccaaagtccacacggaatgctgccatggagatctgcttgaatgtgctgatgacagggcggaccttgccaagtatatctgtgaaaatcaagattcgatctccagtaaactgaaggaatgctgtgaaaaacctctgttggaaaaatcccactgcattgccgaagtggaaaatgatgagatgcctgctgacttgccttcattagctgctgattttgttgaaagtaaggatgtttgcaaaaactatgctgaggcaaaggatgtcttcctgggcatgtttttgtatgaatatgcaagaaggcatcctgattactctgtcgtgctgctgctgagacttgccaagacatatgaaaccactctagagaagtgctgtgccgctgcagatcctcatgaatgctatgccaaagtgttcgatgaatttaaacctcttgtggaagagcctcagaatttaatcaaacaaaattgtgagctttttgagcagcttggagagtacaaattccagaatgcgctattagttcgttacaccaagaaagtaccccaagtgtcaactccaactcttgtagaggtctcaagaaacctaggaaaagtgggcagcaaatgttgtaaacatcctgaagcaaaaagaatgccctgtgcagaagactatctatccgtggtcctgaaccagttatgtgtgttgcatgagaaaacgccagtaagtgacagagtcaccaaatgctgcacagaatccttggtgaacaggcgaccatgcttttcagctctggaagtcgatgaaacatacgttcccaaagagtttaatgctgaaacattcaccttccatgcagatatatgcacactttctgagaaggagagacaaatcaagaaacaaactgcacttgttgagctcgtgaaacacaagcccaaggcaacaaaagagcaactgaaagctgttatggatgatttcgcagcttttgtagagaagtgctgcaaggctgacgataaggagacctgctttgccgaggagggtaaaaaacttgttgctgcaagtcaagctgccttaggcttataacatcacatttaaaagcatctcagcctaccatgagaataagagaaagaaaatgaagatcaaaagcttattcatctgtttttctttttcgttggtgtaaagccaacaccctgtctaaaaaacataaatttctttaatcattttgcctcttttctctgtgcttcaattaataaaaaatggaaagaatctaatagagtggtacagcactgttatttttcaaagatgtgttgctatcctgaaaattctgtaggttctgtggaagttccagtgttctctcttattccacttcggtagaggatttctagtttcttgtgggctaattaaataaatcattaatactcttctaagtt

SEQ ID NO: 1553 - DNA, 2366 bp, Homo sapiens; identical to SEQ ID NO: 1542

SEQ ID NO: 1554 - DNA, 2084 bp, Homo sapiens
aaccccacacgcctttggcacaatgaagtgggtaacctttatttcccttctttttctctttagctcggcttattccaggggtgtgtttcgtcgagatgcacacaagagtgaggttgctcatcggtttaaagatttgggagaagaaaatttcaaagccttggtgttgattgcctttgctcagtatcttcagcagtgtccatttgaagatcatgtaaaattagtgaatgaagtaactgaatttgcaaaaacatgtgttgctgatgagtcagctgaaaattgtgacaaatcacttcataccctttttggagacaaattatgcacagttgcaactcttcgtgaaacctatggtgaaatggctgactgctgtgcaaaacaagaacctgagagaaatgaatgcttcttgcaacacaaagatgacaacccaaacctcccccgattggtgagaccagaggttgatgtgatgtgcactgcttttcatgacaatgaagagacatttttgaaaaaatacttatatgaaattgccagaagacatccttacttttatgccccggaactccttttctttgctaaaaggtataaagctgcttttacagaatgttgccaagctgctgataaagctgcctgcctgttgccaaagctcgatgaacttcgggatgaagggaaggcttcgtctgccaaacagagactcaagtgtgccagtctccaaaaatttggagaaagagctttcaaagcatgggcagtagctcgcctgagccagagatttcccaaagctgagtttgcagaagtttccaagttagtgacagatcttaccaaagtccacacggaatgctgccatggagatctgcttgaatgtgctgatgacagggcggaccttgccaagtatatctgtgaaaatcaagattcgatctccagtaaactgaaggaatgctgtgaaaaacctctgttggaaaaatcccactgcattgccgaagtggaaaatgatgagatgcctgctgacttgccttcattagctgctgattttgttgaaagtaaggatgtttgcaaaaactatgctgaggcaaaggatgtcttcctgggcatgtttttgtatgaatatgcaagaaggcatcctgattactctgtcgtgctgctgctgagacttgccaagacatatgaaaccactctagagaagtgctgtgccgctgcagatcctcatgaatgctatgccaaagtgttcgatgaatttaaacctcttgtggaagagcctcagaatttaatcaaacaaaattgtgagctttttgagcagcttggagagtacaaattccagaatgcgctattagttcgttacaccaagaaagtaccccaagtgtcaactccaactcttgtagaggtctcaagaaacctaggaaaagtgggcagcaaatgttgtaaacatcctgaagcaaaaagaatgccctgtgcagaagactattggaagtcgatgaaacatacgttcccaaagagtttaatgctgaaacattcaccttccatgcagatatatgcacactttctgagaaggagagacaaatcaagaaacaaactgcacttgttgagctcgtgaaacacaagcccaaggcaacaaaagagcaactgaaagctgttatggatgatttcgcagcttttgtagagaagtgctgcaaggctgacgataaggagacctgctttgccgaggagggtaaaaaacttgttgctgcaagtcaagctgccttaggcttataacatcacatttaaaagcatctcagcctaccatgagaataagagaaagaaaatgaagatcaaaagcttattcatctgtttttctttttcgttggtgtaaagccaacaccctgtctaaaaaacataaatttctttaatcattttgcctcttttctctgtgcttcaattaataaaaaatggaaagaatctaatagagtggtacagcactgttatttttcaaagatgtgttgctatcctgaaaattctgtaggttctgtggaagttccagtgttctctcttattccacttcggtagaggatttctagtttcttgtgggctaattaaataaatcattaatactcttctaagtt

SEQ ID NO: 1555 - DNA, 2220 bp, Homo sapiens
ccgcgctgccgatcgccgggaggacccccgcctcgccgaagacgggcggggcaagccgagcctcacggggtccccggagctgggccgggcctccagatggagaaggcgcaacggggagttcttgagttccactgccttaaggatgacagtcgtagggaaccctcgaagttggagctgccagtggttgccaatcctgatactgttgctgggcacaggccatgggccaggggtggaaggcgtgacacactacaaggccggcgaccctgttattctgtatgtcaacaaagtgggaccctaccataaccctcaggaaacttaccactactatcagcttccagtctgctgccctgagaagatacgtcacaaaagccttagcctgggtgaagtgctggatggggaccgaatggctgagtctttgtatgagatccgctttcgggaaaacgtggagaagagaattctgtgccacatgcagctcagttctgcacaggtggagcagctgcgccaggccattgaagaactgtactactttgaatttgtggtagatgacttgccaatccggggctttgtgggctacatggaggagagtggtttcctgccacacagccacaagataggactctggacccatttggacttccacctagaattccatggagaccgaattatatttgccaatgtttcagtgcgggacgtcaagccccacagcttggatgggttacgacctgacgagttcctaggccttacccacacttatagcgtgcgctggtctgagacttcagtggagcgtcggagtgacaggcgccgtggtgacgatggtggtttctttcctcgaacactggaaatccattggttgtccatcatcaactccatggtgcttgtgtttttactggtgggttttgtggctgtcattctaatgcgtgtgcttcggaatgacctggctcggtacaacttagatgaggagaccacctctgcaggttctggtgatgactttgaccagggtgacaatggctggaaaattatccatacagatgtcttccgcttccccccataccgtggtctgctctgtgctgtgcttggcgtgggtgcccagttcctggcccttggcactggcattattgtcatggcactgctgggcatgttcaatgtgcaccgtcatggggccattaactcagcagccatcttgttgtatgccctgacctgctgcatctctggctacgtgtccagccacttctaccggcagattggaggcgagcgttgggtgtggaacatcattctcaccaccagtctcttctctgtgcctttcttcctgacgtggagtgtggtgaactcagtgcattgggccaatggttcgacacaggctctgccagccacaaccatcctgctgcttctgacggtttggctgctggtgggctttcccctcactgtcattggaggcatctttgggaagaacaacgccagcccctttgatgcaccctgtcgcaccaagaacatcgcccgggagattccaccccagccctggtacaagtctactgtcatccacatgactgttggaggcttcctgcctttcagtgccatctctgtggagctgtactacatctttgccacagtatggggtcgggagcagtacactttgtacggcatcctcttctttgtcttcgccatcctgctgagtgtgggggcttgcatctccattgcactcacctacttccagttgtctggggaggattaccgctggtggtggcgatctgtgctgagtgttggctccaccggcctcttcatcttcctctactcagttttctattatgcccggcgctccaacatgtctggggcagtacagacagtagagttcttcggctactccttactcactggttatgtcttcttcctcatgctgggcaccatctcctttttttcttccctaaagttcatccggtatatctatgttaacctcaagatggactgagttctgtatggcagaactattgctgttctctccctttcttcatgccctgttgaactctcctaccagcttctcttctgattgactgaattgtgtgatggcattgttgccttcccttttgccctttgggcattccttccccagagagggcctggaaattataaatctctatcacataaggattatatatttgaactttttaagttgcctttagttttggtcctgatttttctttttacaattaccaaaataaaatttat

SEQ ID NO: 1556 - DNA, 1783 bp, Homo sapiens
gttccactgccttaaggatgacagtcgtagggaaccctcgaagttggagctgccagtggttgccaatcctgatactgttgctgggcacaggccatgggccaggggtggaaggcgtgacacactacaaggccggcgaccctgttattctgtatgtcaacaaagtgggaccctaccataaccctcaggaaacttaccactactatcagcttccagtctgctgccctgagaagatacgtcacaaaagccttagcctgggtgaagtgctggatggggaccgaatggctgagtctttgtatgagatccgctttcgggaaaacgtggagaagagaattctgtgccacatgcagctcagttctgcacaggtggagcagctgcgccaggccattgaagaactgtactactttgaatttgtggtagatgacttgccaatccggggctttgtgggctacatggaggagagtggtttcctgccacacagccacaagataggactctggacccatttggacttccacctagaattccatggagaccgaattatatttgccaatgtttcagtgcgggacgtcaagccccacagcttggatgggttacgacctgacgagttcctaggccttacccacacttatagcgtgcgctggtctgagacttcagtggagcgtcggagtgacaggcgccgtggtgacgatggtggtttctttcctcgaacactggaaatccattggttgtccatcatcaactccatggtgcttgtgtttttactggtgggttttgtggctgtcattctaatgcgtgtgcttcggaatgacctggctcggtacaacttagatgaggagaccacctctgcaggttctggtgatgactttgaccagggtgacaatggctggaaaattatccatacagatgtcttccgcttccccccataccgtggtctgctctgtgctgtgcttggcgtgggtgcccagttcctggcccttggcactggcattattgtcatggcactgctgggcatgttcaatgtgcaccgtcatggggccattaactcagcagccatcttgttgtatgccctgacctgctgcatctctggctacgtgtccagccacttctaccggcagattggaggcgagcgttgggtgtggaacatcattctcaccaccagtctcttctctgtgcctttcttcctgacgtggagtgtggtgaactcagtgcattgggccaatggttcgacacaggctctgccagccacaaccatcctgctgcttctgacggtttggctgctggtgggctttcccctcactgtcattggaggcatctttgggaagaacaacgccagcccctttgatgcaccctgtcgcaccaagaacatcgcccgggagattccaccccagccctggtacaagtctactgtcatccacatgactgttggaggcttcctgcctttcaggtatcctccctttattccatggctattactgtcaggttcctgacctcaatttttcctgtccctactcatccagtaccctaacccaacccgttgatccctggttcagtggtaccattcagagatcattaaatggttcctcctatccccaagcaggactgagcttgaatgatatgagtgtctcacttataaagctctccggagacatttcccccttcaccttcctggtttctgactttaatgcctatggacatcatgtggggtttaaagcccatttgatgacccatttactttgttgaatacctctttgtgccaggcaaagaataaagtggaataaaatgg

SEQ ID NO: 1557 - DNA, 2220 bp, Homo sapiens; identical to SEQ ID NO: 1555

SEQ ID NO: 1558 - DNA, 2220 bp, Homo sapiens; identical to SEQ ID NO: 1555

SEQ ID NO: 1559 - DNA, 2220 bp, Homo sapiens; identical to SEQ ID NO: 1555

SEQ ID NO: 1560 - DNA, 4339 bp, Homo sapiens
atgcagtacaaaccagtgtcctccagagtccgctgtgcctacggccagagcagcgacagagccttcctcaaacctgtagtgactgccacactttgcaaggacaccgtagagggggcatgtccgcgctccaacttcctcccgacgcagcctctgattggctcctgggcttataagaaacgcgtgaatgagcagctgccgcgggcagaaagttgccggaggtctccgggtggtatcgccctttcctctttgccagcccgctggcgagccgagccagggcaagatgaggtcgtcctgtgtcctgctcaccgccctggtggcgctggccgcctattacgtctacatcccgctgcctggctccgtgtccgacccctggaagctgatgctgctggacgccactttccggggtgcacagcaagtgagtaacctgatccactacctgggactgagccatcacctgctggcactgaattttatcattgtttcttttggcaaaaaaagcgcgtggtcttctgcccaagtgaaggtgaccgacacagactttgatggtgtggaagtcagagtgtttgaaggccctccgaagcccgaagagccactgaaacgcagcgtcgtttatatccacggaggaggctgggccttggcaagtgcaaaaatcaggtattatgatgagctgtgtacagcaatggctgaggaattgaatgctgtcattgtttccattgaatacaggctagttccaaaggtttattttcctgagcaaattcatgatgttgtacgggccacaaagtatttcctgaagccagaagtcttacagaagtatatggttgatccaggcagaatttgcatttctggtgacagtgctggtggaaatctggctgctgcccttggacaacagtttactcaagatgccagcctaaaaaataagctcaaactacaagctttaatttatccagttcttcaagctttagattttaacacaccatcttatcagcaaaatgtgaacaccccaatcctgccccgctatgtcatggtgaagtattgggtggactacttcaaaggcaactatgactttgtgcaggcaatgatcgttaacaatcacacttcacttgatgtggaagaggctgctgctgtcagggcccgtctaaactggacatccctcttgcctgcatccttcacaaagaactacaagcctgttgtacagaccacaggcaatgccaggattgtccaggagcttcctcagttgctggatgcccgctccgccccactcattgcagaccaggcagtgctgcagctcctcccaaagacctacattctgacgtgtgagcatgatgtcctcagagacgatggcatcatgtatgccaagcgtttggagagtgccggtgtggaggtgaccctggatcactttgaggatggctttcacggatgtatgattttcactagctggcccaccaacttctcagtgggaatccggactaggaatagttacatcaagtggctagatcaaaacctgtaaaggagcaaaacttccagaagcctcgagcccctcttgacctcctacacctgctttggaaagacatgcactttttagttgactaattcttcctcccattcccctctacttgcgagttatggaatttctattccataactgaagtctttatgataacctaatttttaaaaatgaatttgactaacttaagtgcaaaacatgtaaatttggttcccagagtgggccaatctctctgttcttgttatcttagccaactatactgatacctacagctacagaaagcaggactaggaactggaaataactttgggtcctgccttcattaggacgttctttttagaagcagttcttccagctctggatcatagagtgacctttaataagttaaaaaaacgaggactccttaattctgctagagttaaccttgagttcagagcagtattaaatgcgtgcactttcaggtcagtactggggaccaagtaccctctggtcttttgtgaatggatggttttgtttcctatgggaattttggcaaaggttttctggaaagaacaagtttctcaaaggactttcttcctctagaatgttcattttatgagatcgctatctgtaagtccagttggattacaggaatacttgaaagttactttctaccactattagaaaatatgaagtcgcatgcactggatatctatatatcattaggtttttgttgtgtttttggttatgctgtcccccttctccttggggagatatttgggagcaaacttatttagatttagagtaaacttttcattatagagcaagtaaaaacagacaaatgaaacaacctagtgtttcacataaaaatacttctgacataaagtaccaagagcagtgtgaatatacttggcatagtcaaaaaagaaaatacatttaatattagttcaaaattgttaaaaatacctttagaaggtctagtctattattgaaaactcaattttttcacttatatggctttaaaatggagctattttgctacaatataatgtattgtttatttttttaagttatttaatgttaatatacatagctagacttaaggtttttcagaaagatgtccataataaatattaaaaacaatggtattttttaaaaaactgccttagggttttaaaaccttccctacagttataaccacgtgtaattttgtggaaatgatataacagctattaatactactataacataggcataaatattttcgtgtttatatgcatatacaagttaaaataattagaaactatgactgcgcctagtaaagtcatctaggtttatagttcagtagcttaggcaaggcacacactgctcatctccgctttttagggtcagaggaacacaagctcatgttctgagtgaagggcgtacactggcacctggtgttgcctagatcccccatctcctccttccagccaggtctggaagtttcaacagcccaagcttaacttcatgtaaagtcttcactgccagtgggaacatctttgacacaacaagacactccaattgtgatttgagttgaggatctctgcctgccttcctgccgtccttccttcttccccgatccatgctacttttaggggctgcggagagcagcagcagagctgagtaatgatacagggcaccacggagagaaagtagaaccatttcactcctgggaagatggggtatttcccacttccagcaacgaaataacaaatgaaaagttgcatacttattgatgtattgtatgagccagtagcattttatgtacaaaacagaagtcaatgcaacagtatgtatgtgtgcctgtgtgtgtataaaaataaccattgaagctaacttgctaatgtacttaggcaagccacttcccatctctgggcctcgtctttcctccctctaaaatcaaagagctgaattatgtgatccttgaggtctcttccacttataataccaactgtcttgtcagactggcaaattatattggcctctccttatgtggtggtttttttggtaggtcatagttccttatacacagacacctgcatcatcgaaggtctttttttcctaaaaaaaaaaaatgggattttagttcttattctgtgataactatcctcctcatataatactattctttttgacaccatttgaaggaaccaatatttggaccttattttgaggttgtctgtctcgaagaaaaagaaaataaaatgtataggcagggttccttcaattggcattttccccagaattgtgagccaaagcctatagtaattgcagacagcaaatgattccggatctctaaaaggctctctcagatgaaaagggagtaaaggaaaaaagaggtcaaccactgtttctgataatgtacttgagtttcattgttcttttagtttgtattcttataaaaaatgtttacactctgcagattgattttttttttttagtactgtggctttcttttcctattttatgaaaaaaatgataatctttttgtaaaattgtctgtgaaatataaacattaatatataaagaaaaaccttgaagtgctgtatagtgaagtataaattaatgttttattgatttgtgaagaatttaagactattatataattatcttggtggatctattttatgcatgaccttttaacctttgactttgcttatttcccactacgaaggggaaggtagattttatgaatgattttaatagcaaatatattttataaagtgaaaatccagtgtggaggtagcaaagcatctatctattctgaatcatgtttggaaataaaattgctccatctgggaatgtgctttcatt

SEQ ID NO: 1561 - DNA, 2488 bp, Homo sapiens
gttccgtccggacggcgtttccacggacgcccaggagacagccggttgctgagccgggagcgctgactggcccggctgggcagggatgaaattgattctgcagtaaagatgttggtgtcattaaaaatgagctacaaagctgccgcgggggaggattacaaggctgactgtcctccagggaacccagcacctaccagtaatcatggcccagatgccacagaagctgaagaggattttgtggacccatggacagtacagacaagcagtgcaaaaggcatagactacgataagctcattgttcggtttggaagtagtaaaattgacaaagagctaataaaccgaatagagagagccaccggccaaagaccacaccacttcctgcgcagaggcatcttcttctcacacagagatatgaatcaggttcttgatgcctatgaaaataagaagccattttatctgtacacgggccggggcccctcttctgaagcaatgcatgtaggtcacctcattccatttattttcacaaagtggctccaggatgtatttaacgtgcccttggtcatccagatgacggatgacgagaagtatctgtggaaggacctgaccctggaccaggcctatagctatgctgtggagaatgccaaggacatcatcgcctgtggctttgacatcaacaagactttcatattctctgacctggactacatggggatgagctcaggtttctacaaaaatgtggtgaagattcaaaagcatgttaccttcaaccaagtgaaaggcattttcggcttcactgacagcgactgcattgggaagatcagttttcctgccatccaggctgctccctccttcagcaactcattcccacagatcttccgagacaggacggatatccagtgccttatcccatgtgccattgaccaggatccttactttagaatgacaagggacgtcgcccccaggatcggctatcctaaaccagccctgctgcactccaccttcttcccagccctgcagggcgcccagaccaaaatgagtgccagcgaccccaactcctccatcttcctcaccgacacggccaagcagatcaaaaccaaggtcaataagcatgcgttttctggagggagagacaccatcgaggagcacaggcagtttgggggcaactgtgatgtggacgtgtctttcatgtacctgaccttcttcctcgaggacgacgacaagctcgagcagatcaggaaggattacaccagcggagccatgctcaccggtgagctcaagaaggcactcatagaggttctgcagcccttgatcgcagagcaccaggcccggcgcaaggaggtcacggatgagatagtgaaagagttcatgactccccggaagctgtccttcgactttcagtagcactcgttttacatatgcttataaaagaagtgatgtatcagtaatgtatcaataatcccagcccagtcaaagcaccgccacctgtaggcttctgtctcatggtaattactgggcctggcctctgtaagcctgtgtatgttatcaatactgtttcttcctgtgagttccattatttctatctcttatgggcaaagcattgtgggtaattggtgctggctaacattgcatggtcggatagagaagtccagctgtgagtctctccccaaagcagccccacagtggagcctttggctggaagtccatgggccaccctgttcttgtccatggaggactccgagggttccaagtatactcttaagacccactctgtttaaaaatatatattctatgtatgcgtatatggaattgaaatgtcattattgtaacctagaaagtgctttgaaatattgatgtggggaggtttattgagcacaagatgtatttcagcccatgccccctcccaaaaagaaattgataagtaaaagcttcgttatacatttgactaagaaatcacccagctttaaagctgcttttaacaatgaagattgaacagagttcagcaattttgattaaattaagacttgggggtgaaactttccagtttactgaactccagaccatgcatgtagtccactccagaaatcatgctcgcttcccttggcacaccagtgttctcctgccaaatgaccctagaccctctgtcctgcagagtcagggtggcttttcccctgactgtgtccgatgccaaggagtcctggcctccgcagatgcttcattttgacccttggctgcagtggaagtcagcacagagcagtgccctggctgtgtccctggacgggtggacttagctagggagaaagtcgaggcagcagccctcgaggccctcacagatgtctaggcaggcctcatttcatcacgcagcatgtgcaggcctggaagagcaaagccaaatctcagggaagtccttggttgatgtatctgggtctcctctggagcactctgccctcctgtcacccagtagagtaaataaacttccttggctcctgct

SEQ ID NO: 1562 - DNA, 1767 bp, Homo sapiens
cagacactgggctctggccacgcgtcttagactccaaatctcggctcactggtccctttgaggaggtcgcctggtgttcccgtagccctccaccccaccgtaggagagcgcctgccacgagctccgcgcctcgctaagtgctttgctacgtgaactcttagttttcccaacatccctaagccgccgatacattatcacccacgtattgcggacgagagaaccgcctcggagaagctggctggctcgcttggagttttgcagctagtggcggagcgagcattccgagcagataagctccacaaacccaaagctacacagactgaggtcaaaccatctgtgaggtttaacctccgcacctccaaggacccagagcatgaaggatgctacctctccgtcggccacagccagcccttagaagactgcagtttcaacatgacagctaaaacctttttcatcattcacggatggacgatgagcggtatctttgaaaactggctgcacaaactcgtgtcagccctgcacacaagagagaaagacgccaatgtagttgtggttgactggctccccctggcccaccagctttacacggatgcggtcaataataccagggtggtgggacacagcattgccaggatgctcgactggctgcaggagaaggacgatttttctctcgggaatgtccacttgatcggctacagcctcggagcgcacgtggccgggtatgcaggcaacttcgtgaaaggaacggtgggccgaatcacaggtttggatcctgccgggcccatgtttgaaggggccgacatccacaagaggctctctccggacgatgcagattttgtggatgtcctccacacctacacgcgttccttcggcttgagcattggtattcagatgcctgtgggccacattgacatctaccccaatgggggtgacttccagccaggctgtggactcaacgatgtcttgggatcaattgcatatggaacaatcacagaggtggtaaaatgtgagcatgagcgagccgtccacctctttgttgactctctggtgaatcaggacaagccgagttttgccttccagtgcactgactccaatcgcttcaaaaaggggatctgtctgagctgccgcaagaaccgttgtaatagcattggctacaatgccaagaaaatgaggaacaagaggaacagcaaaatgtacctaaaaacccgggcaggcatgcctttcagagtttaccattatcagatgaaaatccatgtcttcagttacaagaacatgggagaaattgagcccaccttttacgtcaccctttatggcactaatgcagattcccagactctgccactggaaatagtggagcggatcgagcagaatgccaccaacaccttcctggtctacaccgaggaggacttgggagacctcttgaagatccagctcacctgggagggggcctctcagtcttggtacaacctgtggaaggagtttcgcagctacctgtctcaaccccgcaaccccggacgggagctgaatatcaggcgcatccgggtgaagtctggggaaacccagcggaaactgacattttgtacagaagaccctgagaacaccagcatatccccaggccgggagctctggtttcgcaagtgtcgggatggctggaggatgaaaaacgaaaccagaagtggacagcaattcactaaagaaccagaacaagaacatcatttcactgaagacgagaagaaaaattatttcaattgtagcagcttgaaggcc

SEQ ID NO: 1563 - DNA, 1997 bp, Homo sapiens
agcagcgagtccttgcctcccggcggctcaggacgagggcagatctcgttctggggcaagccgttgacactcgctccctgccaccgcccgggctccgtgccgccaagttttcattttccaccttctctgcctccagtcccccagcccctggccgagagaagggtcttaccggccgggattgctggaaacaccaagaggtggtttttgttttttaaaacttctgtttcttgggagggggtgtggcggggcaggatgagcaactccgttcctctgctctgtttctggagcctctgctattgctttgctgcggggagccccgtaccttttggtccagagggacggctggaagataagctccacaaacccaaagctacacagactgaggtcaaaccatctgtgaggtttaacctccgcacctccaaggacccagagcatgaaggatgctacctctccgtcggccacagccagcccttagaagactgcagtttcaacatgacagctaaaacctttttcatcattcacggatggacgatgagcggtatctttgaaaactggctgcacaaactcgtgtcagccctgcacacaagagagaaagacgccaatgtagttgtggttgactggctccccctggcccaccagctttacacggatgcggtcaataataccagggtggtgggacacagcattgccaggatgctcgactggctgcaggagaaggacgatttttctctcgggaatgtccacttgatcggctacagcctcggagcgcacgtggccgggtatgcaggcaacttcgtgaaaggaacggtgggccgaatcacaggtttggatcctgccgggcccatgtttgaaggggccgacatccacaagaggctctctccggacgatgcagattttgtggatgtcctccacacctacacgcgttccttcggcttgagcattggtattcagatgcctgtgggccacattgacatctaccccaatgggggtgacttccagccaggctgtggactcaacgatgtcttgggatcaattgcatatggaacaatcacagaggtggtaaaatgtgagcatgagcgagccgtccacctctttgttgactctctggtgaatcaggacaagccgagttttgccttccagtgcactgactccaatcgcttcaaaaaggggatctgtctgagctgccgcaagaaccgttgtaatagcattggctacaatgccaagaaaatgaggaacaagaggaacagcaaaatgtacctaaaaacccgggcaggcatgcctttcagagtttaccattatcagatgaaaatccatgtcttcagttacaagaacatgggagaaattgagcccaccttttacgtcaccctttatggcactaatgcagattcccagactctgccactggaaatagtggagcggatcgagcagaatgccaccaacaccttcctggtctacaccgaggaggacttgggagacctcttgaagatccagctcacctgggagggggcctctcagtcttggtacaacctgtggaaggagtttcgcagctacctgtctcaaccccgcaaccccggacgggagctgaatatcaggcgcatccgggtgaagtctggggaaacccagcggaaactgacattttgtacagaagaccctgagaacaccagcatatccccaggccgggagctctggtttcgcaagtgtcgggatggctggaggatgaaaaacgaaaccagtcccactgtggagcttccctgagggtgcccgggcaagtcttgccagcaaggcagcaagacttcctgctatccaacccttttattaatgtataaccaggagaacatctgtgccaacggttggactttttatggctgagattcgggaggaagtgtgacaccaagcaggagaggaagaatgattttctttgtacttaggttttctaaggacattgttttaatctgtatcgtgccaaagttgtatcactgttaaacttctgaagacat

SEQ ID NO: 1564 - DNA, 1997 bp, Homo sapiens; identical to SEQ ID NO: 1563

SEQ ID NO: 1565 - DNA, 3407 bp, Homo sapiens
acgcaggacgccactgccctgtcgccccgcctgtgcagcccaggagctaggcgcggtagctggggctggcttttgaggggcgcgggcagccttctgactgggtcggaggcctgcgggcccgaagcctctgtccctcctgttcttgtccggcgctgcttagcccctccgcgtagtcatcatggatctgattttaaaccgaatggattatctgcaggtgggagtaacatctcagaagactatgaagctaattcctgcctcaagacacagagctacacaaaaggtggttattggagatcatgatggggtagttatgtgctttggcatgaagaaaggagaagcagcagcagtgttcaagactttacccgggccgaagattgcaaggctggaactgggaggggttatcaacacacctcaggagaaaatttttattgctgcagcatctgagattagaggcttcacaaaaagaggaaaacagttcctctcctttgaaacaaacctcactgaaagcattaaagctatgcacatatctggctcagacctctttctcagtgcaagttacatctataaccattattgtgactgcaaagaccaacattattacctttctggggataaaatcaatgatgtgatctgccttccagtggaaagattatctcgtatcacacctgtattggcctgccaggacagagtgctcagagttttacagggatctgatgtgatgtatgcagttgaagttcctggaccccctactgtcttagcactacacaatggaaatggcggtgactctggagaagaccttttgtttgggacatcagacggaaaacttgcgcttatacagattactacatccaaaccagtacgcaagtgggaaattcaaaatgagaaaaagagaggaggtattttgtgtattgacagctttgacattgtgggtgatggggttaaagatttacttgttgggagagatgacggaatggtggaagtgtatagttttgataatgcaaatgaacctgttctacgatttgatcagatgttgtctgaaagcgtcacatctatccagggtggttgtgtaggaaaagacagctatgatgaaatcgtggtgtccacatattcaggctgggttacaggtctgacaacagagcccattcataaggaaagtggaccaggagaagaactaaaaattaatcaggagatgcagaataaaatttcttccttacggaatgagttggaacatttgcagtataaggtattgcaggaaagagagaattatcaacagtcttctcaatcaagcaaagcaaaatcagcagtaccttcctttggtataaatgataaatttacactaaataaagatgatgccagttacagccttatcttagaggtacagactgcaatagataatgtcttaatacagagtgatgttccaatagatttacttgatgtggataaaaattctgctgttgttagctttagcagctgtgattctgagtcaaacgacaacttccttcttgccacttatcggtgccaggcagatactacaaggctggaactcaagattcgctcaattgaaggccagtatggcacactacaagcatatgtgactccaagaattcaacccaaaacctgtcaggtccgccagtaccacatcaaacctctttcactccatcaaagaactcactttattgatcatgacagacccatgaatacactgaccctaacaggccagttcagttttgctgaagttcactcctgggtggttttttgtctgcctgaagttccagaaaaacctccagcaggagaatgtgtgacattttactttcagaacacctttctagatacacaacttgaaagtacctacagaaaaggagagggagtttttaaatctgacaacatttctactatctccatcctaaaagatgtgctttctaaagaagctacaaaaaggaaaattaacctcaacatatcatacgagataaatgaagtatcagtcaaacacactttaaagctaatccacccaaagctggagtaccagttgcttttggctaagaaagtgcagttaattgatgctttaaaagaattacagattcatgagggaaatacgaactttctgataccagaatatcactgtattctagaagaggcagatcacctacaggaagaatacaaaaagcaacctgcacatcttgaaagactctatggcatgatcactgatcttttcatagataaatttaagtttaaaggcaccaatgtaaaaactaaagtaccccttctattggaaattctggacagttatgaccaaaatgcattgatttcattcttcgatgcagcatgacatacaaataaggtaaagtcccaaagaagtggtctgtttaaatgaaaaatgttaaaagagaattagaagttaactgtgtatgtactttaatttcaaatgcttttttatatctaaaaatatttgagatataatggctttttaaagtaatgcttctatttcttttgacaaattgaactttctaaaactaaaagagtctttttatttttaaaacacaagtagaatgatttaaataggattttaatgaatttttggcaagtggctgttttaatttttaaattgagaagtaatatgtggaaaattaaaatatattcaaatgtattacaaggtacataaacacataaacatgtagaccgctttataggcttcaaaatgtatttttatatattaccttatttgatcttcacaactgttgtaaaatttgtcaaatcatataagaaaactgattctcagtgaaattttgtgattaagaggacatgctaatattttgtaaagctgggaccagaacccaagtactggtacttgctttgtgtcctggttactatgtatgttgccagctagtggaaataacctaccaattgttttttctaggagataggattgatttgcaactgatattccttttgcttggtagtgttttatgactctgctgcagtttgtggaaatgctggacttggctcagtgctataaattgtagccaggaaataagaagagcttacacagagtcgggggatcttaattagacatgctgtaaccagtggagctattcagcgtgcttcaagtgaagagtgcagaaatagtgatgccatcttagattttcctacactagtatcttctagatctctttttatcatatatgacattaaggctacagaagttttgtgcattaatcttaattcatatttattaatttcaagggaatattgaaaggttttaaaatggcatacagataatggaaaataagctttatgtttcaagaagggcagactcacgaattttttagaaaacagtgcttcttaatgatatgctattatacttattagttatgtgcaagctttgtatattcttatatttatatataaat

SEQ ID NO: 1566 - DNA, 4852 bp, Homo sapiens
ggcggtgggtggtgcatgcgctcgcatcatggcggctgagtgggcttctcgtttctggctttgggctacgctgctgattcctgcggccgcggtctacgaagaccaagtgggcaagtttgattggagacagcaatatgttgggaaggtcaagtttgcctccttggaattttcccctggatccaagaagttggttgtagccacagagaagaatgtgattgcagcattaaattcccgaactggggagatcttgtggcgccatgttgacaagggcacggcagaaggggctgtggatgccatgctgctgcacggacaggatgtgatcactgtgtccaatggaggccgaatcatgcgttcctgggagactaacatcgggggcctgaactgggagataaccctggacagtggcagtttccaggcacttgggctggttggcctgcaggagtctgtaaggtacatcgcagtcctgaagaagactacacttgccctccatcacctctccagtgggcacctcaagtgggtggaacatctcccagaaagtgacagcatccactaccagatggtgtattcttacggctctggggtggtgtgggccctcggagttgttcccttcagccatgtgaacattgtcaagtttaatgtggaagatggagagattgttcagcaggttagggtttcaactccgtggctgcagcacctgtctggagcctgtggtgtggtggatgaggctgtcctggtgtgtcctgacccgagctcacgttccctccaaactttggctctggagacggaatgggagttgagacagatcccactgcagtctctcgacttagaatttggaagtggattccaaccccgggtcctgcctacccagcccaacccagtggacgcttcccgggcccagttcttcctgcacttgtccccaagccactatgctctgctgcagtaccattatggaacgctgagtttgcttaaaaacttcccacagactgccctagtgagctttgccaccactggggagaagacggtggctgcagtcatggcctgtcggaatgaagtgcagaaaagtagcagttctgaagatgggtcaatggggagcttttcggagaagtctagttcaaaggactctctggcttgcttcaatcagacctacaccattaacctatacctcgtggagacaggtcggcggctgctggacaccacgataacatttagcctggaacagagcggcactcggcctgagcggctgtatatccaggtgttcttgaagaaggatgactcagtgggctaccgggctttggtgcagacagaggatcatctgctacttttcctgcagcagttggcagggaaggtggtgctgtggagccgtgaggagtccctggcagaagtggtgtgcctagagatggtggacctccccctgactggggcacaggccgagctggaaggagaatttggcaaaaaggcagatggcttgctggggatgttcctgaaacgcctctcgtctcagcttatcctgctgcaagcatggacttcccacctctggaaaatgttttatgatgctcggaagccccggagtcagattaagaatgagatcaacattgacaccctggccagagatgaattcaacctccagaagatgatggtgatggtaacagcctcaggcaagctttttggcattgagagcagctctggcaccatcctgtggaaacagtatctacccaatgtcaagccagactcctcctttaaactgatggtccagagaactactgctcatttcccccatcccccacagtgcaccctgctggtgaaggacaaggagtcgggaatgagttctctgtatgtcttcaatcccatttttgggaagtggagtcaggtagctcccccagtgctgaagcgccccatcttgcagtccttgcttctcccagtcatggatcaagactacgccaaggtgttgctgttgatagatgatgaatacaaggtcacagcttttccagccactcggaatgtcttgcgacagctacatgagcttgccccttccatcttcttctatttggtggatgcagagcagggacggctgtgtggatatcggcttcgaaaggatctcaccactgagctgagttgggagctgaccattcccccagaagtacagcggatcgtcaaggtgaaggggaaacgcagcagtgagcacgttcattcccagggccgtgtgatgggggaccgcagtgtgctctacaagagcctgaaccccaacctgctggccgtggtgacagagagcacagacgcgcaccatgagcgcacctttattggcatcttcctcattgatggcgtcactgggcgtatcattcactcctctgtgcagaagaaagccaaaggccctgtccatatcgtgcattcagagaactgggtggtgtaccagtactggaacaccaaggctcggcgcaacgagtttaccgtactggagctctatgagggcactgagcaatacaacgccaccgccttcagctccctggaccgcccccagctgccccaggtcctccagcagtcctatatcttcccgtcctccatcagtgccatggaggccaccatcaccgaacggggcatcaccagccgacacctgctgattggactaccttctggagcaattctttcccttcctaaggctttgctggatccccgccgccccgagatcccaacagaacaaagcagagaggagaacttaatcccgtattctccagatgtacagatacacgcagagcgattcatcaactataaccagacagtttctcgaatgcgaggtatctacacagctccctcgggtctggagtccacttgtttggttgtggcctatggtttggacatttaccaaactcgagtctacccatccaagcagtttgacgttctgaaggatgactatgactacgtgttaatcagcagcgtcctctttggcctggtttttgccaccatgatcactaagagactggcacaggtgaagctcctgaatcgggcctggcgataaagaacaaagactgtgcctaaaagtggagagccaggggagtgtgggtcagataagcagctacagctgcagtttggtggattggtggagtatgtgtgtgtgtcagtgctcagctaagaactgtagggaagatggatgaccttcacgcagaactccttttgggatatacatgatgcagaaaggatcctacatggagagagacagaactctctcagctgacactctcagagattcctgatgggctttctcttgaagtccaaaggcgtctgcattgtttcctttctttgcccatccatgaatgttctgttttgttttttttaataagaattccggctgatttttgtgaggcctgtttaaattgactttactttgccttttgtgtttctcaattttatctagaaatctttctgactttttccatctcttgcttcaaagtaagaggggaactctccttgccgactccaccttataggtacatttggtgttttgcactgggaagaaataggatccatccttagctgaggcttgaggactgatccagcctctcatggcttccctccaaagtaacttagggttgagggatctatatgtgatgtcaaaacttactttaaacctctagtttcgtgctgtcatttattaggctgggccaccaaatctttgtttcaatttatcagaagccaagtgcatactagcgtcttgtttgttgcccattgcctatacttttcacctgagatgtgtgagttggggccttttaaaaactactgaattgtctgagccttgaagacatttccagggagaagagataatctctcatttcacccacaggctggtctaatcataacctagttaaagatgtccttgtttaagaaccccattatttatttttagtttttaatataaattaacatgtgggtcattatatttctccttaaatgaggaaattttaaattttattgatctaacctttgaagctttaaaaaaggagaaagagggtaggggtgggaaactggcatactgtgtgtatagcactgccgattggctaggccactgtgtctctgctacaaattaaagaaatcctaaaagttttccttggtcatagagttggggaatgacagaatttttctttgttgtgaaatgtatgtacagagtagaccatctctagccctgtggtgaaagaggtacactcgaatgtttgcataaagcaagtgacaaatgacactgtttaagtcctcttttgtgtcttagaagatcattttgaggctattttcacattagaggggataaaagcagtgaagacatggagtaagtgtattttattttagtaaggaaaggtcagtttaatcatatatgggttggttaggttatctaaaaatttgtcatctttctatggtcatatgctgatggtagattatggcagagaaggaagaggaaatgacaaccattttattaattgtcagtttgatattgagtgactgaatgtctaagaatctccagaaaaaaacaggcatctatcatcctgacccaaggcatattttaacataacctgggagaagagagttaagtacaagttaaaaaaaattctgccctagttttgagaaagcctggctggaattctgactgtcttacatacatatgtgcaaggttagcctgcaagattctagtttttatttaccagtgtgccagaatctgaaacaagctactgggagggaaggtatttgtcctttagtaaaattccctgtatttcagctgtaatcaaagttacctcaaagcaggtgctttttttttttttgagacagaatctcactctgttgcccaggctggagtgcagtggcacgatcttggctc

SEQ ID NO: 1567 - DNA, 4702 bp, Homo sapiens
ggcggtgggtggtgcatgcgctcgcatcatggcggctgagtgggcttctcgtttctggctttgggctacgctgctgattcctgcggccgcggtctacgaagaccaagtgggcaagtttgattggagacagcaatatgttgggaaggtcaagtttgcctccttggaattttcccctggatccaagaagttggttgtagccacagagaagaatgtgattgcagcattaaattcccgaactggggagatcttgtggcgccatgttgacaagggcacggcagaaggggctgtggatgccatgctgctgcacggacaggatgtgatcactgtgtccaatggaggccgaatcatgcgttcctgggagactaacatcgggggcctgaactgggagataaccctggacagtggcagtttccaggcacttgggctggttggcctgcaggagtctgtaaggtacatcgcagtcctgaagaagactacacttgccctccatcacctctccagtgggcacctcaagtgggtggaacatctcccagaaagtgacagcatccactaccagatggtgtattcttacggctctggggtggtgtgggccctcggagttgttcccttcagccatgtgaacattgtcaagtttaatgtggaagatggagagattgttcagcagtctctcgacttagaatttggaagtggattccaaccccgggtcctgcctacccagcccaacccagtggacgcttcccgggcccagttcttcctgcacttgtccccaagccactatgctctgctgcagtaccattatggaacgctgagtttgcttaaaaacttcccacagactgccctagtgagctttgccaccactggggagaagacggtggctgcagtcatggcctgtcggaatgaagtggtgagtattgagaacaacagtcagcacttgggattttccttcctggtctccactaggaaccctgaaaatcagaagtctgggcacattgacctgcagaaaagtagcagttctgaagatgggtcaatggggagcttttcggagaagtctagttcaaaggactctctggcttgcttcaatcagacctacaccattaacctatacctcgtggagacaggtcggcggctgctggacaccacgataacatttagcctggaacagagcggcactcggcctgagcggctgtatatccaggtgttcttgaagaaggatgactcagtgggctaccgggctttggtgcagacagaggatcatctgctacttttcctgcagcagttggcagggaaggtggtgctgtggagccgtgaggagtccctggcagaagtggtgtgcctagagatggtggacctccccctgactggggcacaggccgagctggaaggagaatttggcaaaaaggcagatggcttgctggggatgttcctgaaacgcctctcgtctcagcttatcctgctgcaagcatggacttcccacctctggaaaatgttttatgatgctcggaagccccggagtcagattaagaatgagatcaacattgacaccctggccagagatgaattcaacctccagaagatgatggtgatggtaacagcctcaggcaagctttttggcattgagagcagctctggcaccatcctgtggaaacagtatctacccaatgtcaagccagactcctcctttaaactgatggtccagagaactactgctcatttcccccatcccccacagtgcaccctgctggtgaaggacaagtccttgcttctcccagtcatggatcaagactacgccaaggtgttgctgttgatagatgatgaatacaaggtcacagcttttccagccactcggaatgtcttgcgacagctacatgagcttgccccttccatcttcttctatttggtggatgcagagcagggacggctgtgtggatatcggcttcgaaaggatctcaccactgagctgagttgggagctgaccattcccccagaagtacagcggatcgtcaaggtgaaggggaaacgcagcagtgagcacgttcattcccagggccgtgtgatgggggaccgcagtgtgctctacaagagcctgaaccccaacctgctggccgtggtgacagagagcacagacgcgcaccatgagcgcacctttattggcatcttcctcattgatggcgtcactgggcgtatcattcactcctctgtgcagaagaaagccaaaggccctgtccatatcgtgcattcagagaactgggtggtgtaccagtactggaacaccaaggctcggcgcaacgagtttaccgtactggagctctatgagggcactgagcaatacaacgccaccgccttcagctccctggaccgcccccagctgccccaggtcctccagcagtcctatatcttcccgtcctccatcagtgccatggaggccaccatcaccgaacggggcatcaccagccgacacctgctgattggactaccttctggagcaattctttcccttcctaaggctttgctggatccccgccgccccgagatcccaacagaacaaagcagagaggagaacttaatcccgtattctccagatgtacagatacacgcagagcgattcatcaactataaccagacagtttctcgaatgcgaggtatctacacagctccctcgggtctggagtccacttgtttggttgtggcctatggtttggacatttaccaaactcgagtctacccatccaagcagtttgacgttctgaaggatgactatgactacgtgttaatcagcagcgtcctctttggcctggtttttgccaccatgatcactaagagactggcacaggtgaagctcctgaatcgggcctggcgataaagaacaaagactgtgcctaaaagtggagagccaggggagtgtgggtcagataagcagctacagctgcagtttggtggattggtggagtatgtgtgtgtgtcagtgctcagctaagaactgtagggaagatggatgaccttcacgcagaactccttttgggatatacatgatgcagaaaggatcctacatggagagagacagaactctctcagctgacactctcagagattcctgatgggctttctcttgaagtccaaaggcgtctgcattgtttcctttctttgcccatccatgaatgttctgttttgttttttttaataagaattccggctgatttttgtgaggcctgtttaaattgactttactttgccttttgtgtttctcaattttatctagaaatctttctgactttttccatctcttgcttcaaagtaagaggggaactctccttgccgactccaccttataggtacatttggtgttttgcactgggaagaaataggatccatccttagctgaggcttgaggactgatccagcctctcatggcttccctccaaagtaacttagggttgagggatctatatgtgatgtcaaaacttactttaaacctctagtttcgtgctgtcatttattaggctgggccaccaaatctttgtttcaatttatcagaagccaagtgcatactagcgtcttgtttgttgcccattgcctatacttttcacctgagatgtgtgagttggggccttttaaaaactactgaattgtctgagccttgaagacatttccagggagaagagataatctctcatttcacccacaggctggtctaatcataacctagttaaagatgtccttgtttaagaaccccattatttatttttagtttttaatataaattaacatgtgggtcattatatttctccttaaatgaggaaattttaaattttattgatctaacctttgaagctttaaaaaaggagaaagagggtaggggtgggaaactggcatactgtgtgtatagcactgccgattggctaggccactgtgtctctgctacaaattaaagaaatcctaaaagttttccttggtcatagagttggggaatgacagaatttttctttgttgtgaaatgtatgtacagagtagaccatctctagccctgtggtgaaagaggtacactcgaatgtttgcataaagcaagtgacaaatgacactgtttaagtcctcttttgtgtcttagaagatcattttgaggctattttcacattagaggggataaaagcagtgaagacatggagtaagtgtattttattttagtaaggaaaggtcagtttaatcatatatgggttggttaggttatctaaaaatttgtcatctttctatggtcatatgctgatggtagattatggcagagaaggaagaggaaatgacaaccattttattaattgtcagtttgatattgagtgactgaatgtctaagaatctccagaaaaaaacaggcatctatcatcctgacccaaggcatattttaacataacctgggagaagagagttaagtacaagttaaaaaaaattctgccctagttttgagaaagcctggctggaattctgactgtcttacatacatatgtgcaaggttagcctgcaagattctagtttttatttaccagtgtgccagaatctgaaacaagctactgggagggaaggtatttgtcctttagtaaaattccctgtatttcagctgtaatcaaagttacctcaaagcaggtgctttttttttttttgagacagaatctcactctgttgcccaggctggagtgcagtggcacgatcttggctc

SEQ ID NO: 1568 - DNA, 4852 bp, Homo sapiens; identical to SEQ ID NO: 1566

SEQ ID NO: 1569 - DNA, 2859 bp, Homo sapiens
ctttccgcggcattctttgggcgtgagtcatgcaggtttgcagccagccccaaagggggtgtgtgcgcgagcagagcgctataaatacggcgcctcccagtgcccacaacgcggcgtcgccaggaggagcgcgcgggcacagggtgccgctgaccgaggcgtgcaaagactccagaattggaggcatgatgaagactctgctgctgtttgtggggctgctgctgacctgggagagtgggcaggtcctgggggaccagacggtctcagacaatgagctccaggaaatgtccaatcagggaagtaagtacgtcaataaggaaattcaaaatgctgtcaacggggtgaaacagataaagactctcatagaaaaaacaaacgaagagcgcaagacactgctcagcaacctagaagaagccaagaagaagaaagaggatgccctaaatgagaccagggaatcagagacaaagctgaaggagctcccaggagtgtgcaatgagaccatgatggccctctgggaagagtgtaagccctgcctgaaacagacctgcatgaagttctacgcacgcgtctgcagaagtggctcaggcctggttggccgccagcttgaggagttcctgaaccagagctcgcccttctacttctggatgaatggtgaccgcatcgactccctgctggagaacgaccggcagcagacgcacatgctggatgtcatgcaggaccacttcagccgcgcgtccagcatcatagacgagctcttccaggacaggttcttcacccgggagccccaggatacctaccactacctgcccttcagcctgccccaccggaggcctcacttcttctttcccaagtcccgcatcgtccgcagcttgatgcccttctctccgtacgagcccctgaacttccacgccatgttccagcccttccttgagatgatacacgaggctcagcaggccatggacatccacttccatagcccggccttccagcacccgccaacagaattcatacgagaaggcgacgatgaccggactgtgtgccgggagatccgccacaactccacgggctgcctgcggatgaaggaccagtgtgacaagtgccgggagatcttgtctgtggactgttccaccaacaacccctcccaggctaagctgcggcgggagctcgacgaatccctccaggtcgctgagaggttgaccaggaaatacaacgagctgctaaagtcctaccagtggaagatgctcaacacctcctccttgctggagcagctgaacgagcagtttaactgggtgtcccggctggcaaacctcacgcaaggcgaagaccagtactatctgcgggtcaccacggtggcttcccacacttctgactcggacgttccttccggtgtcactgaggtggtcgtgaagctctttgactctgatcccatcactgtgacggtccctgtagaagtctccaggaagaaccctaaatttatggagaccgtggcggagaaagcgctgcaggaataccgcaaaaagcaccgggaggagtgagatgtggatgttgcttttgcacctacgggggcatctgagtccagctccccccaagatgagctgcagccccccagagagagctctgcacgtcaccaagtaaccaggccccagcctccaggcccccaactccgcccagcctctccccgctctggatcctgcactctaacactcgactctgctgctcatgggaagaacagaattgctcctgcatgcaactaattcaataaaactgtcttgtgagctgatcgcttggagggtcctctttttatgttgagttgctgcttcccggcatgccttcattttgctatggggggcaggcaggggggatggaaaataagtagaaacaaaaaagcagtggctaagatggtatagggactgtcataccagtgaagaataaaagggtgaagaataaaagggatatgatgacaaggttgatccacttcaagaattgcttgctttcaggaagagagatgtgtttcaacaagccaactaaaatatattgctgcaaatggaagcttttctgttctattataaaactgtcgatgtattctgaccaaggtgcgacaatctcctaaaggaatacactgaaagttaaggagaagaatcagtaagtgtaaggtgtacttggtattataatgcataattgatgttttcgttatgaaaacatttggtgcccagaagtccaaattatcagttttatttgtaagagctattgcttttgcagcggttttatttgtaaaagctgttgatttcgagttgtaagagctcagcatcccaggggcatcttcttgactgtggcatttcctgtccaccgccggtttatatgatcttcatacctttccctggaccacaggcgtttctcggcttttagtctgaaccatagctgggctgcagtaccctacgctgccagcaggtggccatgactacccgtggtaccaatctcagtcttaaagctcaggcttttcgttcattaacattctctgatagaattctggtcatcagatgtactgcaatggaacaaaactcatctggctgcatcccaggtgtgtagcaaagtccacatgtaaatttatagcttagaatattcttaagtcactgtcccttgtctctctttgaagttataaacaacaaacttaaagcttagcttatgtccaaggtaagtattttagcatggctgtcaaggaaattcagagtaaagtcagtgtgattcacttaatgatatacattaattagaattatggggtcagaggtatttgcttaagtgatcataattgtaaagtatatgtcacattgtcacattaatgtcaaaaaaaaaaaaaaaaaa

SEQ ID NO: 1570 - DNA, 3300 bp, Homo sapiens
agtcttatgactcgcactgaagcgccgattcctggcttttgcaaggctgtggtcggtggtcatcagtgctcttgacccaggtccagcgagccttttccctggtgttgcagctgttgttgtaccgccgccgtcgccgccgtcgccgcctgctctgcggggtcatggtgtgcttccgcctcttcccggttccgggctcagggctcgttctggtctgcctagtcctgggagctgtgcggtcttatgcattggaacttaatttgacagattcagaaaatgccacttgcctttatgcaaaatggcagatgaatttcacagtacgctatgaaactacaaataaaacttataaaactgtaaccatttcagaccatggcactgtgacatataatggaagcatttgtggggatgatcagaatggtcccaaaatagcagtgcagttcggacctggcttttcctggattgcgaattttaccaaggcagcatctacttattcaattgacagcgtctcattttcctacaacactggtgataacacaacatttcctgatgctgaagataaaggaattcttactgttgatgaacttttggccatcagaattccattgaatgacctttttagatgcaatagtttatcaactttggaaaagaatgatgttgtccaacactactgggatgttcttgtacaagcttttgtccaaaatggcacagtgagcacaaatgagttcctgtgtgataaagacaaaacttcaacagtggcacccaccatacacaccactgtgccatctcctactacaacacctactccaaaggaaaaaccagaagctggaacctattcagttaataatggcaatgatacttgtctgctggctaccatggggctgcagctgaacatcactcaggataaggttgcttcagttattaacatcaaccccaatacaactcactccacaggcagctgccgttctcacactgctctacttagactcaatagcagcaccattaagtatctagactttgtctttgctgtgaaaaatgaaaaccgattttatctgaaggaagtgaacatcagcatgtatttggttaatggctccgttttcagcattgcaaataacaatctcagctactgggatgcccccctgggaagttcttatatgtgcaacaaagagcagactgtttcagtgtctggagcatttcagataaatacctttgatctaagggttcagcctttcaatgtgacacaaggaaagtattctacagcccaagagtgttcgctggatgatgacaccattctaatcccaattatagttggtgctggtctttcaggcttgattatcgttatagtgattgcttacgtaattggcagaagaaaaagttatgctggatatcagactctgtaacactaatcaatacgtgatctctgttacaaaagaaaaaagcaagtacaagttccaacatgcaatactggtcaacttaaggtatatttagttgcagtccagctctttagaatgggtggtatgggggatttcaaacttaaacaaaaaactatcaactacaaattagttgcctgactttggtttttccaaccaaggaatttaaaactgttatttttacagcaaaagatgtgcaaaatcactggattataagttctattttactgtcttgaattagtatttcagtgttttcattttagacattcagactaaaaatacaccgtttagaaaaaacaatttttgaaaaagagattttttttccctgcaggtagttgagttggaacaacatgttctaccgtggatttgtacttgctccttttgctctttttgtgtgtgtgtgtgtgtgtgtgtgtgtgtgtgtgtgtgtgatttttgtttgcaggttaacttagctactttggcattgctgcatatttgacctttgagagatataatagtagatttgaacaggggctggtattattatgttcttagcaataaatgcttttctaatgccttttgaatacatttgtatttatgtggctgtaatgacaaaagatacaaaagctttttaaaatttagagtaggtattaatcttattgtttaatctttttttaaaaaaaactggatatttcaatcttttaaattgcaatatataagactattccaactgggcatttcaatccattttttaggtgctttagagataattgcttgccagtgccaattgagggcattagtactttgtgctcataaattggcctctgtatgcagtactaaaattaatgcagatttctctttagccttccaacatttcttgttgatagtgatgtattttattattttctttttcttaagaaatgccagtgtgtcctagaacctagataacgaagtgcacttacacttataaaataacttgcatctaggctgggccgtggtggtgggcgcctgtaatcccagttactcgggaggctgaggcaggagaatcacttgaacccgggaggcagaggttgcggtgagccaagagcgcaccattgcactccagcctgggcgacaaaaacgaaactccatctcaaaacaaaacaaaacaaaacaaacaaacaaacaaaacttgcatctaaccaaaaagtcttggttttatcttaatccattaaaaagttgttctttgtttccagcttgcattgattgctacaacatcactaatttggctttcacatttaaatggttctgtgctaatcaaaactttcgttgttattattcattatggtagaatcatttttaattcacgtgctttgtgttcagttttgtggtctgagagatgtaccaattgtcaaattaccgtgtaccacctaatgtttataggagaaagcaaaatacatcagcttggtagttaacacatcaaatatttcttgctgcttctaggagaacttttttggtgtgtgttggaatggctgagcaaatattaaaattgttaatatgcagccatatatggaaggttcctgtggggttgttttttcgtgttttttttttttttgtggtgggattatgtgcctcccattcactagaaaatgagaaaattgtctgggttccaaaatattgacattgaatggatcaatacacacacacagacatatatatatatatgcacacatatataggcagttgcatgctagcatgggtatttttataacaatataactgagttatattggaattataaatattttccgtcacttaaatttgttctttgtttagcctgaaaacctttatggctcaagatcagattcctgactaacccctctcttagagctacagcgagctgcattaccagctt

SEQ ID NO: 1571 - DNA, 3300 bp, Homo sapiens; identical to SEQ ID NO: 1570

SEQ ID NO: 1572 - DNA, 6573 bp, Homo sapiens
agtcttatgactcgcactgaagcgccgattcctggcttttgcaaggctgtggtcggtggtcatcagtgctcttgacccaggtccagcgagccttttccctggtgttgcagctgttgttgtaccgccgccgtcgccgccgtcgccgcctgctctgcggggtcatggtgtgcttccgcctcttcccggttccgggctcagggctcgttctggtctgcctagtcctgggagctgtgcggtcttatgcattggaacttaatttgacagattcagaaaatgccacttgcctttatgcaaaatggcagatgaatttcacagtacgctatgaaactacaaataaaacttataaaactgtaaccatttcagaccatggcactgtgacatataatggaagcatttgtggggatgatcagaatggtcccaaaatagcagtgcagttcggacctggcttttcctggattgcgaattttaccaaggcagcatctacttattcaattgacagcgtctcattttcctacaacactggtgataacacaacatttcctgatgctgaagataaaggaattcttactgttgatgaacttttggccatcagaattccattgaatgacctttttagatgcaatagtttatcaactttggaaaagaatgatgttgtccaacactactgggatgttcttgtacaagcttttgtccaaaatggcacagtgagcacaaatgagttcctgtgtgataaagacaaaacttcaacagtggcacccaccatacacaccactgtgccatctcctactacaacacctactccaaaggaaaaaccagaagctggaacctattcagttaataatggcaatgatacttgtctgctggctaccatggggctgcagctgaacatcactcaggataaggttgcttcagttattaacatcaaccccaatacaactcactccacaggcagctgccgttctcacactgctctacttagactcaatagcagcaccattaagtatctagactttgtctttgctgtgaaaaatgaaaaccgattttatctgaaggaagtgaacatcagcatgtatttggttaatggctccgttttcagcattgcaaataacaatctcagctactgggatgcccccctgggaagttcttatatgtgcaacaaagagcagactgtttcagtgtctggagcatttcagataaatacctttgatctaagggttcagcctttcaatgtgacacaaggaaagtattctacagctcaagactgcagtgcagatgacgacaacttccttgtgcccatagcggtgggagctgccttggcaggagtacttattctagtgttgctggcttattttattggtctcaagcaccatcatgctggatatgagcaattttagaatctgcaacctgattgattatataaaaatacatgcaaataacaagattttcttacctctcagttgttgaaacactttgcttcttaaaattgatatgttgaaactttaattcttttatcaatcccagcattttgagatcagtctttattaataaaacctgttctctttaatcagcttaaaatccaaagtgtcatatttactggtcctggagacaaacttgttcaaaagaacatcaacgtgcaatgttttaaggtctatcttaagaagccctggccaaattttgatcctaaccttgacgtatgccttgaacttattaacatggccattataagaataaaatatgtagttgtgtcttaatggaattaataaatgtcatttcactactggtgttctgtttcaatgtataaggactatagtgatttaaactcatcaatgtgcctttgcataaagttcattaaataaatattgatgtggtataaatgcccgtcagatatgcttaaacttggttttcagttgaatgaagtagagaatgtcctcaggaccatcagcattttaaaggttatgtgacttttgctgatttctctgagttcaagttaagcatgaagttagtacctcaagcctgtgatttttccctagggatgatacagacccaagaggctacaacagaacttaaactggcttcgtaattagagtttttaagataattgtttgtttttcagcaatatagactgaaaagatccaagcatatttagccacttgcttttttgtttcttgttttgttcttctttggatgcctgattagtattgaaagatagaaatattctatgaactaattaggacagattgtgttgtgtttctctacctcatcttgttgatctctggagcattaaaatctatttagtgttgtcatcagtgtggtacttatgaaatgtaagctaacagcaatctcagaagggaggcagtgaagcatagcaactaggctcttgtttcttcaagatggcccctgtggggcagtgcatagatgggggtgtaaagagaagctgttggcattaaaatgagctagataatcagcccttgttgaagcatattccatggtataagagtagcacagacatgaaacatagataaagaaggaaggcttaatagactagaagacttccacattgaagtattattaacccattgtatgtatataggggcatgatcagagtctctataacttcctgattaacaatacagtgtatcttgttacccagctgtcagtctttgagagctttcagtaaaatatagtaaattctttcagcataggctaatgtgtggttactgagatgagtgttgtgtactcagaaccgtagcaacatttttatgaatggtaaaagtacaagaggaggaaaagttaaaattagaagaaaagtacaagttattgcttaatcataaatcacaccagataacacattttgttaatttcattagctattactggaaaggaccttaacgattatttacagaaaggggagtgaaattcattgaggttccatatcaagtgggcaacaaaactattactagcattttgataaaaattgcccctaatgaaatctagtcactcaacagtaaaacaacagctggtttacacttgaaattatgagatcagaattgggcactttgggcttccgtactatgttttgcttaagttttttttttaatactaatatgggctttttcagtagtaatataccaaaacacttctattttaatctctgtttgctacttcaaaacctaatcctcctcagatgggatcatgagcataagaggaaaagagaagagaatgaatacttgttgacctcttgatgtgtatcagatgctttagaaatgtaattgtatttaatcctcaaataccttataggtattattatccccttcttacagatgaggaaagtgaggcccagtttaaataacttgcccaaggtcctttggctagtactggaaggagtcaagatttaaacacagttctgtctgaatccagaactcaaaatctacattgcacatgttgctttcctggtggttcggtggaatggactgcaacgcattagatactgctgttattcttccaggccaccgctcagctaaaaataattgtgtgtgtgtgtatatatatatatatgtacacacacacacatatatatacacacacacatatatatacacatatacatatatatacacatatatatacacacacatatatatgtatatatatactacattcttgatcctaagtcttttttaacttaaattttattacttatacagaattcttatttatactttaattataggtgtgacgaagagaaagagagtagggaaatacacaggcagtggttttaagtgtagatgatggctccttaacccagtgtcattagataatcaaacctaaagtcttcccatattaggcaagcgcaattctctattttggacccttcccattcttcccttaccttctgcttttcgtactgaggaatttcgtgtgattttagataaagtgataatgagatattgagcaaataagaaaatagaggtaatgctataaaaaactaagctatgtacactttcaaaatgcatgtttcttgcatgctttttactacttaattgcattctttgctaatttcctttccttgctgtctgttcttttctaacagctgaagaatgttctgctgactctgacctcaactttcttattcctgttgcagtgggtgtggccttgggcttccttataattgttgtctttatctcttatatgattggaagaaggaaaagtcgtactggttatcagtctgtgtaatcagttaaatctagtgtttgtttgtttttttcaattagaagttacgtttccattggctaaaagccaggacatgctgtgcaatagattgtttaagatatgcagactaacttcagtgagttcctagctaacttgggcatgagtacacttatttaagacaaaatatattaggaccaatttttttctgttttttttcttcctttgttaaagtataattaaaagaaaaattgtggcttagaattttttaagtaaataatgattttaagcccctggatccaattatgaaagcatttttgctgatgtgtaattttatatgttacagttacttatattttactactttgatgttatttgcaaaatcaaaggtgttaaagaatttaacttgcttcaggaaataaattcaagaacatagtggattcattttcattggtggcagacacgaaatttggttcatgataagacttcctttccccacctcctgatcagcattatttaaatctgtatttttctgttagttaagaaagaaatggcttcatgatattgtatttaatagcaaaagtttggctgtcttcttcattactgttaatagctactatattttaacaaggagatttctttttttgttgttgttgttctagagtttggaatatactgattatctcagacttgacatttatactgaaggatgaagtaagacctccagctttttttaaaaaaggtgttgatttggaacacctgtatgggttatggtttattaaggttatggtttagaaagtttttttccctcagagccttaacttgttaagaaggttcatttatcctgcactgaaaacaaaaactctatatactttgtttgtgtgcctcctgcactctcccattccctatgtgaatatgctctagttgatatttttaatatattgatttcttttttctcacagcaacaagtgcttactctagaggttagtgggccctgatatgtcatcagtcagatgcctgcctagccaaagctggactaagattattctgtacatttgttgatcttgatatagacttatatccctgtagggactgctaatggctccggcttctggagtaaggtactggagaccactcatccctgtgtctgcttgattggttcagctgttgaattgcccttttatttggaagcagtgttgaagttgtctagggttcaaatggctgctttgtacacctgtcattagtataaggcagatgtttattttatcaagctattttatctctacatttaactaaaaacaaaagttcccaaagatctgccttcacttcagaaattttttttggattaaaaaaattaagcctgaaccttaaataaagtgagttggttattcattccaaggattaagtcccaatctacctctcagcacaatgcagaagctcaccactgtattgctgccattaactcatgccagaaccctttgccaataactggaattacaaatttttgttaaagaaaatttatcaagatctttctttactgccttctctatatgtacatctcaaaaacatgtacatctcaaaaactggagtagaaagttagattgctcaactacaactcctctagaactctatagctctgacatacagattcacactctcctctatttgctaagtatgtaaagaatgttttcttttaaaatgttctcttttgagaacaactgcttatttgttataaaagcatttggttaaaatgatgtcatcataaagaacagtggctttgtttcaatacatatttttgagatgattatctagaagccagattaataaaatcagcttgtgaccttgctaagcatataaactggaaattcagatacattcaaaattatgggttcatttaaaagtgttctaccttttgggtatgagactaatatcactaattcctcaatagttatcatggctctatcttaattaattagaaaatatgtgtgtttaattctttgagaattaaaatagagaatattaacagagggttaaaaactgcttcaactccaataagataaaggaagctcaaaatctatgagctgagtgttcaattagctttgcctactgagttcaattttatgtcaatacaacagtggatcagacagtacgactttgaactggtgaatgtaaacaattgtttttcacctaagctgctttggaagaactgatgcttgctgctaactaaagttttggatgtatcgatttagagaaccaattaatacctgcaaaataaagcatactgtggtacttctgtttgatctagtatgtgtgattttagattgatggattaaaaattaataaagatcatacattccataccactat

SEQ ID NO: 1573 - DNA, 3300 bp, Homo sapiens; identical to SEQ ID NO: 1570

SEQ ID NO: 1574 - DNA, 1988 bp, Homo sapiens
atctgtggtttttctacttgaaggacacaatgttttccaaactagcacatttgcagaggtttgctgtacttagtcgcggagttcattcttcagtggcttctgctacatctgttgcaactaaaaaaacagtccaaggccctccaacctctgatgacatttttgaaagggaatataagtatggtgcacacaactaccatcctttacctgtagccctggagagaggaaaaggtatttacttatgggatgtagaaggcagaaaatattttgacttcctgagttcttacagtgctgtcaaccaagggcattgtcaccccaagattgtgaatgctctgaagagtcaagtggacaaattgaccttaacatctagagctttctataataacgtacttggtgaatatgaggagtatattactaaacttttcaactaccacaaagttcttcctatgaatacaggagtggaggctggagagactgcctgtaaactagctcgtaagtggggctataccgtgaagggcattcagaaatacaaagcaaagattgtttttgcagctgggaacttctggggtaggacgttgtctgctatctccagttccacagacccaaccagttacgatggttttggaccatttatgccgggattcgacatcattccctataatgatctgcccgcactggagcgtgctcttcaggatccaaatgtggctgcgttcatggtagaaccaattcagggtgaagcaggcgttgttgttccggatccaggttacctaatgggagtgcgagagctctgcaccaggcaccaggttctctttattgctgatgaaatacagacaggattggccagaactggtagatggctggctgttgattatgaaaatgtcagacctgatatagtcctccttggaaaggccctttctgggggcttataccctgtgtctgcagtgctgtgtgatgatgacatcatgctgaccattaagccaggggagcatgggtccacatacggtggcaatccactaggctgccgagtggccatcgcagcccttgaggttttagaagaagaaaaccttgctgaaaatgcagacaaattgggcattatcttgagaaatgaactcatgaagctaccttctgatgttgtaactgccgtaagaggaaaaggattattaaatgctattgtcattaaagaaaccaaagattgggatgcttggaaggtgtgtctacgacttcgagataatggacttctggccaagccaacccatggcgacattatcaggtttgcgcctccgctggtgatcaaggaggatgagcttcgagagtccattgaaattattaacaagaccatcttgtctttctgagggtagccagctgttttcagtggtccctgggagccagctggagacaggtggtcctgtaaaagctttattcctaatgtgggcacattccactcccatgagtcttcaaaaactttttttttgaatatatttttttcagttgatacataatagaacaacgtttatgaacctgccgtttgctttgtaacgtaactaaataatgtaatggcatctatattcagttgaagtgttttgatgtgcatgtgtacttcctaaggtgaaatgcatctatatacagacagcctctaaatcaagtccttcagtataattgatatatgtttttataatttcctcactggtataagtgtttcatatttgaaaaagttatctctgggtattgcataaaaggcttcatcttataaagtgaaatcattgttattgaattttaggaaggattaatggttaagtgtatataaaatactaatattaagtaaacttcatattggccaacaccagggttgtattctatggatgtcattattttgaattaagaattagtgtttaacattcctaaattgttttgagtgcttgattataatttgtaaaaaatgtttattttcaatacttctttaaatttaaaataaagcttatatttcaaatgtc

SEQ ID NO: 1575 - DNA, 1362 bp, Homo sapiens
atagtcgatctgtggtttttctacttgaaggacacaatgttttccaaactagcacctttgcagaggtttgctgtacttagtcgtggagctcattcttcagtggcttctgctacatctgttgcaactaaaaaaacagtccaaggccctccaacctctgactacatttttgaaagggaatctaagtgtggtgcgcacaattaccatcctttacctgtagccctggagagaggaaaatgtatttacttatgggatgtagaaggcagaaaatattttgactttctgagttcttacagtgctgtcaaccaagggcattgtcaccccaagattgtgaatgcactaaagagtcaagggaagaaattgaccttaacctctagagctttctataataacgtacttggtgaatatgaggagtatattactaaacttttcaactaccacaaagttcttcctatgaatacaggaatggaagctggagagactgcctgtaaactagctcataagtggggctatactgtgaagggcattcagaaatacaaagcaaaggttatttccgcagctggaaacttttggggtaggacgttttctgctatctccagttccacagacctgacgagttatgatggttttggaccgtttatgcctggcttcgacgtcattccctgcaatgatctgcctgcactggagagtgcttttcagaatccaaatgtggctgcattcatggtagaaccaattcagggtgaagcaggtgttgttccagatccaggttacttaatgggagtgcgagagctctgcaccaggcaccaggatctgtatattgctgatgaaatacagtcaggataggccagaactggtagatggctggctgttgatcatgaaaatgtcagacctgatatagtcctccttggaaaggccctttctgggggctgatactctgtgtctgcagtgctgtgggacgatgacataatgctgaccattaagccaggggaatgtgggtccacatacggtggcaatccactaggctgccaagtgacaattgcagcccttgaggttttagaagaagaaaaccttgctgaaaatacagaaaaaaaatgggtattatcttgagaaatgaacccatgaagctaccttctgatgttgtaactgccgtaagaggaaagaaaggaattattaaacgctattgttattaaagaaaccaaagattgtgatgcttggaaggtgtgtctacgacttcaagattatggacttctggccaagccaacctgtggcgacatcatcaggtttcacctctgctggtggtcaagggggatgagattcgagagtccagtgaactcattaacaaggccatcttatcattctgagggt

SEQ ID NO: 1576 - DNA, 924 bp, Homo sapiens
atgttttccaaactagcacctttgcagaggtttgctgtacttagtcgtggagctcattcttcaaaaacagtccaaggccctccaacctctgactacatttttgaaagggaatctaagtgtggtgcgcacaattaccatcctttacctgtagccctggagagaggaaaatgtatttacttatgggatgtagaaggcagaaaatattttgactttctgagttcttacagtgctgtcaaccaagggcattgtcaccccaagattgtgaatgcactaaagagtcaagggaagaaattgaccttaacctctagagctttctataataacgtacttggtgaatatgaggagtatattactaaacttttcaactaccacaaagttcttcctatgaatacaggaatggaagctggagagactgcctgtaaactagctcataagtggggctatactgtgaagggcattcagaaatacaaagcaaaggttatttccgcagctggaaacttttggggtaggacgttttctgctatctccagttccacagacctgacgagttatgatggttttggaccgtttatgcctggcttcgacgtcattccctgcaatgatctgcctgcactggagagtgcttttcagaatccaaatgtggctgcattcatggtagaaccaattcagggtgaagcaggtgttgttccagatccagtgctgtgggacgatgacataatgctgaccattaagccaggggaatgtgggtccacatacggtggcaatccactaggctgccaagtgacaattgcagcccttgaggttttagaagaagaaaaccttgctgaaaatacagaaaaaaaatgggtttcacctctgctggtggtcaagggggatgagattcgagagtccagtgaactcattaacaaggccatcttatcattc

SEQ ID NO: 1577 - DNA, 1931 bp, Homo sapiens
ttacggaagcagaaccttccttacagtaacgtgcagatctgtggtttttctacttgaaggacacaatgttttccaaactagcacatttgcagaggtttgctgtacttagtcgcggagttcattcttcagtggcttctgctacatctgttgcaactaaaaaaacagtccaaggccctccaacctctgatgacatttttgaaagggaatataagtatggtgcacacaactaccatcctttacctgtagccctggagagaggaaaaggtatttacttatgggatgtagaaggcagaaaatattttgacttcctgagttcttacagtgctgtcaaccaagggcattgtcaccccaagattgtgaatgctctgaagagtcaagtggacaaattgaccttaacatctagagctttctataataacgtacttggtgaatatgaggagtatattactaaacttttcaactaccacaaagttcttcctatgaatacaggagtggaggctggagagactgcctgtaaactagctcgtaagtggggctataccgtgaagggcattcagaaatacaaagcaaagattgtttttgcagctgggaacttctggggtaggacgttgtctgctatctccagttccacagacccaaccagttacgatggttttggaccatttatgccgggattcgacatcattccctataatgatctgcccgcactggagcgtgctcttcaggatccaaatgtggctgcgttcatggtagaaccaattcagggtgaagcaggcgttgttgttccggatccaggttacctaatgggagtgcgagagctctgcaccaggcaccaggttctctttattgctgatgaaatacagacaggattggccagaactggtagatggctggctgttgattatgaaaatgtcagacctgatatagtcctccttggaaaggccctttctgggggcttataccctgtgtctgcagtgctgtgtgatgatgacatcatgctgaccattaagccaggggagcatgggtccacatacggtggcaatccactaggctgccgagtggccatcgcagcccttgaggttttagaagaagaaaaccttgctgaaaatgcagacaaattgggcattatcttgagaaatgaactcatgaagctaccttctgatgttgtaactgccgtaagaggaaaaggattattaaatgctattgtcattaaagaaaccaaagattgggatgcttggaaggtgtgtctacgacttcgagataatggacttctggccaagccaacccatggcgacattatcaggtttgcgcctccgctggtgatcaaggaggatgagcttcgagagtccattgaaattattaacaagaccatcttgtctttctgagggtagccagctgttttcagtggtccctgggagccagctggagacaggtggtcctgtaaaagctttattcctaatgtgggcacattccactcccatgagtcttcaaaaactttttttttgaatatatttttttcagttgatacataatagaacaacgtttatgaacctgccgtttgctttgtaacgtaactaaataatgtaatggcatctatattcagttgaagtgttttgatgtgcatgtgtacttcctaaggtgaaatgcatctatatacagacagcctctaaatcaagtccttcagcttcatcttataaagtgaaatcattgttattgaattttaggaaggattaatggttaagtgtatataaaatactaatattaagtaaacttcatattggccaacaccagggttgtattctatggatgtcattattttgaattaagaattagtgtttaacattcctaaattgttttgagtgcttgattataatttgtaaaaaatgtttattttcaatacttctttaaatttaaaataaagcttatatttc

SEQ ID NO: 1578 - DNA, 1089 bp, Homo sapiens
atgcgggtcacggcgccccgaaccgtcctcctgctgctctggggggcagtggccctgaccgagacctgggccggctcccactccatgaggtatttctacaccgccatgtcccggcccgtccgcggggagccccgcttcatcgcagtgggctacgtggacgacacccagttcgtgaggttcgacagcgacgccgcgagtccgaggacggagccccgggcgccatggatagagcaggaggggccggagtattgggaccggaacacacagatcttcaagaccaacacacagacttaccgagagagcctgcggaacctgcgcggctactacaaccagagcgaggccgggtctcacatcatccagaggatgtatggctgcgacctggggcccgacgggcgcctcctccgcgggcatgaccagtccgcctacgacggcaaggattacatcgccctgaacgaggacctgagctcctggaccgcggcggacaccgcggctcagatcacccagcgcaagtgggaggcggcccgtgtggcggagcagctgagagcctacctggagggcctgtgcgtggagtggctccgcagatacctggagaacgggaaggagacgctgcagcgcgcggaccccccaaagacacacgtgacccaccaccccgtctctgaccatgaggccaccctgaggtgctgggccctgggcttctaccctgcggagatcacactgacctggcagcgggatggcgaggaccaaactcaggacactgagcttgtggagaccagaccagcaggagatagaaccttccagaagtgggcagctgtggtggtgccttctggagaagagcagagatacacatgccatgtacagcatgaggggctgccgaagcccctcaccctgagatgggagccatcttcccagtccaccatccccatcgtgggcattgttgctggcctggctgtcctagcagttgtggtcatcggagctgtggtcgctactgtgatgtgtaggaggaagagctcaggtggaaaaggagggagctactctcaggctgcgtccagcgacagtgcccagggctctgatgtgtctctcacagcttga

SEQ ID NO: 1579 - DNA, 1089 bp, Homo sapiens
atgcgggtcacggcgccccgaaccgtcctcctgctgctctggggggcagtggccctgaccgagacctgggccggctcccactccatgaggtatttctacaccgccatgtcccggcccggccgcggggagccccgcttcatcgcagtgggctacgtggacgacacccagttcgtgaggttcgacagcgacgccgcgagtccgaggacggagccccgggcgccatggatagagcaggaggggccggagtattgggaccggaacacacagatcttcaagaccaacacacagacttaccgagagagcctgcggaacctgcgcggctactacaaccagagcgaggccgggtctcacatcatccagaggatgtatggctgcgacctggggcccgacgggcgcctcctccgcgggcatgaccagttcgcctacgacggcaaggattacatcgccctgaacgaggacctgagctcctggaccgcggcggacaccgcggctcagatcacccagcgcaagtgggaggcggcccgtgtggcggagcagctgagagcctacctggagggcctgtgcgtggagtggctccgcagatacctggagaacgggaaggagacgctgcagcgcgcggaccccccaaagacacacgtgacccaccaccccgtctctgaccatgaggccaccctgaggtgctgggccctgggcttctaccctgcggagatcacactgacctggcagcgggatggcgaggaccaaactcaggacactgagcttgtggagaccagaccagcaggagatagaaccttccagaagtgggcagctgtggtggtgccttctggagaagagcagagatacacatgccatgtacagcatgaggggctgccgaagcccctcaccctgagatgggagccatcttcccagtccaccatccccatcgtgggcattgttgctggcctggctgtcctagcagttgtggtcatcggagctgtggtcgctactgtgatgtgtaggaggaagagctcaggtggaaaaggagggagctactctcaggctgcgtccagcgacagtgcccagggctctgatgtgtctctcacagcttga

SEQ ID NO: 1580 - DNA, 1098 bp, Homo sapiens
atgcgggtcacggcgccccgaaccctcctcctgctgctctggggggcagtggccctgaccgagacctgggctggctcccactccatgaggtatttccacacctccgtgtcccggcccggccgcggggagccccgcttcatcaccgtgggctacgtggacgacacgctgttcgtgaggttcgacagcgacgccacgagtccgaggaaggagccgcgggcgccatggatagagcaggaggggccggagtattgggaccgggagacacagatctccaagaccaacacacagacttaccgagagagcctgcggaacctgcgcggctactacaaccagagcgaggccgggtctcacatcatccagaggatgtatggctgcgacctggggccggacgggcgcctcctccgcgggcataaccagtacgcctacgacggcaaggattacatcgccctgaacgaggacctgcgctcctggaccgccgcggacacggcggctcagatcacccagcgcaagtgggaggcggcccgtgtggcggagcagctgagagcctacctggagggcgagtgcgtggagtggctccgcagatacctggagaacgggaaggagacgctgcagcgcgcggaccccccaaagacacacgtgacccaccaccccatctctgaccatgaggccaccctgaggtgctgggccctgggcttctaccctgcggagatcacactgacctggcagcgggatggcgaggaccaaactcaggacactgagcttgtggagaccagaccagcaggagatagaaccttccagaagtgggcagctgtggtggtgccttctggagaagagcagagatacacatgccatgtacagcatgaggggctgccgaagcccctcaccctgagatgggagccgtcttcccagtccaccgtccccatcgtgggcattgttgctggcctggctgtcctagcagttgtggtcatcggagctgtggtcgctgctgtgatgtgtaggaggaagagctcaggtggaaaaggagggagctactctcaggctgcgtgcagcgacagtgcccagggctctgatgtgtctctcacagcttgaaagcctgag

SEQ ID NO: 1581 - DNA, 1089 bp, Homo sapiens
atgcgggtcacggcgccccgaaccgtcctcctgctgctctcgggagccctggccctgaccgagacctgggccggctcccactccatgaggtatttctacaccgccatgtcccggcccggccgcggggagccccgcttcatcgcagtgggctacgtggacgacacccagttcgtgaggttcgacagcgacgccgcgagtccgaggatggcgccccgggcgccatggatagagcaggaggggccggagtattgggaccggaacacacagatctccaagaccaacacacagacttaccgagagagcctgcggaacctgcgcggctactacaaccagagcgaggccgggtctcacatcatccagaggatgtatggctgcgacgtggggccggacgggcgcctcctccgcgggtatgaccagtccgcctacgacggcaaggattacatcgccctgaacgaggacctgagctcctggaccgcggcggacacggcggctcagatcacccagcgcaagtgggaggcggcccgtgaggcggagcagctgagagcctacctggagggcctgtgcgtggagtggctccgcagatacctggagaacgggaaggagacgctgcagcgcgcggaccccccaaagacacatgtgacccaccaccccatctctgaccatgaggccaccctgaggtgctgggccctgggcttctaccctgcggagatcacactgacctggcagcgggatggcgaggaccaaactcaggacaccgagcttgtggagaccagaccagcaggagatagaaccttccagaagtgggcagctgtggtggtgccttctggagaagagcagagatacacatgccatgtacagcatgaggggctgccgaagcccctcaccctgagatgggagccatcttcccagtccaccatccccatcgtgggcattgttgctggcctggctgtcctagcagttgtggtcatcggagctgtggtcgctactgtgatgtgtaggaggaagagctcaggtggaaaaggagggagctactctcaggctgcgtccagcgacagtgcccagggctctgatgtgtctctcacagcttga

SEQ ID NO: 1582 - DNA, 1098 bp, Homo sapiens
atgcgggtcacggcgccccgaaccgtcctcctgctgctctggggggcagtggccctgaccgagacctgggccggctcccactccatgaggtatttctacaccgccatgtcccggcccggccgcggggagccccgcttcatcgcagtgggctacgtggacgacacccagttcgtgaggttcgacagcgacgccgcgagtccgaggacggagccccgggcgccatggatagagcaggaggggccggagtattgggaccggaacacacagatcttcaagaccaacacacagacttaccgagagagcctgcggaacctgcgcggctactacaaccagagcgaggccgggtctcacatcatccagaggatgtatggctgcgacctggggcccgacgggcgcctcctccgcgggcataaccagttcgcctacgacggcaaggattacatcgccctgaacgaggacctgagctcctggaccgcggcggacaccgcggctcagatcacccagcgcaagtgggaggcggcccgtgtggcggagcagctgagagcctacctggagggcctgtgcgtggagtggctccgcagatacctggagaacgggaaggagacgctgcagcgcgcggaccccccaaagacacacgtgacccaccaccccgtctctgaccatgaggccaccctgaggtgctgggccctgggcttctaccctgcggagatcacactgacctggcagcgggatggcgaggaccaaactcaggacactgagcttgtggagaccagaccagcaggagatagaaccttccagaagtgggcagctgtggtggtgccttctggagaagagcagagatacacatgccatgtacagcatgaggggctgccgaagcccctcaccctgagatgggagccatcttcccagtccaccatccccatcgtgggcattgttgctggcctggctgtcctagcagttgtggtcatcggagctgtggtcgctactgtgatgtgtaggaggaagagctcaggtggaaaaggagggagctactctcaggctgcgtccagcgacagtgcccagggctctgatgtgtctctcacagcttgaaagcctgag

SEQ ID NO: 1583 - DNA, 1089 bp, Homo sapiens
atgcgggtcacggcgccccgaaccgtcctcctgctgctctggggggcagtggccctgaccgagacctgggccggctcccactccatgaggtatttctacaccgccatgtcccggcccggccgcggggagccccgcttcatcgcagtgggctacgtggacgacacccagttcgtgaggttcgacagcgacgccgcgagtccgaggacggagccccgggcgccatggatagagcaggaggggccggagtattgggaccggaacacacagatcttcaagaccaacacacagacttaccgagagagcctgcggaacctgcgcggctactacaaccagagcgaggccgggtctcacatcatccagaggatgtatggctgcgacctggggcccgacgggcgcctcctccgcgggcatgaccagtccgcctacgacggcaaggattacatcgccctgaacgaggacctgagctcctggaccgcggcggacaccgcggctcagatcacccagcgcaagtgggaggcggcccgtgtggcggagcagcggagagcctacctggagggcctgtgcgtggagtggctccgcagatacctggagaacgggaaggagacgctgcagcgcgcggaccccccaaagacacacgtgacccaccaccccgtctctgaccatgaggccaccctgaggtgctgggccctgggcttctaccctgcggagatcacactgacctggcagcgggatggcgaggaccaaactcaggacactgagcttgtggagaccagaccagcaggagatagaaccttccagaagtgggcagctgtggtggtgccttctggagaagagcagagatacacatgccatgtacagcatgaggggctgccgaagcccctcaccctgagatgggagccatcttcccagtccaccatccccatcgtgggcattgttgctggcctggctgtcctagcagttgtggtcatcggagctgtggtcgctactgtgatgtgtaggaggaagagctcaggtggaaaaggagggagctactctcaggctgcgtccagcgacagtgcccagggctctgatgtgtctctcacagcttga

SEQ ID NO: 1584 - DNA, 3634 bp, Homo sapiens
cgcgggcccagaggcggggcgagcgcgcgcggggcggaagtcggccaccttcctccgtcccggccgttagcccagccaagcccagccaagcccagccaagccccgccgatcgcgggcaccggagccagccccgcagcggaaaagcacatctcccaggatcctgagagagcttgaaccagaccactgtggacacggtggccacccgtcaccactacccttcccaaggggagacgaggagcaagtaggcttgagggaaaagctgcacaggactcgtgtcttgaaatgtctaagacgcatgtcagaaatgcaggagcctaacccagaggaagtggagactcctttactgcacatctgtctgctccaggccaggcactgttctaggagccaggatacagaggtggagacagaaacaaacaaaccgataactgtatacaatactctaacgtcagagggaccacagagcaccagcctgcatggaacttccttcctcactcagcttcccacgttgccagctgggacaggggagatggagtaattttgctgtggaaagacttcacgtcttgccgaatgaaagtcccgcctgtctgtcacgctgatgcccgtgcagctgtctgagcacccggaatggaatgagtctatgcactccctccggatcagtgtggggggccttcctgtgctggcgtccatgaccaaggccgcggacccccgcttccgcccccgctggaaggtgatcctgacgttctttgtgggtgctgccatcctctggctgctctgctcccaccgcccggcccccggcaggccccccacccacaatgcacacaactggaggctcggccaggcgcccgccaactggtacaatgacacctaccccctgtctcccccacaaaggacaccggctgggattcggtatcgaatcgcagttatcgcagacctggacacagagtcaagggcccaagaggaaaacacctggttcagttacctgaaaaagggctacctgaccctgtcagacagtggggacaaggtggccgtggaatgggacaaagaccatggggtcctggagtcccacctggcggagaaggggagaggcatggagctatccgacctgattgttttcaatgggaaactctactccgtggatgaccggacgggggtcgtctaccagatcgaaggcagcaaagccgtgccctgggtgattctgtccgacggcgacggcaccgtggagaaaggcttcaaggccgaatggctggcagtgaaggacgagcgtctgtacgtgggcggcctgggcaaggagtggacgaccactacgggtgatgtggtgaacgagaacccggagtgggtgaaggtggtgggctacaagggcagcgtggaccacgagaactgggtgtccaactacaacgccctgcgggctgctgccggcatccagccgccaggctacctcatccatgagtctgcctgctggagtgacacgctgcagcgctggttcttcctgccgcgccgcgccagccaggagcgctacagcgagaaggacgacgagcgcaagggcgccaacctgctgctgagcgcctcccctgacttcggcgacatcgctgtgagccacgtcggggcggtggtccccactcacggcttctcgtccttcaagttcatccccaacaccgacgaccagatcattgtggccctcaaatccgaggaggacagcggcagagtcgcctcctacatcatggccttcacgctggacgggcgcttcctgttgccggagaccaagatcggaagcgtgaaatacgaaggcatcgagttcatttaactcaaaacggaaacactgagcaaggccatcaggactcagcttttataaaaacaagaggagtgcacttttgttttgttttgttctttttggaactgtgcctgggttggaggtctggacagggagcccagtcccgggccccatagtggtgcgggcactggacccccgggccccacggaggccgcggtctgaactgctttccatgctgccatctggtggtgatttcggtcacttcaggcattgactcaaggcctgcctaactggctgggtcgtttcttccatccgacctcgtttcttttctttcctatgttcttttgttcagtgaatatccctagagctcctaccatatgtcaggccctatgcctcaccctgagaacgcagtgagcatgaggtggacctgtttgctgggaaccccaggtcacccccttttcttcctactctgtgcctggagcatcatgtccacccctgcagatccttggaaaagaaaatgtttatgttgcagggtattgcatggtcacgagtgagggcaggcccctggggacacatctgcccacagctgcacaggccagggcgcaggcacatctgttggttctcaggcctcagataaaaccatctccgcatcatatggccagtgaccgctttctcccttcaagaaaattctgtggctgtgcagtactttgaagttttaattattaacctgctttaattaaagcagtttcctttcttataaagtggaatcaccaaatcttatcacacagagcacagtcctgtagttacccagcccgctccagcagtgcgggagattgtaaggaagcggtggcggctggtgaagcaagtctcacatgtcggcgttcttggccaatggatacaaagataaagaaaatgttgcctttttctaggaactgtcagaaatcctcatgcctttcaagacttctgtgaatgacttgaattttttattccctgcctagggtctgtgaacgaggcctgtctcttccctggggtttctttccatggcctttatttctcctcttccagtgggagttttgcaggctcttctctgtggaaacttcacgagcgttggctgggcctcggcttcgctggagtgtactccagggtgaaggcagagtgggatttgagacccaggttaggcacgacccaggctgagaagggacgtttccatcattcacagtgccctccccacagcactacctcaccccgacccccaccctcactcctaccccaccccgcgatcgtcaggggtgccacggtgggccggagggtgccggctctggctgtccctgtgccggtccctcacaaacctctccccctttgaaactcaagcacagctgcgaggagggcagcgaggagggacccctctctcatggttgtctctttcccccgctatgtcataggtagtggaggaagcgaaggaagtgaacgctgaatgtgacgcatttctgaagagctcagctgtcaccgggcatagcctggaagccccaagtctgttctgactttgcctggctgtctccttgacccgcctcctagatcattgtccttgatgtccaggctgggtcatttaaaatagagatgcaatcaggaaggttgggggacttgggactgtggctgaattgagaccttgctgatgtattcatgtcagcacctgagtcacagcccaggtgcccggaagcagcctcttcgcataggcagtgatttgcgattactttaaagctcaccttttttcttcccctctctgttcgctgctgtcagcataatgattgtgttccttccctatgggatccatctgttttgtaaacaataaagcgtctgagggagtgt

SEQ ID NO: 1585 - DNA, 1550 bp, Homo sapiens
ggaagtcggccaccttcctccgtcccggccgttagcccagccaagcccagccaagcccagccaagccccgccgatcgcgggcaccggagccagccccgcagcgggtcccgcctgtctgtcacgctgatgcccgtgcagctgtctgagcacccggaatggaatgagtctatgcactccctccggatcagtgtggggggccttcctgtgctggcgtccatgaccaaggccgcggacccccgcttccgcccccgctggaaggtgatcctgacgttctttgtgggtgctgccatcctctggctgctctgctcccaccgcccggcccccggcaggccccccacccacaatgcacacaactggaggctcggccaggcgcccgccaactggtacaatgacacctaccccctgtctcccccacaaaggacaccggctgggattcggtatcgaatcgcagttatcgcagacctggacacagagtcaagggcccaagaggaaaacacctggttcagttacctgaaaaagggctacctgaccctgtcagacagtggggacaaggtggccgtggaatgggacaaagaccatggggtcctggagtcccacctggcggagaaggggagaggcatggagctatccgacctgattgttttcaatgggaaactctactccgtggatgaccggacgggggtcgtctaccagatcgaaggcagcaaagccgtgccctgggtgattctgtccgacggcgacggcaccgtggagaaaggcttcaaggccgaatggctggcatgcgggagattgtaaggaagcggtggcggctggtgaagcaagtctcacatgtcggcgttcttggccaatggatacaaagataaagaaaatgttgcctttttctaggaactgtcagaaatcctcatgcctttcaagacttctgtgaatgacttgaattttttattccctgcctagggtctgtgaacgaggcctgtctcttccctggggtttctttccatggcctttatttctcctcttccagtgggagttttgcaggctcttctctgtggaaacttcacgagcgttggctgggcctcggcttcgctggagtgtactccagggtgaaggcagagtgggatttgagacccaggtagtggaggaagcgaaggaagtgaacgctgaatgtgacgcatttctgaagagctcagctgtcaccgggcatagcctggaagccccaagtctgttctgactttgcctggctgtctccttgacccgcctcctagatcattgtccttgatgtccaggctgggtcatttaaaatagagatgcaatcaggaaggttgggggacttgggactgtggctgaattgagaccttgctgatgtattcatgtcagcacctgagtcacagcccaggtgcccggaagcagcctcttcgcataggcagtgatttgcgattactttaaagctcaccttttttcttcccctctctgttcgctgctgtcagcataatgattgtgttccttccctatgggatccatctgttttgtaaacaataaagcgtctgagggag

SEQ ID NO: 1586 - DNA, 3634 bp, Homo sapiens; identical to SEQ ID NO: 1584

SEQ ID NO: 1587 - DNA, 3634 bp, Homo sapiens; identical to SEQ ID NO: 1584

SEQ ID NO: 1588 - DNA, 3634 bp, Homo sapiens; identical to SEQ ID NO: 1584

SEQ ID NO: 1589 - DNA, 3634 bp, Homo sapiens; identical to SEQ ID NO: 1584

SEQ ID NO: 1590 - DNA, 3634 bp, Homo sapiens; identical to SEQ ID NO: 1584

SEQ ID NO: 1591 - DNA, 1911 bp, Homo sapiens
gccggttgggggaaagtaattccggctgttgcaccatggcgtccatggggaccctcgccttcgatgaatatgggcgccctttcctcatcatcaaggatcaggaccgcaagtcccgtcttatgggacttgaggccctcaagtctcatataatggcagcaaaggctgtagcaaatacaatgagaacatcacttggaccaaatgggcttgataagatgatggtggataaggatggggatgtgactgtaactaatgatggggccaccatcttaagcatgatggatgttgatcatcagattgccaagctgatggtggaactgtccaagtctcaggatgatgaaattggagatggaaccacaggagtggttgtcctggctggtgccttgttagaagaagcggagcaattgctagaccgaggcattcacccaatcagaatagccgatggctatgagcaggctgctcgcgttgctattgaacacctggacaagatcagcgatagcgtccttgttgacataaaggacaccgaacccctgattcagacagcaaaaaccacgctgggctccaaagtggtcaacagttgtcaccgacagatggctgagattgctgtgaatgccgtcctcactgtagcagatatggagcggagagacgttgactttgagcttatcaaagtagaaggcaaagtgggcggcaggctggaggacactaaactgattaagggcgtgattgtggacaaggatttcagtcacccacagatgccaaaaaaagtggaagatgcgaagattgcaattctcacatgtccatttgaaccacccaaaccaaaaacaaagcataagctggatgtgacctctgtcgaagattataaagcccttcagaaatacgaaaaggagaaatttgaagagatgattcaacaaattaaagagactggtgctaacctagcaatttgtcagtggggctttgatgatgaagcaaatcacttacttcttcagaacaacttgcctgcggttcgctgggtaggaggacctgaaattgagctgattgccatcgcaacaggagggcggatcgtccccaggttctcagagctcacagccgagaagctgggctttgctggtcttgtacaggagatctcatttgggacaactaaggataaaatgctggtcatcgagcagtgtaagaactccagagctgtaaccatttttattagaggaggaaataagatgatcattgaggaggcgaaacgatcccttcacgatgctttgtgtgtcatccggaacctcatccgcgataatcgtgtggtgtatggaggaggggctgctgagatatcctgtgccctggcagttagccaagaggcggataagtgccccaccttagaacagtatgccatgagagcgtttgccgacgcactggaggtcatccccatggccctctctgaaaacagtggcatgaatcccatccagactatgaccgaagtccgagccagacaggtgaaggagatgaaccctgctcttggcatcgactgtttgcacaaggggacaaatgatatgaagcaacagcatgtcatagaaaccttgattggcaaaaagcaacagatatctcttgcaacacaaatggttagaatgattttgaagattgatgacattcgtaagcctggagaatctgaagaatgaagacattgagaaaactatgtagcaagatccacttctgtgattaagtaaatggatgtctcgtgatgcgtctacagttatttattgttacatccttttccagacactgtagatgctataataaaaatagctgtttggtaaccatagtttcacttgttcaaagctgtgtaatcgtgggggtactatctcaactgcttttgtattcattgtattaaaagaatctgtttaaacaaaaaaaaaaaaaaaaaaaaaa

SEQ ID NO: 1592 - DNA, 3411 bp, Homo sapiens
aataaagaaatagtgctttaagtcaatgaattcctccttgggacccactatcgagaaactatcagtggtaacgttttaaaaaatgacaaattcaatctgctcttgacttgtgtgtcctaagatttccactaagtgtcttcaaacctccccctccccggcttcctggataatagaagttcccgaaggccgccgattccagaagatactgtctggcgtgaaattagtctcagtagaaacataagtcccgcgcgtcttgtgctgcgcgtgcgcaagcttttgggccctcccgagaaagggaagtgcattctcgcttccgtagcggtctccgccggttgggggaaagtaattccggctgttgcaccatggcgtccatggggaccctcgccttcgatgaatatgggcgccctttcctcatcatcaaggatcaggaccgcaagtcccgtcttatgggacttgaggccctcaagtctcatataatggcagcaaaggctgtagcaaatacaatgagaacatcacttggaccaaatgggcttgataagatgatggtggataaggatggggatgtgactgtaactaatgatggggccaccatcttaagcatgatggatgttgatcatcagattgccaagctgatggtggaactgtccaagtctcaggatgatgaaattggagatggaaccacaggagtggttgtcctggctggtgccttgttagaagaagcggagcaattgctagaccgaggcattcacccaatcagaatagccgatggctatgagcaggctgctcgcgttgctattgaacacctggacaagatcagcgatagcgtccttgttgacataaaggacaccgaacccctgattcagacagcaaaaaccacgctgggctccaaagtggtcaacagttgtcaccgacagatggctgagattgctgtgaatgccgtcctcactgtagcagatatggagcggagagacgttgactttgagcttatcaaagtagaaggcaaagtgggcggcaggctggaggacactaaactgattaagggcgtgattgtggacaaggatttcagtcacccacagatgccaaaaaaagtggaagatgcgaagattgcaattctcacatgtccatttgaaccacccaaaccaaaaacaaagcataagctggatgtgacctctgtcgaagattataaagcccttcagaaatacgaaaaggagaaatttgaagagatgattcaacaaattaaagagactggtgctaacctagcaatttgtcagtggggctttgatgatgaagcaaatcacttacttcttcagaacaacttgcctgcggttcgctgggtaggaggacctgaaattgagctgattgccatcgcaacaggagggcggatcgtccccaggttctcagagctcacagccgagaagctgggctttgctggtcttgtacaggagatctcatttgggacaactaaggataaaatgctggtcatcgagcagtgtaagaactccagagctgtaaccatttttattagaggaggaaataagatgatcattgaggaggcgaaacgatcccttcacgatgctttgtgtgtcatccggaacctcatccgcgataatcgtgtggtgtatggaggaggggctgctgagatatcctgtgccctggcagttagccaagaggcggataagtgccccaccttagaacagtatgccatgagagcgtttgccgacgcactggaggtcatccccatggccctctctgaaaacagtggcatgaatcccatccagactatgaccgaagtccgagccagacaggtgaaggagatgaaccctgctcttggcatcgactgtttgcacaaggggacaaatgatatgaagcaacagcatgtcatagaaaccttgattggcaaaaagcaacagatatctcttgcaacacaaatggttagaatgattttgaagattgatgacattcgtaagcctggagaatctgaagaatgaagacattgagaaaactatgtagcaagatccacttctgtgattaagtaaatggatgtctcgtgatgcatctacagttatttattgttacatccttttccagacactgtagatgctataataaaaatagctgtttggtaaccatagtttcacttgttcaaagctgtgtaatcgtgggggtactatctcaactgcttttgtattcattgtattaaaagaatctgtttaaacaacctttatcttctcttcgggtttaagaaacgtttattgtaacagtaattaaatgctgccttaattgaaggggtttgggtggatttttttttctcaaaataagctgtagggactattttaacagcttaaacaggagctctcaagatgcactttcgtattgagaggaatatgggcttgatcctcttcctatctaaatgggtgggccatttgattgtagagggtccaccacagaattatgggatgccttaagtgctgttactaggttgctcacagcctaacctggcgtgttgtttagggctgatggagacccatgtgagcctttgctttcctctggccccagccccaccctgaacacagctcatacgcagaatcaggaccagcatgtgcagagctggccaccagcacaggcttagggcagttcagaacccacttgtttccctatcagagggacacagtgaagtggaggttaaagtaaattacaggaaataagggagaaatcttgcagttaccatgttcagatagagtgactgaaattaattgtacttactaaagtattaactagctaacagtgatgggccaagacgctccgagaactgtaccgggattgtctgttctgacaacccagtgaggcagatacactttcttactgctcacatcttacaggtgagtactcataattggccagcatctcaccaccagcaagtagtagggccaggtcaatcccaggcagtctgaccccagagtggcccagctcatcccctactctattctgttatttgcttgttaatgattctctagattttctaaaataatgtttcttagcattgtgatgataaagctcatgatgaactttatcactagttatgccaccttaactagtcagatttcctagaattaggaaatggtgactcttgtctaaatttggttaagtgatgaatttgggttaccttctcatgtgaacctggagattcaccagtcttaacttttgggtcattgtgttttctctacattcatgcattggatgttttgctaaataactcctgtggatttaggaatgtgtgctaatagcaatcttcctaattttcatgtttatatggaactatgcagttgagtattgaaagctttaaactgagtttatttacaaggactgagtctagcctacagagaacatacagcagccttctttggaccacag

SEQ ID NO: 1593 - DNA, 4199 bp, Homo sapiens
aggattcagagctaagtctccgggctcctttcacatctgcaggagcagccagcctgggaccgcgcggcgcggggcgcgctctcgcctctcctgcaccctcagccggcgcgcttctcttatgggcgtctgctgcagtctggctgcggtcgaactgaaagcggcggcgggagaccaaacttagaccccgctgtggactagagaactcagagaaggcagagggagagggagagagagagagagaagggacccgaggaggaggcttccatcacgtcattgcaggatgttctggaagctttccctgtccttgttcctggtggcggtgctggtgaaggtggcggaagcccggaagaaccggccggcgggcgccatcccctcgccttacaaggacggcagcagcaacaactcggagagatggcagcaccagatcaaggaggtgctggcctccagccaggaggccctggtggtcaccgagcgcaagtacctcaagagtgactggtgcaagacgcagccgctgcggcagacggtgagcgaggagggctgccggagccgcaccatcctcaaccgcttctgctacggccagtgcaactccttctacatcccgcggcacgtgaagaaggaggaggagtccttccagtcctgcgccttctgcaagccccagcgcgtcacctccgtcctcgtggagctcgagtgccccggcctggacccacccttccgactcaagaaaatccagaaggtgaagcagtgccggtgcatgtccgtgaacctgagcgactcggacaagcagtgagcgccgggccggacgcagctcagccccgcgcgcgcccggccgctgggtggcgccgccgccgcctctgtccctgccctccgagcccactgtcacgctgcctggtgttccccctcagcagcaagcacttctcttagggctgacggtgtccttgtcacagacgtggatcgcaagtggagcttttgctgatgtgttcctgaccgaccccgggtcccacctgtgccccctaaaccaggcggtggatcaggcccgaaggaaaatgctggaaaaccaccaccgccacccagcagtcagagaggacctttcgaggtgatgcactgtaaatccggcattgatgtttccaccatgtggaaaagcaaggatttccctggccccgccctgcactccagctcgcccctttcccgcgcgaagtgaaggatgcgtcacttttctgagcggcccctcagacctctcctgctggtccctggacctctggctgggagcgctcattcttgtgactggcaggctgccctcggtcgctgctgtgatgaggatatgtgcaacctccataaatatgtcggtggacggggcgtctcctaataaacctgataccaagaagacaacttgagccacttggatcccgaagtgggcttcccgggaaacctcgagcagagcaggctacacaatcccccatcctcaagtccccaccgcctcttcttcctcactgtccccgccccctatttgtggactaaagatgaactctggtgtgcatgctattattgctgcaattagaatattatcacacacaaaggtctctatattaacgctggttttataagtgaccgtatattgtaaagagctgttaaaaagtattatagacctattcatgtattatttcacatgttttgactctggcttgcagcaccattcggagtaaggatgacagcaggcccagaaggtgtcttactcagaaaaaaaaatgcctggtcagcaattcactgtcatgcacctatttttagattgggcagggagatgggaggagtcgtgatttttactttgaatactatttcactgacgttactaagcattgcagcacaatgtagaaattggcttgggatggataggtatagggaagggcattcgttgggaaattgatgaccggaaactagaaagcccctataatgtggaatatgcatatgtggggtgaaaccgtatactactttcactgccatgacactaggcaaaaaatatttcctgttaaaagaaagagaaaaagagagggatattgaaaaatataaggagttgagtcgctttgtggtatagaagggagtaaggaataaaagatatagaatagtaatctagttgaactgttctgcacaaaacatgcttccttttcaaagaatagacttcaaaagggacgaacaaacattaggtcaccttttgtgtttataatgaattgttgacgtttccatgctgtggtctcttgatatacggaagtagacgtaacttattttccagcgaaattatatacttcttctgggctcctttgctcagttgccccaggaaggcttccctgtgagtaatgcttatggaatctgacaaatgtgaatgagctgccattggtgggaatcagtaaactttgaaaacctttcactgatgattccctggtaagtgctcctgtgaggggccacttccctagtatgtgagagagaccctctgcaagccgctgtggggacttagcttcctgatactaggtagtgatggtggatctagagacattcacttgaagagcaaggattggggtggggtgggttggtgaatctatctcaggccactgcactgcaaggtgcatttctgtcatttctgcaacaccatgagacctgagcaagaatgtgctgtggcagagggggtcttggtttcataaatgggtatatacagcctgaactcaggaggcagaaatcaaaagaaatccttgagggctggaacctgaggatagagcgaaaatggagagaagggtgttcaaggtcaggagtgatttttgcatttggtggaaaacctcaagtcagactcagtggcagaacatgcagcagaaaagctgtgaaggaaggaaatttacgtgattgtaatggaggctaggggtggattgggaggtgagtggaggagagtctctgaccagctgcagagccaacccctatcattttattaacatggaacccacacagataggggagggattaagctaagaacttacagaatgcaaacacgagcacactctcttcgaacccaattgtgggtgtagcaatgaaagcaatatgatatgctgcagtgtgaagctccttctggggttatcgtatgtacaaagtttaccttataatggctcaaattgtatttaatttttttgttttgtttataaatgaagaaaagctataagtataatgtaattattttataggtatactattaaattatagaacaaataaagataatctaggattatatgtgatcccggtgtgacgtgccataaaagtggaatttttgacttgttgcagtgagctgtgaagcagcactatgcgttcagagagtttttgttcaaccatggtgagttcaacctctagcttatgtcacatgatctcctttggggtctggaatcttctaagagaaatagaatcaggcatccaaggagcagaagtgatggaggtggccctcaatcctggtctttggaagcttccaagcctcttccacatcccctgccagctgaagacagagtattctcactgtgctggctgaaggagaaacactaaacaaggaaaccttgagaaactgcagcaatggaagtccactgttagtctctccgttagcaccagggacacacttgttctgagttttgttcattttcacatttactcctcatgagttccaacatttcttaatttaaatatttcttagtttatagcatctccatttttctattaattgacttaatctgccatttaagaaaactccgtaatcaataaaaaataaaatccacaatcaaactgcacatggttgatccactgtgtaggcttcaaaggaattaaactcaacttcctaggaaataattcatcttagtttattaaatgggacagaatatttcactgctaacgtattctaactcacttgtttttgaaattggccagatgatttttaagttataaagtcaatgaaaatgacttttgctattgtgtgaacaacttagaatgtatatattcccagaaggcttatttaatgattgacctatcaccactgattattaatgtctgcatgaatgataacaataagaccaagtcatcaataatgcaatgaaaattttttaagtgaaagcaagtttattaagaaagtaaaggaataaagaatgcctacttcataggcagagcagcctaaaaaaaaaaaaaaaaaa

SEQ ID NO: 1594 - DNA, 4868 bp, Homo sapiens
agttagcgcctgctgggtgtctgctcgggtggtctgggaactacaattcccggcgggctgtgagatgccttggctgtagttagtaaggagccggatgattgcctcagcaggtgtgaagcgtgtgctttagtttcgtgggaggcctggcatccccgagagggaggggaaaggtaaccactcctttgtggaggtcgccagggtcattgtcgtggatttgcacagtcggctgggcggtgcaatggcggaaagaaaaggaacagccaaagtggactttttgaagaagattgagaaagaaatccaacagaaatgggatactgagagagtgtttgaggtcaatgcatctaatttagagaaacagaccagcaagggcaagtattttgtaaccttcccatatccatatatgaatggacgccttcatttgggacacacgttttctttatccaaatgtgagtttgctgtagggtaccagcgattgaaaggaaaatgttgtctgtttccctttggcctgcactgtactggaatgcctattaaggcatgtgctgataagttgaaaagagaaatagagctgtatggttgcccccctgattttccagatgaagaagaggaagaggaagaaaccagtgttaaaacagaagatataataattaaggataaagctaaaggaaaaaagagtaaagctgctgctaaagctggatcttctaaataccagtggggcattatgaaatcccttggcctgtctgatgaagagatagtaaaattttctgaagcagaacattggcttgattatttcccgccactggctattcaggatttaaaaagaatgggtttgaaggtagactggcgtcgttccttcatcaccactgatgttaatccttactatgattcatttgtcagatggcaatttttaacattaagagaaagaaacaaaattaaatttgggaagcggtatacaatttactctccgaaagatggacagccttgcatggatcatgatagacaaactggagagggtgttggacctcaggaatatactttactcaaattgaaggtgcttgagccatacccatctaaattaagtggcctgaaaggtaaaaatattttcttggtggctgctactctcagacctgagaccatgtttgggcagacaaattgttgggttcgtcctgatatgaagtacattggatttgagacggtgaatggtgatatattcatctgtacccaaaaagcagccaggaatatgtcataccagggctttaccaaagacaatggcgtggtgcctgttgttaaggaattaatgggggaggaaattcttggtgcatcactttctgcacctttaacatcatacaaggtgatctatgttctcccaatgctaactattaaggaggataaaggcactggtgtggttacaagtgttccttccgactcccctgatgatattgctgccctcagagacttgaagaaaaagcaagccttacgagcaaaatatggaattagagatgacatggtcttgccatttgagccggtgccagtcattgaaatcccaggttttggaaatctttctgctgtaaccatttgtgatgagttgaaaattcagagccagaatgaccgggaaaaacttgcagaagcaaaggagaagatatatctaaaaggattttatgagggtatcatgttggtggatggatttaaaggacagaaggttcaagatgtaaagaagactattcagaaaaagatgattgacgctggagatgcacttatttacatggaaccagagaaacaagtgatgtccaggtcgtcagatgaatgtgttgtggctctgtgtgaccagtggtacttggattatggagaagagaattggaagaaacagacatctcagtgcttgaagaacctggaaacattctgtgaggagaccaggaggaattttgaagccaccttaggttggctacaagaacatgcttgctcaagaacttatggtctaggcactcacctgccttgggatgagcagtggctgattgaatcactttctgactccactatttacatggcattttacacagttgcacacctattgcaggggggtaacttgcatggacaggcagagtctccgctgggcattagaccgcaacagatgaccaaggaagtttgggattatgttttcttcaaggaggctccatttcctaagactcagattgcaaaggaaaaattagatcagttaaagcaggagtttgaattctggtatcctgttgatcttcgcgtctctggcaaggatcttgttccaaatcatctttcatattacctttataatcatgtggctatgtggccggaacaaagtgacaaatggcctacagctgtgagagcaaatggacatctcctcctgaactctgagaagatgtcaaaatccacaggcaacttcctcactttgacccaagctattgacaaattttcagcagatggaatgcgtttggctctggctgatgctggtgacactgtagaagatgccaactttgtggaagccatggcagatgcaggtattctccgtctgtacacctgggtagagtgggtgaaagaaatggttgccaactgggacagcctaagaagtggtcctgccagcactttcaatgatagagtttttgccagtgaattgaatgcaggaattataaaaacagatcaaaactatgaaaagatgatgtttaaagaagctttgaaaacagggttttttgagtttcaggccgcaaaagataagtaccgtgaattggctgtggaagggatgcacagagaacttgtgttccggtttattgaagttcagacacttctcctcgctccattctgtccacatttgtgtgagcacatctggacactcctgggaaagcctgactcaattatgaatgcttcatggcctgtggcaggtcctgttaatgaagttttaatacactcctcacagtatcttatggaagtaacacatgaccttagactacgactcaagaactatatgatgccagctaaagggaagaagactgacaaacaacccctgcagaagccctcacattgcaccatctatgtggcaaagaactatccaccttggcaacataccaccctgtctgttctacgtaaacactttgaggccaataacggaaaactgcctgacaacaaagtcattgctagtgaactaggcagtatgccagaactgaagaaatacatgaagaaagtcatgccatttgttgccatgattaaggaaaatctggagaagatggggcctcgtattctggatttgcaattagaatttgatgaaaaggctgtgcttatggagaatatagtctatctgactaattcgcttgagctagaacacatagaagtcaagtttgcctccgaagcagaagataaaatcagggaagactgctgtcctgggaaaccacttaatgtttttagaatagaacctggtgtgtccgtttctctggtgaatccccagccatccaatggccacttctcaaccaaaattgaaatcaggcaaggagataactgtgattccataatcaggcgtttaatgaaaatgaatcgaggaattaaagacctttccaaagtgaaactgatgagatttgatgatccactgttggggcctcgacgagttcctgtcctgggaaaggagtacaccgagaagacccccatttctgagcatgctgttttcaatgtggacctcatgagcaagaaaattcatctgactgagaatgggataagggtggatattggcgatacaataatctatctggttcattaaactcatgcacattggagatttatcctggtttcttaggaatactactactctgattgtgtctactgattggctatcagaaccttaggctggacctaaatagattgatttcatttctaaccatccaattctgcatgtattcataattctatcaagtcatctttgattcctggacctaataaattttttttccctttctttgggtgtccaagagaaatggtttttgccaaactctttttaaaaaacaaattgttgctatttcctagaagtttctggtttttaagatgaacataaaagtgtcagtatgcttcttttatgaggtgtactttatactttgatgaaggctaaggtgtacctaacagctttttatagtatattcatttatggagttagctgtatttttttttaaaaaagaaaagtagtaaattagcagcttttttttttaaatgaagagaacttcatgatgatttaaaagaactaatgagaatattttgacttgacttcaattactaagtattttgtataaagaacaaataggtcctgcattttataagactttttaaagctttaattattcaactaagaaccaataatggcttcttcaaggctaatatcaatagtttataagcagtatatttcacctacactaaatatgggcattttaaaagaagattccccccttcccccccagaaatctgcatttactaaatttgtcttaagtccaattgtgtttaaaggtcatgctggtcgggtgtggtggctcacacctataatcccagcactttgggaggccaaggtgggcagtcacctgaggtcaggagtttgagaccagcctgaccaacatggtgaaaccccgtctctactaaaaatacaaaaattagcttggcatggtggcgggtacctgtaatcccagctgcttgggagtgtgaggcaggagaatcgcttgaacctgggagaccgaggttgcagtgagctgaaaccgtgccattgcactccagcttaggcaacaagagtgaaactctgtctcaatcaatccatcaatcaatcaataaaatagaggtcatgctgactattacagatttaaaaaaaaaaaaaaaaaaaa

SEQ ID NO: 1595 - DNA, 5441 bp, Homo sapiens
agtaaggagccggatgattgcctcagcaggtgtgaagcgtgtgctttagtttcgtgggaggcctggcatccccgagagggaggggaaaggtaaccactcctttgtggaggtcgccagggtcattgtcgtggatttgcacagtcggctgggcggtgcaatggcggaaagaaaaggaacagccaaagtggactttttgaagaagattgagaaagaaatccaacagaaatgggatactgagagagtgtttgaggtcaatgcatctaatttagagaaacagaccagcaagggcaagtattttgtaaccttcccatatccatatatgaatggacgccttcatttgggacacacgttttctttatccaaatgtgagtttgctgtagggtaccagcgattgaaaggaaaatgttgtctgtttccctttggcctgcactgtactggaatgcctattaaggcatgtgctgataagttgaaaagagaaatagagctgtatggttgcccccctgattttccagatgaagaagaggaagaggaagaaaccagtgttaaaacagaagatataataattaaggataaagctaaaggaaaaaagagtaaagctgctgctaaagctggatcttctaaataccagtggggcattatgaaatcccttggcctgtctgatgaagagatagtaaaattttctgaagcagaacattggcttgattatttcccgccactggctattcaggatttaaaaagaatgggtttgaaggtagactggcgtcgttccttcatcaccactgatgttaatccttactatgattcatttgtcagatggcaatttttaacattaagagaaagaaacaaaattaaatttgggaagcggtatacaatttactctccgaaagatggacagccttgcatggatcatgatagacaaactggagagggtgttggacctcaggaatatactttactcaaattgaaggtgcttgagccatacccatctaaattaagtggcctgaaaggtaaaaatattttcttggtggctgctactctcagacctgagaccatgtttgggcagacaaattgttgggttcgtcctgatatgaagtacattggatttgagacggtgaatggtgatatattcatctgtacccaaaaagcagccaggaatatgtcataccagggctttaccaaagacaatggcgtggtgcctgttgttaaggaattaatgggggaggaaattcttggtgcatcactttctgcacctttaacatcatacaaggtgatctatgttctcccaatgctaactattaaggaggataaaggcactggtgtggttacaagtgttccttccgactcccctgatgatattgctgccctcagagacttgaagaaaaagcaagccttacgagcaaaatatggaattagagatgacatggtcttgccatttgagccggtgccagtcattgaaatcccaggttttggaaatctttctgctgtaaccatttgtgatgagttgaaaattcagagccagaatgaccgggaaaaacttgcagaagcaaaggagaagatatatctaaaaggattttatgagggtatcatgttggtggatggatttaaaggacagaaggttcaagatgtaaagaagactattcagaaaaagatgattgacgctggagatgcacttatttacatggaaccagagaaacaagtgatgtccaggtcgtcagatgaatgtgttgtggctctgtgtgaccagtggtacttggattatggagaagagaattggaagaaacagacatctcagtgcttgaagaacctggaaacattctgtgaggagaccaggaggaattttgaagccaccttaggttggctacaagaacatgcttgctcaagaacttatggtctaggcactcacctgccttgggatgagcagtggctgattgaatcactttctgactccactatttacatggcattttacacagttgcacacctattgcaggggggtaacttgcatggacaggcagagtctccgctgggcattagaccgcaacagatgaccaaggaagtttgggattatgttttcttcaaggaggctccatttcctaagactcagattgcaaaggaaaaattagatcagttaaagcaggagtttgaattctggtatcctgttgatcttcgcgtctctggcaaggatcttgttccaaatcatctttcatattacctttataatcatgtggctatgtggccggaacaaagtgacaaatggcctacagctgtgagagcaaatggacatctcctcctgaactctgagaagatgtcaaaatccacaggcaacttcctcactttgacccaagctattgacaaattttcagcagatggaatgcgtttggctctggctgatgctggtgacactgtagaagatgccaactttgtggaagccatggcagatgcaggtattctccgtctgtacacctgggtagagtgggtgaaagaaatggttgccaactgggacagcctaagaagtggtcctgccagcactttcaatgatagagtttttgccagtgaattgaatgcaggaattataaaaacagatcaaaactatgaaaagatgatgtttaaagaagctttgaaaacagggttttttgagtttcaggccgcaaaagataagtaccgtgaattggctgtggaagggatgcacagagaacttgtgttccggtttattgaagttcagacacttctcctcgctccattctgtccacatttgtgtgagcacatctggacactcctgggaaagcctgactcaattatgaatgcttcatggcctgtggcaggtcctgttaatgaagttttaatacactcctcacagtatcttatggaagtaacacatgaccttagactacgactcaagaactatatgatgccagctaaagggaagaagactgacaaacaacccctgcagaagccctcacattgcaccatctatgtggcaaagaactatccaccttggcaacataccaccctgtctgttctacgtaaacactttgaggccaataacggaaaactgcctgacaacaaagtcattgctagtgaactaggcagtatgccagaactgaagaaatacatgaagaaagtcatgccatttgttgccatgattaaggaaaatctggagaagatggggcctcgtattctggatttgcaattagaatttgatgaaaaggctgtgcttatggagaatatagtctatctgactaattcgcttgagctagaacacatagaagtcaagtttgcctccgaagcagaagataaaatcagggaagactgctgtcctgggaaaccacttaatgtttttagaatagaacctggtgtgtccgtttctctggtgaatccccagccatccaatggccacttctcaaccaaaattgaaatcaggcaaggagataactgtgattccataatcaggcgtttaatgaaaatgaatcgaggaattaaagacctttccaaagtgaaactgatgagatttgatgatccactgttggggcctcgacgagttcctgtcctgggaaaggagtacaccgagaagacccccatttctgagcatgctgttttcaatgtggacctcatgagcaagaaaattcatctgactgagaatgggataagggtggatattggcgatacaataatctatctggttcattaaactcatgcacattggagatttatcctggtttcttaggaatactactactctgattgtgtctactgattggctatcagaaccttaggctggacctaaatagattgatttcatttctaaccatccaattctgcatgtattcataattctatcaagtcatctttgattcctggacctaataaattttttttccctttctttgggtgtccaagagaaatggtttttgccaaactctttttaaaaaacaaattgttgctatttcctagaagtttctggtttttaagatgaacataaaagtgtcagtatgcttcttttatgaggtgtactttatactttgatgaaggctaaggtgtacctaacagctttttatagtatattcatttatggagttagctgtatttttttttaaaaaagaaaagtagtaaattagcagcttttttttttaaatgaagagaacttcatgatgatttaaaagaactaatgagaatattttgacttgacttcaattactaagtattttgtataaagaacaaataggtcctgcattttataagactttttaaagctttaattattcaactaagaaccaataatggcttcttcaaggctaatatcaatagtttataagcagtatatttcacctacactaaatatgggcattttaaaagaagattccccccttcccccccagaaatctgcatttactaaatttgtcttaagtccaattgtgtttaaaggtcatgctggtcgggtgtggtggctcacacctataatcccagcactttgggaggccaaggtgggcagtcacctgaggtcaggagtttgagaccagcctgaccaacatggtgaaaccccgtctctactaaaaatacaaaaattagcttggcatggtggcgggtacctgtaatcccagctgcttgggagtgtgaggcaggagaatcgcttgaacctgggagaccgaggttgcagtgagctgaaaccgtgccattgcactccagcttaggcaacaagagtgaaactctgtctcaatcaatccatcaatcaatcaataaaatagaggtcatgctgactattacagatttattcttttattcttgttggagtgtcttttaatatctgcgccatctgtcttcatatgaggaaaaaatgtaaggcattgactaacaggagaaacatttctaattttgatgggtttaatatggagaaagaacaattttgataacccagaggaacctgaattctaactgcggttatgtaaatagagtttattgagcttccttattttgctctccgcagttagggaccactaggcctagtcatatggtttatcacagatttattgaagccaatcataggatgttagaattagaaatcatcaagtgcaaataatcacttatctactagggacaggcactatagcatagtggggtaagagcgcatgctctgaaatcagactagctaggttagatttccagttcttctttttgctactaggatgctcttggccaattactcggagctgcagttcttcatctataaaatggaactaatactggtaccttgtaggcttattgtgagacgtttaggtgaactgatctaggaaaatcataacacagtgcctggcaagtagtaagtctttagtgaatgttaccattgaagaagaagaagatgatggataccaaggtatattggcttcagattactgtagtctgtaatcatgtcctttgtgttggttcctttggggcaactgattctt

SEQ ID NO: 1596 - DNA, 5333 bp, Homo sapiens
gcaggtgtgaagcgtgtgctttagtttcgtgggaggcctggcatccccgagagggaggggaaaggtaaccactcctttgtggaggtcgccagggtcattgtcgtggatttgcacagtcggctgggcggtgcaatggcggtgagaaagaaaaggaacagccaaagtggactttttgaagaagattgagaaagaaatccaacagaaatgggatactgagagagtgtttgaggtcaatgcatctaatttagagaaacagaccagcaagggcaagtattttgtaaccttcccatatccatatatgaatggacgccttcatttgggacacacgttttctttatccaaatgtgagtttgctgtagggtaccagcgattgaaaggaaaatgttgtctgtttccctttggcctgcactgtactggaatgcctattaaggcatgtgctgataagttgaaaagagaaatagagctgtatggttgcccccctgattttccagatgaagaagaggaagaggaagaaaccagtgttaaaacagaagatataataattaaggataaagctaaaggaaaaaagagtaaagctgctgctaaagctggatcttctaaataccagtggggcattatgaaatcccttggcctgtctgatgaagagatagtaaaattttctgaagcagaacattggcttgattatttcccgccactggctattcaggatttaaaaagaatgggtttgaaggtagactggcgtcgttccttcatcaccactgatgttaatccttactatgattcatttgtcagatggcaatttttaacattaagagaaagaaacaaaattaaatttgggaagcggtatacaatttactctccgaaagatggacagccttgcatggatcatgatagacaaactggagaggtgattatttgtgagacagatggcctgaaaggtaaaaatattttcttggtggctgctactctcagacctgagaccatgtttgggcagacaaattgttgggttcgtcctgatatgaagtacattggatttgagacggtgaatggtgatatattcatctgtacccaaaaagcagccaggaatatgtcataccagggctttaccaaagacaatggcgtggtgcctgttgttaaggaattaatgggggaggaaattcttggtgcatcactttctgcacctttaacatcatacaaggtgatctatgttctcccaatgctaactattaaggaggataaaggcactggtgtggttacaagtgttccttccgactcccctgatgatattgctgccctcagagacttgaagaaaaagcaagccttacgagcaaaatatggaattagagatgacatggtcttgccatttgagccggtgccagtcattgaaatcccaggttttggaaatctttctgctgtaaccatttgtgatgagttgaaaattcagagccagaatgaccgggaaaaacttgcagaagcaaaggagaagatatatctaaaaggattttatgagggtatcatgttggtggatggatttaaaggacagaaggttcaagatgtaaagaagactattcagaaaaagatgattgacgctggagatgcacttatttacatggaaccagagaaacaagtgatgtccaggtacttggattatggagaagagaattggaagaaacagacatctcagtgcttgaagaacctggaaacattctgtgaggagaccaggaggaattttgaagccaccttaggttggctacaagaacatgcttgctcaagaacttatggtctaggcactcacctgccttgggatgagcagtggctgattgaatcactttctgactccactatttacatggcattttacacagttgcacacctattgcaggggggtaacttgcatggacaggcagagtctccgctgggcattagaccgcaacagatgaccaaggaagtttgggattatgttttcttcaaggaggctccatttcctaagactcagattgcaaaggaaaaattagatcagttaaagcaggagtttgaattctggtatcctgttgatcttcgcgtctctggcaaggatcttgttccaaatcatctttcatattacctttataatcatgtggctatgtggccggaacaaagtgacaaatggcctacagctgtgagagcaaatggacatctcctcctgaactctgagaagatgtcaaaatccacaggcaacttcctcactttgacccaagctattgacaaattttcagcagatggaatgcgtttggctctggctgatgctggtgacactgtagaagatgccaactttgtggaagccatggcagatgcaggtattctccgtctgtacacctgggtagagtgggtgaaagaaatggttgccaactgggacagcctaagaagtggtcctgccagcactttcaatgatagagtttttgccagtgaattgaatgcaggaattataaaaacagatcaaaactatgaaaagatgatgtttaaagaagctttgaaaacagggttttttgagtttcaggccgcaaaagataagtaccgtgaattggctgtggaagggatgcacagagaacttgtgttccggtttattgaagttcagacacttctcctcgctccattctgtccacatttgtgtgagcacatctggacactcctgggaaagcctgactcaattatgaatgcttcatggcctgtggcaggtcctgttaatgaagttttaatacactcctcacagtatcttatggaagtaacacatgaccttagactacgactcaagaactatatgatgccagctaaagggaagaagactgacaaacaacccctgcagaagccctcacattgcaccatctatgtggcaaagaactatccaccttggcaacataccaccctgtctgttctacgtaaacactttgaggccaataacggaaaactgcctgacaacaaagtcattgctagtgaactaggcagtatgccagaactgaagaaatacatgaagaaagtcatgccatttgttgccatgattaaggaaaatctggagaagatggggcctcgtattctggatttgcaattagaatttgatgaaaaggctgtgcttatggagaatatagtctatctgactaattcgcttgagctagaacacatagaagtcaagtttgcctccgaagcagaagataaaatcagggaagactgctgtcctgggaaaccacttaatgtttttagaatagaacctggtgtgtccgtttctctggtgaatccccagccatccaatggccacttctcaaccaaaattgaaatcaggcaaggagataactgtgattccataatcaggcgtttaatgaaaatgaatcgaggaattaaagacctttccaaagtgaaactgatgagatttgatgatccactgttggggcctcgacgagttcctgtcctgggaaaggagtacaccgagaagacccccatttctgagcatgctgttttcaatgtggacctcatgagcaagaaaattcatctgactgagaatgggataagggtggatattggcgatacaataatctatctggttcattaaactcatgcacattggagatttatcctggtttcttaggaatactactactctgattgtgtctactgattggctatcagaaccttaggctggacctaaatagattgatttcatttctaaccatccaattctgcatgtattcataattctatcaagtcatctttgattcctggacctaataaattttttttccctttctttgggtgtccaagagaaatggtttttgccaaactctttttaaaaaacaaattgttgctatttcctagaagtttctggtttttaagatgaacataaaagtgtcagtatgcttcttttatgaggtgtactttatactttgatgaaggctaaggtgtacctaacagctttttatagtatattcatttatggagttagctgtatttttttttaaaaaagaaaagtagtaaattagcagcttttttttttaaatgaagagaacttcatgatgatttaaaagaactaatgagaatattttgacttgacttcaattactaagtattttgtataaagaacaaataggtcctgcattttataagactttttaaagctttaattattcaactaagaaccaataatggcttcttcaaggctaatatcaatagtttataagcagtatatttcacctacactaaatatgggcattttaaaagaagattccccccttcccccccagaaatctgcatttactaaatttgtcttaagtccaattgtgtttaaaggtcatgctggtcgggtgtggtggctcacacctataatcccagcactttgggaggccaaggtgggcagtcacctgaggtcaggagtttgagaccagcctgaccaacatggtgaaaccccgtctctactaaaaatacaaaaattagcttggcatggtggcgggtacctgtaatcccagctgcttgggagtgtgaggcaggagaatcgcttgaacctgggagaccgaggttgcagtgagctgaaaccgtgccattgcactccagcttaggcaacaagagtgaaactctgtctcaatcaatccatcaatcaatcaataaaatagaggtcatgctgactattacagatttattcttttattcttgttggagtgtcttttaatatctgcgccatctgtcttcatatgaggaaaaaatgtaaggcattgactaacaggagaaacatttctaattttgatgggtttaatatggagaaagaacaattttgataacccagaggaacctgaattctaactgcggttatgtaaatagagtttattgagcttccttattttgctctccgcagttagggaccactaggcctagtcatatggtttatcacagatttattgaagccaatcataggatgttagaattagaaatcatcaagtgcaaataatcacttatctactagggacaggcactatagcatagtggggtaagagcgcatgctctgaaatcagactagctaggttagatttccagttcttctttttgctactaggatgctcttggccaattactcggagctgcagttcttcatctataaaatggaactaatactggtaccttgtaggcttattgtgagacgtttaggtgaactgatctaggaaaatcataacacagtgcctggcaagtagtaagtctttagtgaatgttaccattgaagaagaagaagatgatggataccaaggtatattggcttcagattactgtagtctgtaatcatgtcctttgtgttggttcctttggggcaactgattctt

SEQ ID NO: 1597 - DNA, 5695 bp, Homo sapiens
ggaagaggatggcagggccacgccccagcccatgggccaggctgctcctggcagccttgatcagcgtcagcctctctgggaccttggcaaaccgctgcaagaaggccccagtgaagagctgcacggagtgtgtccgtgtggataaggactgcgcctactgcacagacgagatgttcagggaccggcgctgcaacacccaggcggagctgctggccgcgggctgccagcgggagagcatcgtggtcatggagagcagcttccaaatcacagaggagacccagattgacaccaccctgcggcgcagccagatgtccccccaaggcctgcgggtccgtctgcggcccggtgaggagcggcattttgagctggaggtgtttgagccactggagagccccgtggacctgtacatcctcatggacttctccaactccatgtccgatgatctggacaacctcaagaagatggggcagaacctggctcgggtcctgagccagctcaccagcgactacactattggatttggcaagtttgtggacaaagtcagcgtcccgcagacggacatgaggcctgagaagctgaaggagccctggcccaacagtgacccccccttctccttcaagaacgtcatcagcctgacagaagatgtggatgagttccggaataaactgcagggagagcggatctcaggcaacctggatgctcctgagggcggcttcgatgccatcctgcagacagctgtgtgcacgagggacattggctggcgcccggacagcacccacctgctggtcttctccaccgagtcagccttccactatgaggctgatggcgccaacgtgctggctggcatcatgagccgcaacgatgaacggtgccacctggacaccacgggcacctacacccagtacaggacacaggactacccgtcggtgcccaccctggtgcgcctgctcgccaagcacaacatcatccccatctttgctgtcaccaactactcctatagctactacgagaagcttcacacctatttccctgtctcctcactgggggtgctgcaggaggactcgtccaacatcgtggagctgctggaggaggccttcaatcggatccgctccaacctggacatccgggccctagacagcccccgaggccttcggacagaggtcacctccaagatgttccagaagacgaggactgggtcctttcacatccggcggggggaagtgggtatataccaggtgcagctgcgggcccttgagcacgtggatgggacgcacgtgtgccagctgccggaggaccagaagggcaacatccatctgaaaccttccttctccgacggcctcaagatggacgcgggcatcatctgtgatgtgtgcacctgcgagctgcaaaaagaggtgcggtcagctcgctgcagcttcaacggagacttcgtgtgcggacagtgtgtgtgcagcgagggctggagtggccagacctgcaactgctccaccggctctctgagtgacattcagccctgcctgcgggagggcgaggacaagccgtgctccggccgtggggagtgccagtgcgggcactgtgtgtgctacggcgaaggccgctacgagggtcagttctgcgagtatgacaacttccagtgtccccgcacttccgggttcctctgcaatgaccgaggacgctgctccatgggccagtgtgtgtgtgagcctggttggacaggcccaagctgtgactgtcccctcagcaatgccacctgcatcgacagcaatgggggcatctgtaatggacgtggccactgtgagtgtggccgctgccactgccaccagcagtcgctctacacggacaccatctgcgagatcaactactcggcgatccacccgggcctctgcgaggacctacgctcctgcgtgcagtgccaggcgtggggcaccggcgagaagaaggggcgcacgtgtgaggaatgcaacttcaaggtcaagatggtggacgagcttaagagagccgaggaggtggtggtgcgctgctccttccgggacgaggatgacgactgcacctacagctacaccatggaaggtgacggcgcccctgggcccaacagcactgtcctggtgcacaagaagaaggactgccctccgggctccttctggtggctcatccccctgctcctcctcctcctgccgctcctggccctgctactgctgctatgctggaagtactgtgcctgctgcaaggcctgcctggcacttctcccgtgctgcaaccgaggtcacatggtgggctttaaggaagaccactacatgctgcgggagaacctgatggcctctgaccacttggacacgcccatgctgcgcagcgggaacctcaagggccgtgacgtggtccgctggaaggtcaccaacaacatgcagcggcctggctttgccactcatgccgccagcatcaaccccacagagctggtgccctacgggctgtccttgcgcctggcccgcctttgcaccgagaacctgctgaagcctgacactcgggagtgcgcccagctgcgccaggaggtggaggagaacctgaacgaggtctacaggcagatctccggtgtacacaagctccagcagaccaagttccggcagcagcccaatgccgggaaaaagcaagaccacaccattgtggacacagtgctgatggcgccccgctcggccaagccggccctgctgaagcttacagagaagcaggtggaacagagggccttccacgacctcaaggtggcccccggctactacaccctcactgcagaccaggacgcccggggcatggtggagttccaggagggcgtggagctggtggacgtacgggtgcccctctttatccggcctgaggatgacgacgagaagcagctgctggtggaggccatcgacgtgcccgcaggcactgccaccctcggccgccgcctggtaaacatcaccatcatcaaggagcaagccagagacgtggtgtcctttgagcagcctgagttctcggtcagccgcggggaccaggtggcccgcatccctgtcatccggcgtgtcctggacggcgggaagtcccaggtctcctaccgcacacaggatggcaccgcgcagggcaaccgggactacatccccgtggagggtgagctgctgttccagcctggggaggcctggaaagagctgcaggtgaagctcctggagctgcaagaagttgactccctcctgcggggccgccaggtccgccgtttccacgtccagctcagcaaccctaagtttggggcccacctgggccagccccactccaccaccatcatcatcagggacccagatgaactggaccggagcttcacgagtcagatgttgtcatcacagccaccccctcacggcgacctgggcgccccgcagaaccccaatgctaaggccgctgggtccaggaagatccatttcaactggctgcccccttctggcaagccaatggggtacagggtaaagtactggattcagggtgactccgaatccgaagcccacctgctcgacagcaaggtgccctcagtggagctcaccaacctgtacccgtattgcgactatgagatgaaggtgtgcgcctacggggctcagggcgagggaccctacagctccctggtgtcctgccgcacccaccaggaagtgcccagcgagccagggcgtctggccttcaatgtcgtctcctccacggtgacccagctgagctgggctgagccggctgagaccaacggtgagatcacagcctacgaggtctgctatggcctggtcaacgatgacaaccgacctattgggcccatgaagaaagtgctggttgacaaccctaagaaccggatgctgcttattgagaaccttcgggagtcccagccctaccgctacacggtgaaggcgcgcaacggggccggctgggggcctgagcgggaggccatcatcaacctggccacccagcccaagaggcccatgtccatccccatcatccctgacatccctatcgtggacgcccagagcggggaggactacgacagcttccttatgtacagcgatgacgttctacgctctccatcgggcagccagaggcccagcgtctccgatgacactgagcacctggtgaatggccggatggactttgccttcccgggcagcaccaactccctgcacaggatgaccacgaccagtgctgctgcctatggcacccacctgagcccacacgtgccccaccgcgtgctaagcacatcctccaccctcacacgggactacaactcactgacccgctcagaacactcacactcgaccacactgcccagggactactccaccctcacctccgtctcctcccacggcctccctcccatctgggaacacgggaggagcaggcttccgctgtcctgggccctggggtcccggagtcgggctcagatgaaagggttccccccttccaggggcccacgagactctataatcctggctgggaggccagcagcgccctcctggggcccagactctcgcctgactgctggtgtgcccgacacgcccacccgcctggtgttctctgccctggggcccacatctctcagagtgagctggcaggagccgcggtgcgagcggccgctgcagggctacagtgtggagtaccagctgctgaacggcggtgagctgcatcggctcaacatccccaaccctgcccagacctcggtggtggtggaagacctcctgcccaaccactcctacgtgttccgcgtgcgggcccagagccaggaaggctggggccgagagcgtgagggtgtcatcaccattgaatcccaggtgcacccgcagagcccactgtgtcccctgccaggctccgccttcactttgagcactcccagtgccccaggcccgctggtgttcactgccctgagcccagactcgctgcagctgagctgggagcggccacggaggcccaatggggatatcgtcggctacctggtgacctgtgagatggcccaaggaggagggccagccaccgcattccgggtggatggagacagccccgagagccggctgaccgtgccgggcctcagcgagaacgtgccctacaagttcaaggtgcaggccaggaccactgagggcttcgggccagagcgcgagggcatcatcaccatagagtcccaggatggaggacccttcccgcagctgggcagccgtgccgggctcttccagcacccgctgcaaagcgagtacagcagcatcaccaccacccacaccagcgccaccgagcccttcctagtggatgggctgaccctgggggcccagcacctggaggcaggcggctccctcacccggcatgtgacccaggagtttgtgagccggacactgaccaccagcggaacccttagcacccacatggaccaacagttcttccaaacttgaccgcaccctgccccacccccgccacgtcccactaggcgtcctcccgactcctctcccggagcctcctcagctactccatccttgcacccctgggggcccagcccacccgcatgcacagagcaggggctaggtgtctcctgggaggcatgaagggggcaaggtccgtcctctgtgggcccaaacctatttgtaaccaaagagctgggagcagcacaaggacccagcctttgttctgcacttaataaatggttttgctactgctaaaaaaa

SEQ ID NO: 1598 - DNA, 5715 bp, Homo sapiens
gcgctgcccgcctcgtccccacccccccaacccccgcgcccgccctcggacagtccctgctcgcccgcgcgctgcagccccatctcctagcggcagcccaggcgcggagggagcgagtccgccccgaggtaggtccaggacgggcgcacagcagcagccgaggctggccgggagagggaggaagaggatggcagggccacgccccagcccatgggccaggctgctcctggcagccttgatcagcgtcagcctctctgggaccttggcaaaccgctgcaagaaggccccagtgaagagctgcacggagtgtgtccgtgtggataaggactgcgcctactgcacagacgagatgttcagggaccggcgctgcaacacccaggcggagctgctggccgcgggctgccagcgggagagcatcgtggtcatggagagcagcttccaaatcacagaggagacccagattgacaccaccctgcggcgcagccagatgtccccccaaggcctgcgggtccgtctgcggcccggtgaggagcggcattttgagctggaggtgtttgagccactggagagccccgtggacctgtacatcctcatggacttctccaactccatgtccgatgatctggacaacctcaagaagatggggcagaacctggctcgggtcctgagccagctcaccagcgactacactattggatttggcaagtttgtggacaaagtcagcgtcccgcagacggacatgaggcctgagaagctgaaggagccctggcccaacagtgacccccccttctccttcaagaacgtcatcagcctgacagaagatgtggatgagttccggaataaactgcagggagagcggatctcaggcaacctggatgctcctgagggcggcttcgatgccatcctgcagacagctgtgtgcacgagggacattggctggcgcccggacagcacccacctgctggtcttctccaccgagtcagccttccactatgaggctgatggcgccaacgtgctggctggcatcatgagccgcaacgatgaacggtgccacctggacaccacgggcacctacacccagtacaggacacaggactacccgtcggtgcccaccctggtgcgcctgctcgccaagcacaacatcatccccatctttgctgtcaccaactactcctatagctactacgagaagcttcacacctatttccctgtctcctcactgggggtgctgcaggaggactcgtccaacatcgtggagctgctggaggaggccttcaatcggatccgctccaacctggacatccgggccctagacagcccccgaggccttcggacagaggtcacctccaagatgttccagaagacgaggactgggtcctttcacatccggcggggggaagtgggtatataccaggtgcagctgcgggcccttgagcacgtggatgggacgcacgtgtgccagctgccggaggaccagaagggcaacatccatctgaaaccttccttctccgacggcctcaagatggacgcgggcatcatctgtgatgtgtgcacctgcgagctgcaaaaagaggtgcggtcagctcgctgcagcttcaacggagacttcgtgtgcggacagtgtgtgtgcagcgagggctggagtggccagacctgcaactgctccaccggctctctgagtgacattcagccctgcctgcgggagggcgaggacaagccgtgctccggccgtggggagtgccagtgcgggcactgtgtgtgctacggcgaaggccgctacgagggtcagttctgcgagtatgacaacttccagtgtccccgcacttccgggttcctctgcaatgaccgaggacgctgctccatgggccagtgtgtgtgtgagcctggttggacaggcccaagctgtgactgtcccctcagcaatgccacctgcatcgacagcaatgggggcatctgtaatggacgtggccactgtgagtgtggccgctgccactgccaccagcagtcgctctacacggacaccatctgcgagatcaactactcggcgatccacccgggcctctgcgaggacctacgctcctgcgtgcagtgccaggcgtggggcaccggcgagaagaaggggcgcacgtgtgaggaatgcaacttcaaggtcaagatggtggacgagcttaagagagccgaggaggtggtggtgcgctgctccttccgggacgaggatgacgactgcacctacagctacaccatggaaggtgacggcgcccctgggcccaacagcactgtcctggtgcacaagaagaaggactgccctccgggctccttctggtggctcatccccctgctcctcctcctcctgccgctcctggccctgctactgctgctatgctggaagtactgtgcctgctgcaaggcctgcctggcacttctcccgtgctgcaaccgaggtcacatggtgggctttaaggaagaccactacatgctgcgggagaacctgatggcctctgaccacttggacacgcccatgctgcgcagcgggaacctcaagggccgtgacgtggtccgctggaaggtcaccaacaacatgcagcggcctggctttgccactcatgccgccagcatcaaccccacagagctggtgccctacgggctgtccttgcgcctggcccgcctttgcaccgagaacctgctgaagcctgacactcgggagtgcgcccagctgcgccaggaggtggaggagaacctgaacgaggtctacaggcagatctccggtgtacacaagctccagcagaccaagttccggcagcagcccaatgccgggaaaaagcaagaccacaccattgtggacacagtgctgatggcgccccgctcggccaagccggccctgctgaagcttacagagaagcaggtggaacagagggccttccacgacctcaaggtggcccccggctactacaccctcactgcagaccaggacgcccggggcatggtggagttccaggagggcgtggagctggtggacgtacgggtgcccctctttatccggcctgaggatgacgacgagaagcagctgctggtggaggccatcgacgtgcccgcaggcactgccaccctcggccgccgcctggtaaacatcaccatcatcaaggagcaagccagagacgtggtgtcctttgagcagcctgagttctcggtcagccgcggggaccaggtggcccgcatccctgtcatccggcgtgtcctggacggcgggaagtcccaggtctcctaccgcacacaggatggcaccgcgcagggcaaccgggactacatccccgtggagggtgagctgctgttccagcctggggaggcctggaaagagctgcaggtgaagctcctggagctgcaagaagttgactccctcctgcggggccgccaggtccgccgtttccacgtccagctcagcaaccctaagtttggggcccacctgggccagccccactccaccaccatcatcatcagggacccagatgaactggaccggagcttcacgagtcagatgttgtcatcacagccaccccctcacggcgacctgggcgccccgcagaaccccaatgctaaggccgctgggtccaggaagatccatttcaactggctgcccccttctggcaagccaatggggtacagggtaaagtactggattcagggtgactccgaatccgaagcccacctgctcgacagcaaggtgccctcagtggagctcaccaacctgtacccgtattgcgactatgagatgaaggtgtgcgcctacggggctcagggcgagggaccctacagctccctggtgtcctgccgcacccaccaggaagtgcccagcgagccagggcgtctggccttcaatgtcgtctcctccacggtgacccagctgagctgggctgagccggctgagaccaacggtgagatcacagcctacgaggtctgctatggcctggtcaacgatgacaaccgacctattgggcccatgaagaaagtgctggttgacaaccctaagaaccggatgctgcttattgagaaccttcgggagtcccagccctaccgctacacggtgaaggcgcgcaacggggccggctgggggcctgagcgggaggccatcatcaacctggccacccagcccaagaggcccatgtccatccccatcatccctgacatccctatcgtggacgcccagagcggggaggactacgacagcttccttatgtacagcgatgacgttctacgctctccatcgggcagccagaggcccagcgtctccgatgacactgagcacctggtgaatggccggatggactttgccttcccgggcagcaccaactccctgcacaggatgaccacgaccagtgctgctgcctatggcacccacctgagcccacacgtgccccaccgcgtgctaagcacatcctccaccctcacacgggactacaactcactgacccgctcagaacactcacactcgaccacactgcccagggactactccaccctcacctccgtctcctcccacgactctcgcctgactgctggtgtgcccgacacgcccacccgcctggtgttctctgccctggggcccacatctctcagagtgagctggcaggagccgcggtgcgagcggccgctgcagggctacagtgtggagtaccagctgctgaacggcggtgagctgcatcggctcaacatccccaaccctgcccagacctcggtggtggtggaagacctcctgcccaaccactcctacgtgttccgcgtgcgggcccagagccaggaaggctggggccgagagcgtgagggtgtcatcaccattgaatcccaggtgcacccgcagagcccactgtgtcccctgccaggctccgccttcactttgagcactcccagtgccccaggcccgctggtgttcactgccctgagcccagactcgctgcagctgagctgggagcggccacggaggcccaatggggatatcgtcggctacctggtgacctgtgagatggcccaaggaggagggccagccaccgcattccgggtggatggagacagccccgagagccggctgaccgtgccgggcctcagcgagaacgtgccctacaagttcaaggtgcaggccaggaccactgagggcttcgggccagagcgcgagggcatcatcaccatagagtcccaggatggaggacccttcccgcagctgggcagccgtgccgggctcttccagcacccgctgcaaagcgagtacagcagcatcaccaccacccacaccagcgccaccgagcccttcctagtggatgggctgaccctgggggcccagcacctggaggcaggcggctccctcacccggcatgtgacccaggagtttgtgagccggacactgaccaccagcggaacccttagcacccacatggaccaacagttcttccaaacttgaccgcaccctgccccacccccgccacgtcccactaggcgtcctcccgactcctctcccggagcctcctcagctactccatccttgcacccctgggggcccagcccacccgcatgcacagagcaggggctaggtgtctcctgggaggcatgaagggggcaaggtccgtcctctgtgggcccaaacctatttgtaaccaaagagctgggagcagcacaaggacccagcctttgttctgcacttaataaatggttttgctactgctaaaaaaa

SEQ ID NO: 1599 - DNA, 5920 bp, Homo sapiens
gccctcggacagtccctgctcgcccgcgcgctgcagccccatctcctagcggcagcccaggcgcggagggagcgagtccgccccgaggaggaagaggatggcagggccacgccccagcccatgggccaggctgctcctggcagccttgatcagcgtcagcctctctgggaccttggcaaaccgctgcaagaaggccccagtgaagagctgcacggagtgtgtccgtgtggataaggactgcgcctactgcacagacgagatgttcagggaccggcgctgcaacacccaggcggagctgctggccgcgggctgccagcgggagagcatcgtggtcatggagagcagcttccaaatcacagaggagacccagattgacaccaccctgcggcgcagccagatgtccccccaaggcctgcgggtccgtctgcggcccggtgaggagcggcattttgagctggaggtgtttgagccactggagagccccgtggacctgtacatcctcatggacttctccaactccatgtccgatgatctggacaacctcaagaagatggggcagaacctggctcgggtcctgagccagctcaccagcgactacactattggatttggcaagtttgtggacaaagtcagcgtcccgcagacggacatgaggcctgagaagctgaaggagccctggcccaacagtgacccccccttctccttcaagaacgtcatcagcctgacagaagatgtggatgagttccggaataaactgcagggagagcggatctcaggcaacctggatgctcctgagggcggcttcgatgccatcctgcagacagctgtgtgcacgagggacattggctggcgcccggacagcacccacctgctggtcttctccaccgagtcagccttccactatgaggctgatggcgccaacgtgctggctggcatcatgagccgcaacgatgaacggtgccacctggacaccacgggcacctacacccagtacaggacacaggactacccgtcggtgcccaccctggtgcgcctgctcgccaagcacaacatcatccccatctttgctgtcaccaactactcctatagctactacgagaagcttcacacctatttccctgtctcctcactgggggtgctgcaggaggactcgtccaacatcgtggagctgctggaggaggccttcaatcggatccgctccaacctggacatccgggccctagacagcccccgaggccttcggacagaggtcacctccaagatgttccagaagacgaggactgggtcctttcacatccggcggggggaagtgggtatataccaggtgcagctgcgggcccttgagcacgtggatgggacgcacgtgtgccagctgccggaggaccagaagggcaacatccatctgaaaccttccttctccgacggcctcaagatggacgcgggcatcatctgtgatgtgtgcacctgcgagctgcaaaaagaggtgcggtcagctcgctgcagcttcaacggagacttcgtgtgcggacagtgtgtgtgcagcgagggctggagtggccagacctgcaactgctccaccggctctctgagtgacattcagccctgcctgcgggagggcgaggacaagccgtgctccggccgtggggagtgccagtgcgggcactgtgtgtgctacggcgaaggccgctacgagggtcagttctgcgagtatgacaacttccagtgtccccgcacttccgggttcctctgcaatgaccgaggacgctgctccatgggccagtgtgtgtgtgagcctggttggacaggcccaagctgtgactgtcccctcagcaatgccacctgcatcgacagcaatgggatccacccgggcctctgcgaggacctacgctcctgcgtgcagtgccaggcgtggggcaccggcgagaagaaggggcgcacgtgtgaggaatgcaacttcaaggtcaagatggtggacgagcttaagagagccgaggaggtggtggtgcgctgctccttccgggacgaggatgacgactgcacctacagctacaccatggaaggtgacggcgcccctgggcccaacagcactgtcctggtgcacaagaagaagggcaccacctccccctgcctcctcctctccagactgccctccgggctccttctggtggctcatccccctgctcctcctcctcctgccgctcctggccctgctactgctgctatgctggaagtactgtgcctgctgcaaggcctgcctggcacttctcccgtgctgcaaccgaggtcacatggtgggctttaaggaagaccactacatgctgcgggagaacctgatggcctctgaccacttggacacgcccatgctgcgcagcgggaacctcaagggccgtgacgtggtccgctggaaggtcaccaacaacatgcagcggcctggctttgccactcatgccgccagcatcaaccccacagagctggtgccctacgggctgtccttgcgcctggcccgcctttgcaccgagaacctgctgaagcctgacactcgggagtgcgcccagctgcgccaggaggtggaggagaacctgaacgaggtctacaggcagatctccggtgtacacaagctccagcagaccaagttccggcagcagcccaatgccgggaaaaagcaagaccacaccattgtggacacagtgctgatggcgccccgctcggccaagccggccctgctgaagcttacagagaagcaggtggaacagagggccttccacgacctcaaggtggcccccggctactacaccctcactgcagaccaggacgcccggggcatggtggagttccaggagggcgtggagctggtggacgtacgggtgcccctctttatccggcctgaggatgacgacgagaagcagctgctggtggaggccatcgacgtgcccgcaggcactgccaccctcggccgccgcctggtaaacatcaccatcatcaaggagcaagccagagacgtggtgtcctttgagcagcctgagttctcggtcagccgcggggaccaggtggcccgcatccctgtcatccggcgtgtcctggacggcgggaagtcccaggtctcctaccgcacacaggatggcaccgcgcagggcaaccgggactacatccccgtggagggtgagctgctgttccagcctggggaggcctggaaagagctgcaggtgaagctcctggagctgcaagaagttgactccctcctgcggggccgccaggtccgccgtttccacgtccagctcagcaaccctaagtttggggcccacctgggccagccccactccaccaccatcatcatcagggacccagatgaactggaccggagcttcacgagtcagatgttgtcatcacagccaccccctcacggcgacctgggcgccccgcagaaccccaatgctaaggccgctgggtccaggaagatccatttcaactggctgcccccttctggcaagccaatggggtacagggtaaagtactggattcagggtgactccgaatccgaagcccacctgctcgacagcaaggtgccctcagtggagctcaccaacctgtacccgtattgcgactatgagatgaaggtgtgcgcctacggggctcagggcgagggaccctacagctccctggtgtcctgccgcacccaccaggaagtgcccagcgagccagggcgtctggccttcaatgtcgtctcctccacggtgacccagctgagctgggctgagccggctgagaccaacggtgagatcacagcctacgaggtctgctatggcctggtcaacgatgacaaccgacctattgggcccatgaagaaagtgctggttgacaaccctaagaaccggatgctgcttattgagaaccttcgggagtcccagccctaccgctacacggtgaaggcgcgcaacggggccggctgggggcctgagcgggaggccatcatcaacctggccacccagcccaagaggcccatgtccatccccatcatccctgacatccctatcgtggacgcccagagcggggaggactacgacagcttccttatgtacagcgatgacgttctacgctctccatcgggcagccagaggcccagcgtctccgatgacactggctgcggctggaagttcgagcccctgctgggggaggagctggacctgcggcgcgtcacgtggcggctgcccccggagctcatcccgcgcctgtcggccagcagcgggcgctcctccgacgccgaggcgccccacgggcccccggacgacggcggcgcgggcgggaagggcggcagcctgccccgcagtgcgacacccgggccccccggagagcacctggtgaatggccggatggactttgccttcccgggcagcaccaactccctgcacaggatgaccacgaccagtgctgctgcctatggcacccacctgagcccacacgtgccccaccgcgtgctaagcacatcctccaccctcacacgggactacaactcactgacccgctcagaacactcacactcgaccacactgccgagggactactccaccctcacctccgtctcctcccacggcctccctcccatctgggaacacgggaggagcaggcttccgctgtcctgggccctggggtcccggagtcgggctcagatgaaagggttccccccttccaggggcccacgagactctataatcctggctgggaggccagcagcgccctcctggggcccagactctcgcctgactgctggtgtgcccgacacgcccacccgcctggtgttctctgccctggggcccacatctctcagagtgagctggcaggagccgcggtgcgagcggccgctgcagggctacagtgtggagtaccagctgctgaacggcggtgagctgcatcggctcaacatccccaaccctgcccagacctcggtggtggtggaagacctcctgcccaaccactcctacgtgttccgcgtgcgggcccagagccaggaaggctggggccgagagcgtgagggtgtcatcaccattgaatcccaggtgcacccgcagagcccactgtgtcccctgccaggctccgccttcactttgagcactcccagtgccccaggcccgctggtgttcactgccctgagcccagactcgctgcagctgagctgggagcggccacggaggcccaatggggatatcgtcggctacctggtgacctgtgagatggcccaaggaggagggccagccaccgcattccgggtggatggagacagccccgagagccggctgaccgtgccgggcctcagcgagaacgtgccctacaagttcaaggtgcaggccaggaccactgagggcttcgggccagagcgcgagggcatcatcaccatagagtcccaggatggaggacccttcccgcagctgggcagccgtgccgggctcttccagcacccgctgcaaagcgagtacagcagcatcaccaccacccacaccagcgccaccgagcccttcctagtggatgggctgaccctgggggcccagcacctggaggcaggcggctccctcacccggcatgtgacccaggagtttgtgagccggacactgaccaccagcggaacccttagcacccacatggaccaacagttcttccaaacttgaccgcaccctgccccacccccgccacgtcccactaggcgtcctcccgactcctctcccggagcctcctcagctactccatccttgcacccctgggggcccagcccacccgcatgcacagagcaggggctaggtgtctcctgggaggcatgaagggggcaaggtccgtcctctgtgggcccaaacctatttgtaaccaaagagctgggagcagcacaaggacccagcctttgttctgcacttaataaatggttttgctactgcta

SEQ ID NO: 1600 - DNA, 5866 bp, Homo sapiens
gccctcggacagtccctgctcgcccgcgcgctgcagccccatctcctagcggcagcccaggcgcggagggagcgagtccgccccgaggaggaagaggatggcagggccacgccccagcccatgggccaggctgctcctggcagccttgatcagcgtcagcctctctgggaccttggcaaaccgctgcaagaaggccccagtgaagagctgcacggagtgtgtccgtgtggataaggactgcgcctactgcacagacgagatgttcagggaccggcgctgcaacacccaggcggagctgctggccgcgggctgccagcgggagagcatcgtggtcatggagagcagcttccaaatcacagaggagacccagattgacaccaccctgcggcgcagccagatgtccccccaaggcctgcgggtccgtctgcggcccggtgaggagcggcattttgagctggaggtgtttgagccactggagagccccgtggacctgtacatcctcatggacttctccaactccatgtccgatgatctggacaacctcaagaagatggggcagaacctggctcgggtcctgagccagctcaccagcgactacactattggatttggcaagtttgtggacaaagtcagcgtcccgcagacggacatgaggcctgagaagctgaaggagccctggcccaacagtgacccccccttctccttcaagaacgtcatcagcctgacagaagatgtggatgagttccggaataaactgcagggagagcggatctcaggcaacctggatgctcctgagggcggcttcgatgccatcctgcagacagctgtgtgcacgagggacattggctggcgcccggacagcacccacctgctggtcttctccaccgagtcagccttccactatgaggctgatggcgccaacgtgctggctggcatcatgagccgcaacgatgaacggtgccacctggacaccacgggcacctacacccagtacaggacacaggactacccgtcggtgcccaccctggtgcgcctgctcgccaagcacaacatcatccccatctttgctgtcaccaactactcctatagctactacgagaagcttcacacctatttccctgtctcctcactgggggtgctgcaggaggactcgtccaacatcgtggagctgctggaggaggccttcaatcggatccgctccaacctggacatccgggccctagacagcccccgaggccttcggacagaggtcacctccaagatgttccagaagacgaggactgggtcctttcacatccggcggggggaagtgggtatataccaggtgcagctgcgggcccttgagcacgtggatgggacgcacgtgtgccagctgccggaggaccagaagggcaacatccatctgaaaccttccttctccgacggcctcaagatggacgcgggcatcatctgtgatgtgtgcacctgcgagctgcaaaaagaggtgcggtcagctcgctgcagcttcaacggagacttcgtgtgcggacagtgtgtgtgcagcgagggctggagtggccagacctgcaactgctccaccggctctctgagtgacattcagccctgcctgcgggagggcgaggacaagccgtgctccggccgtggggagtgccagtgcgggcactgtgtgtgctacggcgaaggccgctacgagggtcagttctgcgagtatgacaacttccagtgtccccgcacttccgggttcctctgcaatgaccgaggacgctgctccatgggccagtgtgtgtgtgagcctggttggacaggcccaagctgtgactgtcccctcagcaatgccacctgcatcgacagcaatgggggcatctgtaatggacgtggccactgtgagtgtggccgctgccactgccaccagcagtcgctctacacggacaccatctgcgagatcaactactcggcgatccacccgggcctctgcgaggacctacgctcctgcgtgcagtgccaggcgtggggcaccggcgagaagaaggggcgcacgtgtgaggaatgcaacttcaaggtcaagatggtggacgagcttaagagagccgaggaggtggtggtgcgctgctccttccgggacgaggatgacgactgcacctacagctacaccatggaaggtgacggcgcccctgggcccaacagcactgtcctggtgcacaagaagaaggactgccctccgggctccttctggtggctcatccccctgctcctcctcctcctgccgctcctggccctgctactgctgctatgctggaagtactgtgcctgctgcaaggcctgcctggcacttctcccgtgctgcaaccgaggtcacatggtgggctttaaggaagaccactacatgctgcgggagaacctgatggcctctgaccacttggacacgcccatgctgcgcagcgggaacctcaagggccgtgacgtggtccgctggaaggtcaccaacaacatgcagcggcctggctttgccactcatgccgccagcatcaaccccacagagctggtgccctacgggctgtccttgcgcctggcccgcctttgcaccgagaacctgctgaagcctgacactcgggagtgcgcccagctgcgccaggaggtggaggagaacgtaaggacccaggaactaggcctggccggagatgtggctgaacgaggtctacaggcagatctccggtgtacacaagctccagcagaccaagttccggcagcagcccaatgccgggaaaaagcaagaccacaccattgtggacacagtgctgatggcgccccgctcggccaagccggccctgctgaagcttacagagaagcaggtggaacagagggccttccacgacctcaaggtggcccccggctactacaccctcactgcagaccaggacgcccggggcatggtggagttccaggagggcgtggagctggtggacgtacgggtgcccctctttatccggcctgaggatgacgacgagaagcagctgctggtggaggccatcgacgtgcccgcaggcactgccaccctcggccgccgcctggtaaacatcaccatcatcaaggagcaagccagagacgtggtgtcctttgagcagcctgagttctcggtcagccgcggggaccaggtggcccgcatccctgtcatccggcgtgtcctggacggcgggaagtcccaggtctcctaccgcacacaggatggcaccgcgcagggcaaccgggactacatccccgtggagggtgagctgctgttccagcctggggaggcctggaaagagctgcaggtgaagctcctggagctgcaagaagttgactccctcctgcggggccgccaggtccgccgtttccacgtccagctcagcaaccctaagtttggggcccacctgggccagccccactccaccaccatcatcatcagggacccagatgaactggaccggagcttcacgagtcagatgttgtcatcacagccaccccctcacggcgacctgggcgccccgcagaaccccaatgctaaggccgctgggtccaggaagatccatttcaactggctgcccccttctggcaagccaatggggtacagggtaaagtactggattcagggtgactccgaatccgaagcccacctgctcgacagcaaggtgccctcagtggagctcaccaacctgtacccgtattgcgactatgagatgaaggtgtgcgcctacggggctcagggcgagggaccctacagctccctggtgtcctgccgcacccaccaggaagtgcccagcgagccagggcgtctggccttcaatgtcgtctcctccacggtgacccagctgagctgggctgagccggctgagaccaacggtgagatcacagcctacgaggtctgctatggcctggtcaacgatgacaaccgacctattgggcccatgaagaaagtgctggttgacaaccctaagaaccggatgctgcttattgagaaccttcgggagtcccagccctaccgctacacggtgaaggcgcgcaacggggccggctgggggcctgagcgggaggccatcatcaacctggccacccagcccaagaggcccatgtccatccccatcatccctgacatccctatcgtggacgcccagagcggggaggactacgacagcttccttatgtacagcgatgacgttctacgctctccatcgggcagccagaggcccagcgtctccgatgacactggctgcggctggaagttcgagcccctgctgggggaggagctggacctgcggcgcgtcacgtggcggctgcccccggagctcatcccgcgcctgtcggccagcagcgggcgctcctccgacgccgaggcgccccacgggcccccggacgacggcggcgcgggcgggaagggcggcagcctgccccgcagtgcgacacccgggccccccggagagcacctggtgaatggccggatggactttgccttcccgggcagcaccaactccctgcacaggatgaccacgaccagtgctgctgcctatggcacccacctgagcccacacgtgccccaccgcgtgctaagcacatcctccaccctcacacgggactacaactcactgacccgctcagaacactcacactcgaccacactgccgagggactactccaccctcacctccgtctcctcccacgactctcgcctgactgctggtgtgcccgacacgcccacccgcctggtgttctctgccctggggcccacatctctcagagtgagctggcaggagccgcggtgcgagcggccgctgcagggctacagtgtggagtaccagctgctgaacggcggtgagctgcatcggctcaacatccccaaccctgcccagacctcggtggtggtggaagacctcctgcccaaccactcctacgtgttccgcgtgcgggcccagagccaggaaggctggggccgagagcgtgagggtgtcatcaccattgaatcccaggtgcacccgcagagcccactgtgtcccctgccaggctccgccttcactttgagcactcccagtgccccaggcccgctggtgttcactgccctgagcccagactcgctgcagctgagctgggagcggccacggaggcccaatggggatatcgtcggctacctggtgacctgtgagatggcccaaggaggagggccagccaccgcattccgggtggatggagacagccccgagagccggctgaccgtgccgggcctcagcgagaacgtgccctacaagttcaaggtgcaggccaggaccactgagggcttcgggccagagcgcgagggcatcatcaccatagagtcccaggatggaggacccttcccgcagctgggcagccgtgccgggctcttccagcacccgctgcaaagcgagtacagcagcatcaccaccacccacaccagcgccaccgagcccttcctagtggatgggctgaccctgggggcccagcacctggaggcaggcggctccctcacccggcatgtgacccaggagtttgtgagccggacactgaccaccagcggaacccttagcacccacatggaccaacagttcttccaaacttgaccgcaccctgccccacccccgccacgtcccactaggcgtcctcccgactcctctcccggagcctcctcagctactccatccttgcacccctgggggcccagcccacccgcatgcacagagcaggggctaggtgtctcctgggaggcatgaagggggcaaggtccgtcctctgtgggcccaaacctatttgtaaccaaagagctgggagcagcacaaggacccagcctttgttctgcacttaataaatggttttgctactgcta

SEQ ID NO: 1601 - DNA, 5925 bp, Homo sapiens
gcgctgcccgcctcgtccccacccccccaacccccgcgcccgccctcggacagtccctgctcgcccgcgcgctgcagccccatctcctagcggcagcccaggcgcggagggagcgagtccgccccgaggtaggtccaggacgggcgcacagcagcagccgaggctggccgggagagggaggaagaggatggcagggccacgccccagcccatgggccaggctgctcctggcagccttgatcagcgtcagcctctctgggaccttggcaaaccgctgcaagaaggccccagtgaagagctgcacggagtgtgtccgtgtggataaggactgcgcctactgcacagacgagatgttcagggaccggcgctgcaacacccaggcggagctgctggccgcgggctgccagcgggagagcatcgtggtcatggagagcagcttccaaatcacagaggagacccagattgacaccaccctgcggcgcagccagatgtccccccaaggcctgcgggtccgtctgcggcccggtgaggagcggcattttgagctggaggtgtttgagccactggagagccccgtggacctgtacatcctcatggacttctccaactccatgtccgatgatctggacaacctcaagaagatggggcagaacctggctcgggtcctgagccagctcaccagcgactacactattggatttggcaagtttgtggacaaagtcagcgtcccgcagacggacatgaggcctgagaagctgaaggagccctggcccaacagtgacccccccttctccttcaagaacgtcatcagcctgacagaagatgtggatgagttccggaataaactgcagggagagcggatctcaggcaacctggatgctcctgagggcggcttcgatgccatcctgcagacagctgtgtgcacgagggacattggctggcgcccggacagcacccacctgctggtcttctccaccgagtcagccttccactatgaggctgatggcgccaacgtgctggctggcatcatgagccgcaacgatgaacggtgccacctggacaccacgggcacctacacccagtacaggacacaggactacccgtcggtgcccaccctggtgcgcctgctcgccaagcacaacatcatccccatctttgctgtcaccaactactcctatagctactacgagaagcttcacacctatttccctgtctcctcactgggggtgctgcaggaggactcgtccaacatcgtggagctgctggaggaggccttcaatcggatccgctccaacctggacatccgggccctagacagcccccgaggccttcggacagaggtcacctccaagatgttccagaagacgaggactgggtcctttcacatccggcggggggaagtgggtatataccaggtgcagctgcgggcccttgagcacgtggatgggacgcacgtgtgccagctgccggaggaccagaagggcaacatccatctgaaaccttccttctccgacggcctcaagatggacgcgggcatcatctgtgatgtgtgcacctgcgagctgcaaaaagaggtgcggtcagctcgctgcagcttcaacggagacttcgtgtgcggacagtgtgtgtgcagcgagggctggagtggccagacctgcaactgctccaccggctctctgagtgacattcagccctgcctgcgggagggcgaggacaagccgtgctccggccgtggggagtgccagtgcgggcactgtgtgtgctacggcgaaggccgctacgagggtcagttctgcgagtatgacaacttccagtgtccccgcacttccgggttcctctgcaatgaccgaggacgctgctccatgggccagtgtgtgtgtgagcctggttggacaggcccaagctgtgactgtcccctcagcaatgccacctgcatcgacagcaatgggggcatctgtaatggacgtggccactgtgagtgtggccgctgccactgccaccagcagtcgctctacacggacaccatctgcgagatcaactactcggcgatccacccgggcctctgcgaggacctacgctcctgcgtgcagtgccaggcgtggggcaccggcgagaagaaggggcgcacgtgtgaggaatgcaacttcaaggtcaagatggtggacgagcttaagagagccgaggaggtggtggtgcgctgctccttccgggacgaggatgacgactgcacctacagctacaccatggaaggtgacggcgcccctgggcccaacagcactgtcctggtgcacaagaagaaggactgccctccgggctccttctggtggctcatccccctgctcctcctcctcctgccgctcctggccctgctactgctgctatgctggaagtactgtgcctgctgcaaggcctgcctggcacttctcccgtgctgcaaccgaggtcacatggtgggctttaaggaagaccactacatgctgcgggagaacctgatggcctctgaccacttggacacgcccatgctgcgcagcgggaacctcaagggccgtgacgtggtccgctggaaggtcaccaacaacatgcagcggcctggctttgccactcatgccgccagcatcaaccccacagagctggtgccctacgggctgtccttgcgcctggcccgcctttgcaccgagaacctgctgaagcctgacactcgggagtgcgcccagctgcgccaggaggtggaggagaacctgaacgaggtctacaggcagatctccggtgtacacaagctccagcagaccaagttccggcagcagcccaatgccgggaaaaagcaagaccacaccattgtggacacagtgctgatggcgccccgctcggccaagccggccctgctgaagcttacagagaagcaggtggaacagagggccttccacgacctcaaggtggcccccggctactacaccctcactgcagaccaggacgcccggggcatggtggagttccaggagggcgtggagctggtggacgtacgggtgcccctctttatccggcctgaggatgacgacgagaagcagctgctggtggaggccatcgacgtgcccgcaggcactgccaccctcggccgccgcctggtaaacatcaccatcatcaaggagcaagccagagacgtggtgtcctttgagcagcctgagttctcggtcagccgcggggaccaggtggcccgcatccctgtcatccggcgtgtcctggacggcgggaagtcccaggtctcctaccgcacacaggatggcaccgcgcagggcaaccgggactacatccccgtggagggtgagctgctgttccagcctggggaggcctggaaagagctgcaggtgaagctcctggagctgcaagaagttgactccctcctgcggggccgccaggtccgccgtttccacgtccagctcagcaaccctaagtttggggcccacctgggccagccccactccaccaccatcatcatcagggacccagatgaactggaccggagcttcacgagtcagatgttgtcatcacagccaccccctcacggcgacctgggcgccccgcagaaccccaatgctaaggccgctgggtccaggaagatccatttcaactggctgcccccttctggcaagccaatggggtacagggtaaagtactggattcagggtgactccgaatccgaagcccacctgctcgacagcaaggtgccctcagtggagctcaccaacctgtacccgtattgcgactatgagatgaaggtgtgcgcctacggggctcagggcgagggaccctacagctccctggtgtcctgccgcacccaccaggaagtgcccagcgagccagggcgtctggccttcaatgtcgtctcctccacggtgacccagctgagctgggctgagccggctgagaccaacggtgagatcacagcctacgaggtctgctatggcctggtcaacgatgacaaccgacctattgggcccatgaagaaagtgctggttgacaaccctaagaaccggatgctgcttattgagaaccttcgggagtcccagccctaccgctacacggtgaaggcgcgcaacggggccggctgggggcctgagcgggaggccatcatcaacctggccacccagcccaagaggcccatgtccatccccatcatccctgacatccctatcgtggacgcccagagcggggaggactacgacagcttccttatgtacagcgatgacgttctacgctctccatcgggcagccagaggcccagcgtctccgatgacactggctgcggctggaagttcgagcccctgctgggggaggagctggacctgcggcgcgtcacgtggcggctgcccccggagctcatcccgcgcctgtcggccagcagcgggcgctcctccgacgccgaggcgccccacgggcccccggacgacggcggcgcgggcgggaagggcggcagcctgccccgcagtgcgacacccgggccccccggagagcacctggtgaatggccggatggactttgccttcccgggcagcaccaactccctgcacaggatgaccacgaccagtgctgctgcctatggcacccacctgagcccacacgtgccccaccgcgtgctaagcacatcctccaccctcacacgggactacaactcactgacccgctcagaacactcacactcgaccacactgcccagggactactccaccctcacctccgtctcctcccacgactctcgcctgactgctggtgtgcccgacacgcccacccgcctggtgttctctgccctggggcccacatctctcagagtgagctggcaggagccgcggtgcgagcggccgctgcagggctacagtgtggagtaccagctgctgaacggcggtgagctgcatcggctcaacatccccaaccctgcccagacctcggtggtggtggaagacctcctgcccaaccactcctacgtgttccgcgtgcgggcccagagccaggaaggctggggccgagagcgtgagggtgtcatcaccattgaatcccaggtgcacccgcagagcccactgtgtcccctgccaggctccgccttcactttgagcactcccagtgccccaggcccgctggtgttcactgccctgagcccagactcgctgcagctgagctgggagcggccacggaggcccaatggggatatcgtcggctacctggtgacctgtgagatggcccaaggaggagggccagccaccgcattccgggtggatggagacagccccgagagccggctgaccgtgccgggcctcagcgagaacgtgccctacaagttcaaggtgcaggccaggaccactgagggcttcgggccagagcgcgagggcatcatcaccatagagtcccaggatggaggacccttcccgcagctgggcagccgtgccgggctcttccagcacccgctgcaaagcgagtacagcagcatcaccaccacccacaccagcgccaccgagcccttcctagtggatgggctgaccctgggggcccagcacctggaggcaggcggctccctcacccggcatgtgacccaggagtttgtgagccggacactgaccaccagcggaacccttagcacccacatggaccaacagttcttccaaacttgaccgcaccctgccccacccccgccacgtcccactaggcgtcctcccgactcctctcccggagcctcctcagctactccatccttgcacccctgggggcccagcccacccgcatgcacagagcaggggctaggtgtctcctgggaggcatgaagggggcaaggtccgtcctctgtgggcccaaacctatttgtaaccaaagagctgggagcagcacaaggacccagcctttgttctgcacttaataaatggttttgctactgctaaaaaaa

SEQ ID NO: 1602 - DNA, 5988 bp, Homo sapiens
gccctcggacagtccctgctcgcccgcgcgctgcagccccatctcctagcggcagcccaggcgcggagggagcgagtccgccccgaggaggaagaggatggcagggccacgccccagcccatgggccaggctgctcctggcagccttgatcagcgtcagcctctctgggaccttggcaaaccgctgcaagaaggccccagtgaagagctgcacggagtgtgtccgtgtggataaggactgcgcctactgcacagacgagatgttcagggaccggcgctgcaacacccaggcggagctgctggccgcgggctgccagcgggagagcatcgtggtcatggagagcagcttccaaatcacagaggagacccagattgacaccaccctgcggcgcagccagatgtccccccaaggcctgcgggtccgtctgcggcccggtgaggagcggcattttgagctggaggtgtttgagccactggagagccccgtggacctgtacatcctcatggacttctccaactccatgtccgatgatctggacaacctcaagaagatggggcagaacctggctcgggtcctgagccagctcaccagcgactacactattggatttggcaagtttgtggacaaagtcagcgtcccgcagacggacatgaggcctgagaagctgaaggagccctggcccaacagtgacccccccttctccttcaagaacgtcatcagcctgacagaagatgtggatgagttccggaataaactgcagggagagcggatctcaggcaacctggatgctcctgagggcggcttcgatgccatcctgcagacagctgtgtgcacgagggacattggctggcgcccggacagcacccacctgctggtcttctccaccgagtcagccttccactatgaggctgatggcgccaacgtgctggctggcatcatgagccgcaacgatgaacggtgccacctggacaccacgggcacctacacccagtacaggacacaggactacccgtcggtgcccaccctggtgcgcctgctcgccaagcacaacatcatccccatctttgctgtcaccaactactcctatagctactacgagaagcttcacacctatttccctgtctcctcactgggggtgctgcaggaggactcgtccaacatcgtggagctgctggaggaggccttcaatcggatccgctccaacctggacatccgggccctagacagcccccgaggccttcggacagaggtcacctccaagatgttccagaagacgaggactgggtcctttcacatccggcggggggaagtgggtatataccaggtgcagctgcgggcccttgagcacgtggatgggacgcacgtgtgccagctgccggaggaccagaagggcaacatccatctgaaaccttccttctccgacggcctcaagatggacgcgggcatcatctgtgatgtgtgcacctgcgagctgcaaaaagaggtgcggtcagctcgctgcagcttcaacggagacttcgtgtgcggacagtgtgtgtgcagcgagggctggagtggccagacctgcaactgctccaccggctctctgagtgacattcagccctgcctgcgggagggcgaggacaagccgtgctccggccgtggggagtgccagtgcgggcactgtgtgtgctacggcgaaggccgctacgagggtcagttctgcgagtatgacaacttccagtgtccccgcacttccgggttcctctgcaatgaccgaggacgctgctccatgggccagtgtgtgtgtgagcctggttggacaggcccaagctgtgactgtcccctcagcaatgccacctgcatcgacagcaatgggggcatctgtaatggacgtggccactgtgagtgtggccgctgccactgccaccagcagtcgctctacacggacaccatctgcgagatcaactactcggcgatccacccgggcctctgcgaggacctacgctcctgcgtgcagtgccaggcgtggggcaccggcgagaagaaggggcgcacgtgtgaggaatgcaacttcaaggtcaagatggtggacgagcttaagagagccgaggaggtggtggtgcgctgctccttccgggacgaggatgacgactgcacctacagctacaccatggaaggtgacggcgcccctgggcccaacagcactgtcctggtgcacaagaagaaggactgccctccgggctccttctggtggctcatccccctgctcctcctcctcctgccgctcctggccctgctactgctgctatgctggaagtactgtgcctgctgcaaggcctgcctggcacttctcccgtgctgcaaccgaggtcacatggtgggctttaaggaagaccactacatgctgcgggagaacctgatggcctctgaccacttggacacgcccatgctgcgcagcgggaacctcaagggccgtgacgtggtccgctggaaggtcaccaacaacatgcagcggcctggctttgccactcatgccgccagcatcaaccccacagagctggtgccctacgggctgtccttgcgcctggcccgcctttgcaccgagaacctgctgaagcctgacactcgggagtgcgcccagctgcgccaggaggtggaggagaacctgaacgaggtctacaggcagatctccggtgtacacaagctccagcagaccaagttccggcagcagcccaatgccgggaaaaagcaagaccacaccattgtggacacagtgctgatggcgccccgctcggccaagccggccctgctgaagcttacagagaagcaggtggaacagagggccttccacgacctcaaggtggcccccggctactacaccctcactgcagaccaggacgcccggggcatggtggagttccaggagggcgtggagctggtggacgtacgggtgcccctctttatccggcctgaggatgacgacgagaagcagctgctggtggaggccatcgacgtgcccgcaggcactgccaccctcggccgccgcctggtaaacatcaccatcatcaaggagcaagccagagacgtggtgtcctttgagcagcctgagttctcggtcagccgcggggaccaggtggcccgcatccctgtcatccggcgtgtcctggacggcgggaagtcccaggtctcctaccgcacacaggatggcaccgcgcagggcaaccgggactacatccccgtggagggtgagctgctgttccagcctggggaggcctggaaagagctgcaggtgaagctcctggagctgcaagaagttgactccctcctgcggggccgccaggtccgccgtttccacgtccagctcagcaaccctaagtttggggcccacctgggccagccccactccaccaccatcatcatcagggacccagatgaactggaccggagcttcacgagtcagatgttgtcatcacagccaccccctcacggcgacctgggcgccccgcagaaccccaatgctaaggccgctgggtccaggaagatccatttcaactggctgcccccttctggcaagccaatggggtacagggtaaagtactggattcagggtgactccgaatccgaagcccacctgctcgacagcaaggtgccctcagtggagctcaccaacctgtacccgtattgcgactatgagatgaaggtgtgcgcctacggggctcagggcgagggaccctacagctccctggtgtcctgccgcacccaccaggaagtgcccagcgagccagggcgtctggccttcaatgtcgtctcctccacggtgacccagctgagctgggctgagccggctgagaccaacggtgagatcacagcctacgaggtctgctatggcctggtcaacgatgacaaccgacctattgggcccatgaagaaagtgctggttgacaaccctaagaaccggatgctgcttattgagaaccttcgggagtcccagccctaccgctacacggtgaaggcgcgcaacggggccggctgggggcctgagcgggaggccatcatcaacctggccacccagcccaagaggcccatgtccatccccatcatccctgacatccctatcgtggacgcccagagcggggaggactacgacagcttccttatgtacagcgatgacgttctacgctctccatcgggcagccagaggcccagcgtctccgatgacactggctgcggctggaagttcgagcccctgctgggggaggagctggacctgcggcgcgtcacgtggcggctgcccccggagctcatcccgcgcctgtcggccagcagcgggcgctcctccgacgccgaggcgccccacgggcccccggacgacggcggcgcgggcgggaagggcggcagcctgccccgcagtgcgacacccgggccccccggagagcacctggtgaatggccggatggactttgccttcccgggcagcaccaactccctgcacaggatgaccacgaccagtgctgctgcctatggcacccacctgagcccacacgtgccccaccgcgtgctaagcacatcctccaccctcacacgggactacaactcactgacccgctcagaacactcacactcgaccacactgccgagggactactccaccctcacctccgtctcctcccacggcctccctcccatctgggaacacgggaggagcaggcttccgctgtcctgggccctggggtcccggagtcgggctcagatgaaagggttccccccttccaggggcccacgagactctataatcctggctgggaggccagcagcgccctcctggggcccagactctcgcctgactgctggtgtgcccgacacgcccacccgcctggtgttctctgccctggggcccacatctctcagagtgagctggcaggagccgcggtgcgagcggccgctgcagggctacagtgtggagtaccagctgctgaacggcggtgagctgcatcggctcaacatccccaaccctgcccagacctcggtggtggtggaagacctcctgcccaaccactcctacgtgttccgcgtgcgggcccagagccaggaaggctggggccgagagcgtgagggtgtcatcaccattgaatcccaggtgcacccgcagagcccactgtgtcccctgccaggctccgccttcactttgagcactcccagtgccccaggcccgctggtgttcactgccctgagcccagactcgctgcagctgagctgggagcggccacggaggcccaatggggatatcgtcggctacctggtgacctgtgagatggcccaaggaggagggccagccaccgcattccgggtggatggagacagccccgagagccggctgaccgtgccgggcctcagcgagaacgtgccctacaagttcaaggtgcaggccaggaccactgagggcttcgggccagagcgcgagggcatcatcaccatagagtcccaggatggaggacccttcccgcagctgggcagccgtgccgggctcttccagcacccgctgcaaagcgagtacagcagcatcaccaccacccacaccagcgccaccgagcccttcctagtggatgggctgaccctgggggcccagcacctggaggcaggcggctccctcacccggcatgtgacccaggagtttgtgagccggacactgaccaccagcggaacccttagcacccacatggaccaacagttcttccaaacttgaccgcaccctgccccacccccgccacgtcccactaggcgtcctcccgactcctctcccggagcctcctcagctactccatccttgcacccctgggggcccagcccacccgcatgcacagagcaggggctaggtgtctcctgggaggcatgaagggggcaaggtccgtcctctgtgggcccaaacctatttgtaaccaaagagctgggagcagcacaaggacccagcctttgttctgcacttaataaatggttttgctactgcta

SEQ ID NO: 1603 - DNA, 5829 bp, Homo sapiens
gccctcggacagtccctgctcgcccgcgcgctgcagccccatctcctagcggcagcccaggcgcggagggagcgagtccgccccgaggaggaagaggatggcagggccacgccccagcccatgggccaggctgctcctggcagccttgatcagcgtcagcctctctgggaccttggcaaaccgctgcaagaaggccccagtgaagagctgcacggagtgtgtccgtgtggataaggactgcgcctactgcacagacgagatgttcagggaccggcgctgcaacacccaggcggagctgctggccgcgggctgccagcgggagagcatcgtggtcatggagagcagcttccaaatcacagaggagacccagattgacaccaccctgcggcgcagccagatgtccccccaaggcctgcgggtccgtctgcggcccggtgaggagcggcattttgagctggaggtgtttgagccactggagagccccgtggacctgtacatcctcatggacttctccaactccatgtccgatgatctggacaacctcaagaagatggggcagaacctggctcgggtcctgagccagctcaccagcgactacactattggatttggcaagtttgtggacaaagtcagcgtcccgcagacggacatgaggcctgagaagctgaaggagccctggcccaacagtgacccccccttctccttcaagaacgtcatcagcctgacagaagatgtggatgagttccggaataaactgcagggagagcggatctcaggcaacctggatgctcctgagggcggcttcgatgccatcctgcagacagctgtgtgcacgagggacattggctggcgcccggacagcacccacctgctggtcttctccaccgagtcagccttccactatgaggctgatggcgccaacgtgctggctggcatcatgagccgcaacgatgaacggtgccacctggacaccacgggcacctacacccagtacaggacacaggactacccgtcggtgcccaccctggtgcgcctgctcgccaagcacaacatcatccccatctttgctgtcaccaactactcctatagctactacgagaagcttcacacctatttccctgtctcctcactgggggtgctgcaggaggactcgtccaacatcgtggagctgctggaggaggccttcaatcggatccgctccaacctggacatccgggccctagacagcccccgaggccttcggacagaggtcacctccaagatgttccagaagacgaggactgggtcctttcacatccggcggggggaagtgggtatataccaggtgcagctgcgggcccttgagcacgtggatgggacgcacgtgtgccagctgccggaggaccagaagggcaacatccatctgaaaccttccttctccgacggcctcaagatggacgcgggcatcatctgtgatgtgtgcacctgcgagctgcaaaaagaggtgcggtcagctcgctgcagcttcaacggagacttcgtgtgcggacagtgtgtgtgcagcgagggctggagtggccagacctgcaactgctccaccggctctctgagtgacattcagccctgcctgcgggagggcgaggacaagccgtgctccggccgtggggagtgccagtgcgggcactgtgtgtgctacggcgaaggccgctacgagggtcagttctgcgagtatgacaacttccagtgtccccgcacttccgggttcctctgcaatgaccgaggacgctgctccatgggccagtgtgtgtgtgagcctggttggacaggcccaagctgtgactgtcccctcagcaatgccacctgcatcgacagcaatgggggcatctgtaatggacgtggccactgtgagtgtggccgctgccactgccaccagcagtcgctctacacggacaccatctgcgagatcaactactcggcgatccacccgggcctctgcgaggacctacgctcctgcgtgcagtgccaggcgtggggcaccggcgagaagaaggggcgcacgtgtgaggaatgcaacttcaaggtcaagatggtggacgagcttaagagagccgaggaggtggtggtgcgctgctccttccgggacgaggatgacgactgcacctacagctacaccatggaaggtgacggcgcccctgggcccaacagcactgtcctggtgcacaagaagaaggactgccctccgggctccttctggtggctcatccccctgctcctcctcctcctgccgctcctggccctgctactgctgctatgctggaagtactgtgcctgctgcaaggcctgcctggcacttctcccgtgctgcaaccgaggtcacatggtgggctttaaggaagaccactacatgctgcgggagaacctgatggcctctgaccacttggacacgcccatgctgcgcagcgggaacctcaagggccgtgacgtggtccgctggaaggtcaccaacaacatgcagcggcctggctttgccactcatgccgccagcatcaaccccacagagctggtgccctacgggctgtccttgcgcctggcccgcctttgcaccgagaacctgctgaagcctgacactcgggagtgcgcccagctgcgccaggaggtggaggagaacctgaacgaggtctacaggcagatctccggtgtacacaagctccagcagaccaagttccggcagcagcccaatgccgggaaaaagcaagaccacaccattgtggacacagtgctgatggcgccccgctcggccaagccggccctgctgaagcttacagagaagcaggtggaacagagggccttccacgacctcaaggtggcccccggctactacaccctcactgcagaccaggacgcccggggcatggtggagttccaggagggcgtggagctggtggacgtacgggtgcccctctttatccggcctgaggatgacgacgagaagcagctgctggtggaggccatcgacgtgcccgcaggcactgccaccctcggccgccgcctggtaaacatcaccatcatcaaggagcaagccagagacgtggtgtcctttgagcagcctgagttctcggtcagccgcggggaccaggtggcccgcatccctgtcatccggcgtgtcctggacggcgggaagtcccaggtctcctaccgcacacaggatggcaccgcgcagggcaaccgggactacatccccgtggagggtgagctgctgttccagcctggggaggcctggaaagagctgcaggtgaagctcctggagctgcaagaagttgactccctcctgcggggccgccaggtccgccgtttccacgtccagctcagcaaccctaagtttggggcccacctgggccagccccactccaccaccatcatcatcagggacccagatgaactggaccggagcttcacgagtcagatgttgtcatcacagccaccccctcacggcgacctgggcgccccgcagaaccccaatgctaaggccgctgggtccaggaagatccatttcaactggctgcccccttctggcaagccaatggggtacagggtaaagtactggattcagggtgactccgaatccgaagcccacctgctcgacagcaaggtgccctcagtggagctcaccaacctgtacccgtattgcgactatgagatgaaggtgtgcgcctacggggctcagggcgagggaccctacagctccctggtgtcctgccgcacccaccaggaagtgcccagcgagccagggcgtctggccttcaatgtcgtctcctccacggtgacccagctgagctgggctgagccggctgagaccaacggtgagatcacagcctacgaggtctgctatggcctggtcaacgatgacaaccgacctattgggcccatgaagaaagtgctggttgacaaccctaagaaccggatgctgcttattgagaaccttcgggagtcccagccctaccgctacacggtgaaggcgcgcaacggggccggctgggggcctgagcgggaggccatcatcaacctggccacccagcccaagaggcccatgtccatccccatcatccctgacatccctatcgtggacgcccagagcggggaggactacgacagcttccttatgtacagcgatgacgttctacgctctccatcgggcagccagaggcccagcgtctccgatgacactggctgcggctggaagttcgagcccctgctgggggaggagctggacctgcggcgcgtcacgtggcggctgcccccggagctcatcccgcgcctgtcggccagcagcgggcgctcctccgacgccgaggcgccccacgggcccccggacgacggcggcgcgggcgggaagggcggcagcctgccccgcagtgcgacacccgggccccccggagagcacctggtgaatggccggatggactttgccttcccgggcagcaccaactccctgcacaggatgaccacgaccagtgctgctgcctatggcacccacctgagcccacacgtgccccaccgcgtgctaagcacatcctccaccctcacacgggactacaactcactgacccgctcagaacactcacactcgaccacactgccgagggactactccaccctcacctccgtctcctcccacgactctcgcctgactgctggtgtgcccgacacgcccacccgcctggtgttctctgccctggggcccacatctctcagagtgagctggcaggagccgcggtgcgagcggccgctgcagggctacagtgtggagtaccagctgctgaacggcggtgagctgcatcggctcaacatccccaaccctgcccagacctcggtggtggtggaagacctcctgcccaaccactcctacgtgttccgcgtgcgggcccagagccaggaaggctggggccgagagcgtgagggtgtcatcaccattgaatcccaggtgcacccgcagagcccactgtgtcccctgccaggctccgccttcactttgagcactcccagtgccccaggcccgctggtgttcactgccctgagcccagactcgctgcagctgagctgggagcggccacggaggcccaatggggatatcgtcggctacctggtgacctgtgagatggcccaaggaggagggccagccaccgcattccgggtggatggagacagccccgagagccggctgaccgtgccgggcctcagcgagaacgtgccctacaagttcaaggtgcaggccaggaccactgagggcttcgggccagagcgcgagggcatcatcaccatagagtcccaggatggaggacccttcccgcagctgggcagccgtgccgggctcttccagcacccgctgcaaagcgagtacagcagcatcaccaccacccacaccagcgccaccgagcccttcctagtggatgggctgaccctgggggcccagcacctggaggcaggcggctccctcacccggcatgtgacccaggagtttgtgagccggacactgaccaccagcggaacccttagcacccacatggaccaacagttcttccaaacttgaccgcaccctgccccacccccgccacgtcccactaggcgtcctcccgactcctctcccggagcctcctcagctactccatccttgcacccctgggggcccagcccacccgcatgcacagagcaggggctaggtgtctcctgggaggcatgaagggggcaaggtccgtcctctgtgggcccaaacctatttgtaaccaaagagctgggagcagcacaaggacccagcctttgttctgcacttaataaatggttttgctactgcta

SEQ ID NO: 1604 - DNA, 5778 bp, Homo sapiens
gccctcggacagtccctgctcgcccgcgcgctgcagccccatctcctagcggcagcccaggcgcggagggagcgagtccgccccgaggaggaagaggatggcagggccacgccccagcccatgggccaggctgctcctggcagccttgatcagcgtcagcctctctgggaccttggcaaaccgctgcaagaaggccccagtgaagagctgcacggagtgtgtccgtgtggataaggactgcgcctactgcacagacgagatgttcagggaccggcgctgcaacacccaggcggagctgctggccgcgggctgccagcgggagagcatcgtggtcatggagagcagcttccaaatcacagaggagacccagattgacaccaccctgcggcgcagccagatgtccccccaaggcctgcgggtccgtctgcggcccggtgaggagcggcattttgagctggaggtgtttgagccactggagagccccgtggacctgtacatcctcatggacttctccaactccatgtccgatgatctggacaacctcaagaagatggggcagaacctggctcgggtcctgagccagctcaccagcgactacactattggatttggcaagtttgtggacaaagtcagcgtcccgcagacggacatgaggcctgagaagctgaaggagccctggcccaacagtgacccccccttctccttcaagaacgtcatcagcctgacagaagatgtggatgagttccggaataaactgcagggagagcggatctcaggcaacctggatgctcctgagggcggcttcgatgccatcctgcagacagctgtgtgcacgagggacattggctggcgcccggacagcacccacctgctggtcttctccaccgagtcagccttccactatgaggctgatggcgccaacgtgctggctggcatcatgagccgcaacgatgaacggtgccacctggacaccacgggcacctacacccagtacaggacacaggactacccgtcggtgcccaccctggtgcgcctgctcgccaagcacaacatcatccccatctttgctgtcaccaactactcctatagctactacgagaagcttcacacctatttccctgtctcctcactgggggtgctgcaggaggactcgtccaacatcgtggagctgctggaggaggccttcaatcggatccgctccaacctggacatccgggccctagacagcccccgaggccttcggacagaggtcacctccaagatgttccagaagacgaggactgggtcctttcacatccggcggggggaagtgggtatataccaggtgcagctgcgggcccttgagcacgtggatgggacgcacgtgtgccagctgccggaggaccagaagggcaacatccatctgaaaccttccttctccgacggcctcaagatggacgcgggcatcatctgtgatgtgtgcacctgcgagctgcaaaaagaggtgcggtcagctcgctgcagcttcaacggagacttcgtgtgcggacagtgtgtgtgcagcgagggctggagtggccagacctgcaactgctccaccggctctctgagtgacattcagccctgcctgcgggagggcgaggacaagccgtgctccggccgtggggagtgccagtgcgggcactgtgtgtgctacggcgaaggccgctacgagggtcagttctgcgagtatgacaacttccagtgtccccgcacttccgggttcctctgcaatgaccgaggacgctgctccatgggccagtgtgtgtgtgagcctggttggacaggcccaagctgtgactgtcccctcagcaatgccacctgcatcgacagcaatgggggcatctgtaatggacgtggccactgtgagtgtggccgctgccactgccaccagcagtcgctctacacggacaccatctgcgagatcaactactcggcgatccacccgggcctctgcgaggacctacgctcctgcgtgcagtgccaggcgtggggcaccggcgagaagaaggggcgcacgtgtgaggaatgcaacttcaaggtcaagatggtggacgagcttaagagagccgaggaggtggtggtgcgctgctccttccgggacgaggatgacgactgcacctacagctacaccatggaaggtgacggcgcccctgggcccaacagcactgtcctggtgcacaagaagaaggactgccctccgggctccttctggtggctcatccccctgctcctcctcctcctgccgctcctggccctgctactgctgctatgctggaagtactgtgcctgctgcaaggcctgcctggcacttctcccgtgctgcaaccgaggtcacatggtgggctttaaggaagaccactacatgctgcgggagaacctgatggcctctgaccacttggacacgcccatgctgcgcagcgggaacctcaagggccgtgacgtggtccgctggaaggtcaccaacaacatgcagcggcctggctttgccactcatgccgccagcatcaaccccacagagctggtgccctacgggctgtccttgcgcctggcccgcctttgcaccgagaacctgctgaagcctgacactcgggagtgcgcccagctgcgccaggaggtggaggagaacctgaacgaggtctacaggcagatctccggtgtacacaagctccagcagaccaagttccggcagcagcccaatgccgggaaaaagcaagaccacaccattgtggacacagtgctgatggcgccccgctcggccaagccggccctgctgaagcttacagagaagcaggtggaacagagggccttccacgacctcaaggtggcccccggctactacaccctcactgcagaccaggacgcccggggcatggtggagttccaggagggcgtggagctggtggacgtacgggtgcccctctttatccggcctgaggatgacgacgagaagcagctgctggtggaggccatcgacgtgcccgcaggcactgccaccctcggccgccgcctggtaaacatcaccatcatcaaggagcaagccagagacgtggtgtcctttgagcagcctgagttctcggtcagccgcggggaccaggtggcccgcatccctgtcatccggcgtgtcctggacggcgggaagtcccaggtctcctaccgcacacaggatggcaccgcgcagggcaaccgggactacatccccgtggagggtgagctgctgttccagcctggggaggcctggaaagagctgcaggtgaagctcctggagctgcaagaagttgactccctcctgcggggccgccaggtccgccgtttccacgtccagctcagcaaccctaagtttggggcccacctgggccagccccactccaccaccatcatcatcagggacccagatgaactggaccggagcttcacgagtcagatgttgtcatcacagccaccccctcacggcgacctgggcgccccgcagaaccccaatgctaaggccgctgggtccaggaagatccatttcaactggctgcccccttctggcaagccaatggggtacagggtaaagtactggattcagggtgactccgaatccgaagcccacctgctcgacagcaaggtgccctcagtggagctcaccaacctgtacccgtattgcgactatgagatgaaggtgtgcgcctacggggctcagggcgagggaccctacagctccctggtgtcctgccgcacccaccaggaagtgcccagcgagccagggcgtctggccttcaatgtcgtctcctccacggtgacccagctgagctgggctgagccggctgagaccaacggtgagatcacagcctacgaggtctgctatggcctggtcaacgatgacaaccgacctattgggcccatgaagaaagtgctggttgacaaccctaagaaccggatgctgcttattgagaaccttcgggagtcccagccctaccgctacacggtgaaggcgcgcaacggggccggctgggggcctgagcgggaggccatcatcaacctggccacccagcccaagaggcccatgtccatccccatcatccctgacatccctatcgtggacgcccagagcggggaggactacgacagcttccttatgtacagcgatgacgttctacgctctccatcgggcagccagaggcccagcgtctccgatgacactgagcacctggtgaatggccggatggactttgccttcccgggcagcaccaactccctgcacaggatgaccacgaccagtgctgctgcctatggcacccacctgagcccacacgtgccccaccgcgtgctaagcacatcctccaccctcacacgggactacaactcactgacccgctcagaacactcacactcgaccacactgccgagggactactccaccctcacctccgtctcctcccacggcctccctcccatctgggaacacgggaggagcaggcttccgctgtcctgggccctggggtcccggagtcgggctcagatgaaagggttccccccttccaggggcccacgagactctataatcctggctgggaggccagcagcgccctcctggggcccagactctcgcctgactgctggtgtgcccgacacgcccacccgcctggtgttctctgccctggggcccacatctctcagagtgagctggcaggagccgcggtgcgagcggccgctgcagggctacagtgtggagtaccagctgctgaacggcggtgagctgcatcggctcaacatccccaaccctgcccagacctcggtggtggtggaagacctcctgcccaaccactcctacgtgttccgcgtgcgggcccagagccaggaaggctggggccgagagcgtgagggtgtcatcaccattgaatcccaggtgcacccgcagagcccactgtgtcccctgccaggctccgccttcactttgagcactcccagtgccccaggcccgctggtgttcactgccctgagcccagactcgctgcagctgagctgggagcggccacggaggcccaatggggatatcgtcggctacctggtgacctgtgagatggcccaaggaggagggccagccaccgcattccgggtggatggagacagccccgagagccggctgaccgtgccgggcctcagcgagaacgtgccctacaagttcaaggtgcaggccaggaccactgagggcttcgggccagagcgcgagggcatcatcaccatagagtcccaggatggaggacccttcccgcagctgggcagccgtgccgggctcttccagcacccgctgcaaagcgagtacagcagcatcaccaccacccacaccagcgccaccgagcccttcctagtggatgggctgaccctgggggcccagcacctggaggcaggcggctccctcacccggcatgtgacccaggagtttgtgagccggacactgaccaccagcggaacccttagcacccacatggaccaacagttcttccaaacttgaccgcaccctgccccacccccgccacgtcccactaggcgtcctcccgactcctctcccggagcctcctcagctactccatccttgcacccctgggggcccagcccacccgcatgcacagagcaggggctaggtgtctcctgggaggcatgaagggggcaaggtccgtcctctgtgggcccaaacctatttgtaaccaaagagctgggagcagcacaaggacccagcctttgttctgcacttaataaatggttttgctactgcta

SEQ ID NO: 1605 - DNA, 5648 bp, Homo sapiens
cgcccgcgcgctgcagccccatctcctagcggcagcccaggcgcggagggagcgagtccgccccgaggtaggtccaggacgggcgcacagcagcagccgaggctggccgggagagggaggaagaggatggcagggccacgccccagcccatgggccaggctgctcctggcagccttgatcagcgtcagcctctctgggaccttggcaaaccgctgcaagaaggccccagtgaagagctgcacggagtgtgtccgtgtggataaggactgcgcctactgcacagacgagatgttcagggaccggcgctgcaacacccaggcggagctgctggccgcgggctgccagcgggagagcatcgtggtcatggagagcagcttccaaatcacagaggagacccagattgacaccaccctgcggcgcagccagatgtccccccaaggcctgcgggtccgtctgcggcccggtgaggagcggcattttgagctggaggtgtttgagccactggagagccccgtggacctgtacatcctcatggacttctccaactccatgtccgatgatctggacaacctcaagaagatggggcagaacctggctcgggtcctgagccagctcaccagcgactacactattggatttggcaagtttgtggacaaagtcagcgtcccgcagacggacatgaggcctgagaagctgaaggagccctggcccaacagtgacccccccttctccttcaagaacgtcatcagcctgacagaagatgtggatgagttccggaataaactgcagggagagcggatctcaggcaacctggatgctcctgagggcggcttcgatgccatcctgcagacagctgtgtgcacgagggacattggctggcgcccggacagcacccacctgctggtcttctccaccgagtcagccttccactatgaggctgatggcgccaacgtgctggctggcatcatgagccgcaacgatgaacggtgccacctggacaccacgggcacctacacccagtacaggacacaggactacccgtcggtgcccaccctggtgcgcctgctcgccaagcacaacatcatccccatctttgctgtcaccaactactcctatagctactacgagaagcttcacacctatttccctgtctcctcactgggggtgctgcaggaggactcgtccaacatcgtggagctgctggaggaggccttcaatcggatccgctccaacctggacatccgggccctagacagcccccgaggccttcggacagaggtcacctccaagatgttccagaagacgaggactgggtcctttcacatccggcggggggaagtgggtatataccaggtgcagctgcgggcccttgagcacgtggatgggacgcacgtgtgccagctgccggaggaccagaagggcaacatccatctgaaaccttccttctccgacggcctcaagatggacgcgggcatcatctgtgatgtgtgcacctgcgagctgcaaaaagaggtgcggtcagctcgctgcagcttcaacggagacttcgtgtgcggacagtgtgtgtgcagcgagggctggagtggccagacctgcaactgctccaccggctctctgagtgacattcagccctgcctgcgggagggcgaggacaagccgtgctccggccgtggggagtgccagtgcgggcactgtgtgtgctacggcgaaggccgctacgagggtcagttctgcgagtatgacaacttccagtgtccccgcacttccgggttcctctgcaatgaccgaggacgctgctccatgggccagtgtgtgtgtgagcctggttggacaggcccaagctgtgactgtcccctcagcaatgccacctgcatcgacagcaatgggggcatctgtaatggacgtggccactgtgagtgtggccgctgccactgccaccagcagtcgctctacacggacaccatctgcgagatcaactactcggcgatccacccgggcctctgcgaggacctacgctcctgcgtgcagtgccaggcgtggggcaccggcgagaagaaggggcgcacgtgtgaggaatgcaacttcaaggtcaagatggtggacgagcttaagagagccgaggaggtggtggtgcgctgctccttccgggacgaggatgacgactgcacctacagctacaccatggaaggtgacggcgcccctgggcccaacagcactgtcctggtgcacaagaagaaggactgccctccgggctccttctggtggctcatccccctgctcctcctcctcctgccgctcctggccctgctactgctgctatgctggaagtactgtgcctgctgcaaggcctgcctggcacttctcccgtgctgcaaccgaggtcacatggtgggctttaaggaagaccactacatgctgcgggagaacctgatggcctctgaccacttggacacgcccatgctgcgcagcgggaacctcaagggccgtgacgtggtccgctggaaggtcaccaacaacatgcagcggcctggctttgccactcatgccgccagcatcaaccccacagagctggtgccctacgggctgtccttgcgcctggcccgcctttgcaccgagaacctgctgaagcctgacactcgggagtgcgcccagctgcgccaggaggtggaggagaacctgaacgaggtctacaggcagatctccggtgtacacaagctccagcagaccaagttccggcagcagcccaatgccgggaaaaagcaagaccacaccattgtggacacagtgctgatggcgccccgctcggccaagccggccctgctgaagcttacagagaagcaggtggaacagagggccttccacgacctcaaggtggcccccggctactacaccctcactgcagaccaggacgcccggggcatggtggagttccaggagggcgtggagctggtggacgtacgggtgcccctctttatccggcctgaggatgacgacgagaagcagctgctggtggaggccatcgacgtgcccgcaggcactgccaccctcggccgccgcctggtaaacatcaccatcatcaaggagcaagccagagacgtggtgtcctttgagcagcctgagttctcggtcagccgcggggaccaggtggcccgcatccctgtcatccggcgtgtcctggacggcgggaagtcccaggtctcctaccgcacacaggatggcaccgcgcagggcaaccgggactacatccccgtggagggtgagctgctgttccagcctggggaggcctggaaagagctgcaggtgaagctcctggagctgcaagaagttgactccctcctgcggggccgccaggtccgccgtttccacgtccagctcagcaaccctaagtttggggcccacctgggccagccccactccaccaccatcatcatcagggacccagatgaactggaccggagcttcacgagtcagatgttgtcatcacagccaccccctcacggcgacctgggcgccccgcagaaccccaatgctaaggccgctgggtccaggaagatccatttcaactggctgcccccttctggcaagccaatggggtacagggtaaagtactggattcagggtgactccgaatccgaagcccacctgctcgacagcaaggtgccctcagtggagctcaccaacctgtacccgtattgcgactatgagatgaaggtgtgcgcctacggggctcagggcgagggaccctacagctccctggtgtcctgccgcacccaccaggaagtgcccagcgagccagggcgtctggccttcaatgtcgtctcctccacggtgacccagctgagctgggctgagccggctgagaccaacggtgagatcacagcctacgaggtctgctatggcctggtcaacgatgacaaccgacctattgggcccatgaagaaagtgctggttgacaaccctaagaaccggatgctgcttattgagaaccttcgggagtcccagccctaccgctacacggtgaaggcgcgcaacggggccggctgggggcctgagcgggaggccatcatcaacctggccacccagcccaagaggcccatgtccatccccatcatccctgacatccctatcgtggacgcccagagcggggaggactacgacagcttccttatgtacagcgatgacgttctacgctctccatcgggcagccagaggcccagcgtctccgatgacactgagcacctggtgaatggccggatggactttgccttcccgggcagcaccaactccctgcacaggatgaccacgaccagtgctgctgcctatggcacccacctgagcccacacgtgccccaccgcgtgctaagcacatcctccaccctcacacgggactacaactcactgacccgctcagaacactcacactcgaccacactgccgagggactactccaccctcacctccgtctcctcccacgactctcgcctgactgctggtgtgcccgacacgcccacccgcctggtgttctctgccctggggcccacatctctcagagtgagctggcaggagccgcggtgcgagcggccgctgcagggctacagtgtggagtaccagctgctgaacggcggtgagctgcatcggctcaacatccccaaccctgcccagacctcggtggtggtggaagacctcctgcccaaccactcctacgtgttccgcgtgcgggcccagagccaggaaggctggggccgagagcgtgagggtgtcatcaccattgaatcccaggtgcacccgcagagcccactgtgtcccctgccaggctccgccttcactttgagcactcccagtgccccaggcccgctggtgttcactgccctgagcccagactcgctgcagctgagctgggagcggccacggaggcccaatggggatatcgtcggctacctggtgacctgtgagatggcccaaggaggagggccagccaccgcattccgggtggatggagacagccccgagagccggctgaccgtgccgggcctcagcgagaacgtgccctacaagttcaaggtgcaggccaggaccactgagggcttcgggccagagcgcgagggcatcatcaccatagagtcccaggatggaggacccttcccgcagctgggcagccgtgccgggctcttccagcacccgctgcaaagcgagtacagcagcatcaccaccacccacaccagcgccaccgagcccttcctagtggatgggctgaccctgggggcccagcacctggaggcaggcggctccctcacccggcatgtgacccaggagtttgtgagccggacactgaccaccagcggaacccttagcacccacatggaccaacagttcttccaaacttgaccgcaccctgccccacccccgccacgtcccactaggcgtcctcccgactcctctcccggagcctcctcagctactccatccttgcacccctgggggcccagcccacccgcatgcacagagcaggggctaggtgtctcctgggaggcatgaagggggcaaggtccgtcctctgtgggcccaaacctatttgtaaccaaagagctgggagcagcacaaggacccagcctttgttctgcacttaataaatggttttgctactgcta

SEQ ID NO: 1606 - DNA, 5988 bp, Homo sapiens; identical to SEQ ID NO: 1602

SEQ ID NO: 1607 - DNA, 5829 bp, Homo sapiens; identical to SEQ ID NO: 1603

SEQ ID NO: 1608 - DNA, 5469 bp, Homo sapiens
gccctcggacagtccctgctcgcccgcgcgctgcagccccatctcctagcggcagcccaggcgcggagggagcgagtccgccccgaggaggaagaggatggcagggccacgccccagcccatgggccaggctgctcctggcagccttgatcagcgtcagcctctctgggaccttggcaaaccgctgcaagaaggccccagtgaagagctgcacggagtgtgtccgtgtggataaggactgcgcctactgcacagacgagatgttcagggaccggcgctgcaacacccaggcggagctgctggccgcgggctgccagcgggagagcatcgtggtcatggagagcagcttccaaatcacagaggagacccagattgacaccaccctgcggcgcagccagatgtccccccaaggcctgcgggtccgtctgcggcccggtgaggagcggcattttgagctggaggtgtttgagccactggagagccccgtggacctgtacatcctcatggacttctccaactccatgtccgatgatctggacaacctcaagaagatggggcagaacctggctcgggtcctgagccagctcaccagcgactacactattggatttggcaagtttgtggacaaagtcagcgtcccgcagacggacatgaggcctgagaagctgaaggagccctggcccaacagtgacccccccttctccttcaagaacgtcatcagcctgacagaagatgtggatgagttccggaataaactgcagggagagcggatctcaggcaacctggatgctcctgagggcggcttcgatgccatcctgcagacagctgtgtgcacgagggacattggctggcgcccggacagcacccacctgctggtcttctccaccgagtcagccttccactatgaggctgatggcgccaacgtgctggctggcatcatgagccgcaacgatgaacggtgccacctggacaccacgggcacctacacccagtacaggacacaggactacccgtcggtgcccaccctggtgcgcctgctcgccaagcacaacatcatccccatctttgctgtcaccaactactcctatagctactacgagaagcttcacacctatttccctgtctcctcactgggggtgctgcaggaggactcgtccaacatcgtggagctgctggaggaggccttcaatcggatccgctccaacctggacatccgggccctagacagcccccgaggccttcggacagaggtcacctccaagatgttccagaagacgaggactgggtcctttcacatccggcggggggaagtgggtatataccaggtgcagctgcgggcccttgagcacgtggatgggacgcacgtgtgccagctgccggaggaccagaagggcaacatccatctgaaaccttccttctccgacggcctcaagatggacgcgggcatcatctgtgatgtgtgcacctgcgagctgcaaaaagaggtgcggtcagctcgctgcagcttcaacggagacttcgtgtgcggacagtgtgtgtgcagcgagggctggagtggccagacctgcaactgctccaccggctctctgagtgacattcagccctgcctgcgggagggcgaggacaagccgtgctccggccgtggggagtgccagtgcgggcactgtgtgtgctacggcgaaggccgctacgagggtcagttctgcgagtatgacaacttccagtgtccccgcacttccgggttcctctgcaatgaccgaggacgctgctccatgggccagtgtgtgtgtgagcctggttggacaggcccaagctgtgactgtcccctcagcaatgccacctgcatcgacagcaatgggggcatctgtaatggacgtggccactgtgagtgtggccgctgccactgccaccagcagtcgctctacacggacaccatctgcgagatcaactactcggcgatccacccgggcctctgcgaggacctacgctcctgcgtgcagtgccaggcgtggggcaccggcgagaagaaggggcgcacgtgtgaggaatgcaacttcaaggtcaagatggtggacgagcttaagagagccgaggaggtggtggtgcgctgctccttccgggacgaggatgacgactgcacctacagctacaccatggaaggtgacggcgcccctgggcccaacagcactgtcctggtgcacaagaagaaggactgccctccgggctccttctggtggctcatccccctgctcctcctcctcctgccgctcctggccctgctactgctgctatgctggaagtactgtgcctgctgcaaggcctgcctggcacttctcccgtgctgcaaccgaggtcacatggtgggctttaaggaagaccactacatgctgcgggagaacctgatggcctctgaccacttggacacgcccatgctgcgcagcgggaacctcaagggccgtgacgtggtccgctggaaggtcaccaacaacatgcagcggcctggctttgccactcatgccgccagcatcaaccccacagagctggtgccctacgggctgtccttgcgcctggcccgcctttgcaccgagaacctgctgaagcctgacactcgggagtgcgcccagctgcgccaggaggtggaggagaacctgaacgaggtctacaggcagatctccggtgtacacaagctccagcagaccaagttccggcagcagcccaatgccgggaaaaagcaagaccacaccattgtggacacagtgctgatggcgccccgctcggccaagccggccctgctgaagcttacagagaagcaggtggaacagagggccttccacgacctcaaggtggcccccggctactacaccctcactgcagaccaggacgcccggggcatggtggagttccaggagggcgtggagctggtggacgtacgggtgcccctctttatccggcctgaggatgacgacgagaagcagctgctggtggaggccatcgacgtgcccgcaggcactgccaccctcggccgccgcctggtaaacatcaccatcatcaaggagcaagccagagacgtggtgtcctttgagcagcctgagttctcggtcagccgcggggaccaggtggcccgcatccctgtcatccggcgtgtcctggacggcgggaagtcccaggtctcctaccgcacacaggatggcaccgcgcagggcaaccgggactacatccccgtggagggtgagctgctgttccagcctggggaggcctggaaagagctgcaggtgaagctcctggagctgcaagaagttgactccctcctgcggggccgccaggtccgccgtttccacgtccagctcagcaaccctaagtttggggcccacctgggccagccccactccaccaccatcatcatcagggacccagatgaactggaccggagcttcacgagtcagatgttgtcatcacagccaccccctcacggcgacctgggcgccccgcagaaccccaatgctaaggccgctgggtccaggaagatccatttcaactggctgcccccttctggcaagccaatggggtacagggtaaagtactggattcagggtgactccgaatccgaagcccacctgctcgacagcaaggtgccctcagtggagctcaccaacctgtacccgtattgcgactatgagatgaaggtgtgcgcctacggggctcagggcgagggaccctacagctccctggtgtcctgccgcacccaccaggaagtgcccagcgagccagggcgtctggccttcaatgtcgtctcctccacggtgacccagctgagctgggctgagccggctgagaccaacggtgagatcacagcctacgaggtctgctatggcctggtcaacgatgacaaccgacctattgggcccatgaagaaagtgctggttgacaaccctaagaaccggatgctgcttattgagaaccttcgggagtcccagccctaccgctacacggtgaaggcgcgcaacggggccggctgggggcctgagcgggaggccatcatcaacctggccacccagcccaagaggcccatgtccatccccatcatccctgacatccctatcgtggacgcccagagcggggaggactacgacagcttccttatgtacagcgatgacgttctacgctctccatcgggcagccagaggcccagcgtctccgatgacactgagcacctggtgaatggccggatggactttgccttcccgggcagcaccaactccctgcacaggatgaccacgaccagtgctgctgcctatggcacccacctgagcccacacgtgccccaccgcgtgctaagcacatcctccaccctcacacgggactacaactcactgacccgctcagaacactcacactcgaccacactgccgagggactactccaccctcacctccgtctcctcccacggtgagctgcatcggctcaacatccccaaccctgcccagacctcggtggtggtggaagacctcctgcccaaccactcctacgtgttccgcgtgcgggcccagagccaggaaggctggggccgagagcgtgagggtgtcatcaccattgaatcccaggtgcacccgcagagcccactgtgtcccctgccaggctccgccttcactttgagcactcccagtgccccaggcccgctggtgttcactgccctgagcccagactcgctgcagctgagctgggagcggccacggaggcccaatggggatatcgtcggctacctggtgacctgtgagatggcccaaggaggagggccagccaccgcattccgggtggatggagacagccccgagagccggctgaccgtgccgggcctcagcgagaacgtgccctacaagttcaaggtgcaggccaggaccactgagggcttcgggccagagcgcgagggcatcatcaccatagagtcccaggatggaggacccttcccgcagctgggcagccgtgccgggctcttccagcacccgctgcaaagcgagtacagcagcatcaccaccacccacaccagcgccaccgagcccttcctagtggatgggctgaccctgggggcccagcacctggaggcaggcggctccctcacccggcatgtgacccaggagtttgtgagccggacactgaccaccagcggaacccttagcacccacatggaccaacagttcttccaaacttgaccgcaccctgccccacccccgccacgtcccactaggcgtcctcccgactcctctcccggagcctcctcagctactccatccttgcacccctgggggcccagcccacccgcatgcacagagcaggggctaggtgtctcctgggaggcatgaagggggcaaggtccgtcctctgtgggcccaaacctatttgtaaccaaagagctgggagcagcacaaggacccagcctttgttctgcacttaataaatggttttgctactgcta

SEQ ID NO: 1609 - DNA, 5648 bp, Homo sapiens; identical to SEQ ID NO: 1605

SEQ ID NO: 1610 - DNA, 5484 bp, Homo sapiens
attcctgccgctgccgccgccgccgccgaggtcccgcaccagccatggcgcagatcctccctgttcgctttcaggagcacttccagctccaaaaccttggaattaatccagctaacattggattcagcacactgaccatggaatctgacaagttcatatgtatccgagagaaagttggtgagcaggcacaggtcacgatcattgacatgagtgacccaatggctccgatccgacggcctatctctgcagagagtgccatcatgaatccagcctctaaggtgatagctctgaaagctgggaagacacttcagatctttaatattgagatgaagagtaaaatgaaggctcatactatggcagaagaagtgattttctggaaatgggtttctgtgaacactgttgccttggtgaccgagaccgcggtctaccactggagcatggaaggtgactcccagcccatgaagatgtttgatagacataccagtctggtgggctgccaggtgattcactaccggactgatgagtaccagaagtggctgctgctcgtaggcatctcggctcagcaaaaccgtgtggttggagcaatgcagctctactctgtggataggaaggtttcacaacccatagaaggccatgctgcggcttttgcagagttcaagatggaggggaatgccaagcctgccacccttttctgctttgctgtacgtaatcccacaggaggcaagttgcacatcattgaagttggacagcctgcagcgggaaaccaaccttttgtaaagaaagcagtagatgtgttttttcctccagaggcacagaatgattttccagtggctatgcagattggagctaaacatggtgttatttacttgatcacaaagtatggctatcttcatctgtacgacctagagtctggcgtgtgcatctgcatgaaccgtattagtgctgacacaatatttgtcactgctccacacaaaccaacctctggaattattggtgtcaacaaaaagggacaggtactgtcagtttgtgttgaggaagataacattgtgaattatgcaaccaacgtgcttcagaatccagaccttggtctgcgtttggccgttcgtagtaacctggctggggcagagaagttgtttgtgagaaaattcaataccctctttgcacagggcagctatgctgaagccgccaaagttgcagcgtctgcaccaaagggaatcctgcgtaccagagagacggtccagaaattccagagtatacccgctcagtctggccaggcttctccattgctgcagtacttcggaatcctgctcgaccagggtcagctcaataaacttgaatccttagaactttgccatctggttcttcagcaggggcgtaagcaactcctagagaagtggctgaaagaagataagctggagtgctcagaggagctcggagacttggtcaaaaccactgaccccatgctcgctctgagtgtgtaccttcgggcaaatgtgccaagcaaagtgatccagtgttttgcagaaacaggccaattccagaaaattgtgctctatgccaaaaaggttgggtacaccccagactggatctttctgctgaggggtgtaatgaagatcagtccggaacagggcctgcagttttctcgaatgctagtgcaggacgaggagccgctggccaacattagccagattgtggacattttcatggaaaacagtttaattcagcagtgtacttccttcttattggatgccttgaagaataatcgcccagctgagggactcctgcagacatggctgttggagatgaaccttgttcatgcaccccaggttgcagatgccatccttggaaataaaatgtttactcattacgaccgggcccacattgcccagctctgtgagaaggcaggcctcctgcagcaagcactggagcactacaccgacctctatgacatcaagagggctgtggtccacactcacctcctcaatcccgagtggcttgtcaatttctttggctccttatcggtggaggattctgtggagtgtctgcatgccatgctgtctgctaacatcagacagaaccttcagctgtgtgtgcaggtggcctctaagtaccacgagcagctgggcacgcaggccctggtggagctctttgaatccttcaagagttacaaaggcctcttctacttcctgggctcaatcgtgaacttcagccaagacccagatgtgcatctgaaatacattcaggctgcctgtaagacagggcagatcaaggaggtggagaggatatgccgagagagcagctgctacaacccagagcgtgtgaagaacttcctgaaggaggccaagctcacagaccagcttcccctcatcatcgtgtgtgatcgttttggctttgtccatgaccttgtcctatatttataccgcaacaacctgcagaggtacattgagatctacgtgcagaaggtcaaccctagccggaccccagctgtgattggagggctgcttgatgtggattgttctgaggaagtgattaaacacttaatcatggcagtgagaggacagttctctactgatgagttggtggctgaagtagaaaaaagaaataggctcaagctgctgcttccctggctggagtcccagattcaggaaggctgtgaggagcctgccactcacaatgcactggctaaaatctacatcgacagcaacaacagccccgagtgcttcctgagagagaatgcctactatgacagcagcgtggtgggccgctactgtgagaagcgagacccccatctggcctgtgttgcctatgagcgggggcagtgtgaccttgagctcatcaaggtgtgcaatgagaattctctgttcaaaagcgaggcccgctacctggtatgcagaaaggatccggagctctgggctcacgtccttgaggagaccaacccatccaggagacagctaattgaccaggtggtacagacagcattgtcagaaacacgggatcctgaagagatttcggtcactgtcaaagcctttatgacagccgacctgcctaatgaactgattgaactgctggagaagatagttctggataactctgtcttcagcgagcacaggaatctacagaatctgttgatcctgactgccatcaaggcagaccgcacacgggtcatggagtacatcagccgcctggacaactatgacgcactggacatcgcgagcatcgctgtcagcagcgcactgtatgaggaggccttcaccgttttccacaagtttgatatgaatgcctcagcaatccaggtcctgatcgagcacattggaaacctggaccgggcatatgagtttgcggagagatgcaatgagcctgctgtgtggagtcagctggcccaagcccagctccagaaagatttggtgaaggaagccatcaactcctatatcagaggggacgacccttcctcttacctggaagttgttcagtcagccagcaggagcaacaactgggaggatctagttaaatttctgcagatggccaggaaaaagggccgtgagtcctatatagagactgaacttatttttgccttggctaaaaccagccgtgtttctgagctagaagattttattaatggacccaacaatgcccacatccagcaggttggagaccgctgttacgaggagggaatgtacgaggctgccaagctgctctatagcaatgtttctaactttgcccgcctggcttccaccttggttcacctcggtgagtatcaggcagcagtggacaacagccgcaaggccagcagcacccggacgtggaaggaggtgtgctttgcctgcatggatggacaagagttccgcttcgcacagctgtgtggtcttcacatcgtcattcatgcagatgagctggaggagctgatgtgctattaccaggatcgtggctactttgaggagctgatcttgctgttggaagcggccctgggcctggagcgggcccacatgggcatgttcactgagctggccatcctctactccaaattcaagccacagaagatgctggagcatctggagcttttctggtcccgtgtcaacatcccaaaggtgctgagggctgcagagcaggcacacctgtgggctgagctggtgttcctctatgacaagtacgaggagtatgacaatgctgtgctcaccatgatgagccaccccactgaggcctggaaggagggtcagttcaaggacatcattaccaaggttgccaacgtcgagctctgttacagagccctgcagttctatttggattacaaaccactgctcatcaatgacctgctgctggtgctttcaccccggctggaccacacctggacagtcagtttcttttcaaaggcaggtcagctgcccctggtgaagccttacctgcggtcagtccagagccacaacaacaagagtgtgaatgaggcactcaaccacctgctgacagaggaggaggactatcagggcttaagggcatctatcgatgcctatgacaactttgacaacatcagcctggctcagcagctggagaagcatcagctgatggagttcaggtgcattgcggcctatctgtacaagggcaataactggtgggcccagagcgtggagctctgcaagaaggatcatctctacaaggatgccatgcagcatgctgcagagtcgcgggatgctgagctggcccagaagttgctgcagtggttcctggaggaaggcaagagggagtgcttcgcagcttgtctcttcacctgctatgacctgcttcgcccagacatggtgcttgagctggcctggaggcacaacctcgtggacttggccatgccctacttcatccaggtgatgagggagtacctgagcaaggtggacaaactggatgccttggagagtctgcgcaagcaagaggagcatgtgacagagcctgcccctctcgtgtttgattttgatgggcatgaatgagacccagctgattgcactaagccctgccgtgggcccagcccctgccagcttcccctatggatatgcctctgctcccaacttcgccagcctccaatgtacaacttccgcgtgtagtgggcgttgtcaccacccaccctacctgcagagttactaacttctccaaggagcatgtcactccagcagcacaggggacgcaatgggaggcagggacacctggacaatatttatttttgctgaaacccaatgacggcaacctctgagccatcccagagcctggggaggccagggtagaggctgacggcgcaagaccagctttagccgacaacagagactggactgtgggccctcctgctggagccaggccttcctcctgggcgcctccgactggctggagctgccccctccaggccagtttgaagactacatgaacacgtcttgtttggaggtaccggacctcataaaaggactctcagcctcttggcaatcataaatattaaagtcggtttatccaggcaaa

SEQ ID NO: 1611 - DNA, 5313 bp, Homo sapiens
attcctgccgctgccgccgccgccgccgaggtcccgcaccagccatggcgcagatcctccctgttcgctttcaggagcacttccagctccaaaaccttggaattaatccagctaacattggattcagcacactgaccatggaatctgacaagttcatatgtatccgagagaaagttggtgagcaggcacaggtcacgatcattgacatgagtgacccaatggctccgatccgacggcctatctctgcagagagtgccatcatgaatccagcctctaaggtgatagctctgaaagctgggaagacacttcagatctttaatattgagatgaagagtaaaatgaaggctcatactatggcagaagaagtgattttctggaaatgggtttctgtgaacactgttgccttggtgaccgagaccgcggtctaccactggagcatggaaggtgactcccagcccatgaagatgtttgatagacataccagtctggtgggctgccaggtgattcactaccggactgatgagtaccagaagtggctgctgctcgtaggcatctcggctcagcaaaaccgtgtggttggagcaatgcagctctactctgtggataggaaggtttcacaacccatagaaggccatgctgcggcttttgcagagttcaagatggaggggaatgccaagcctgccacccttttctgctttgctgtacgtaatcccacaggaggcaagttgcacatcattgaagttggacagcctgcagcgggaaaccaaccttttgtaaagaaagcagtagatgtgttttttcctccagaggcacagaatgattttccagtggctatgcagattggagctaaacatggtgttatttacttgatcacaaagtatggctatcttcatctgtacgacctagagtctggcgtgtgcatctgcatgaaccgtattagtgctgacacaatatttgtcactgctccacacaaaccaacctctggaattattggtgtcaacaaaaagggacaggtactgtcagtttgtgttgaggaagataacattgtgaattatgcaaccaacgtgcttcagaatccagaccttggtctgcgtttggccgttcgtagtaacctggctggggcagagaagttgtttgtgagaaaattcaataccctctttgcacagggcagctatgctgaagccgccaaagttgcagcgtctgcaccaaagggaatcctgcgtaccagagagacggtccagaaattccagagtatacccgctcagtctggccaggcttctccattgctgcagtacttcggaatcctgctcgaccagggtcagctcaataaacttgaatccttagaactttgccatctggttcttcagcaggggcgtaagcaactcctagagaagtggctgaaagaagataagctggagtgctcagaggagctcggagacttggtcaaaaccactgaccccatgctcgctctgagtgtgtaccttcgggcaaatgtgccaagcaaagtgatccagtgttttgcagaaacaggccaattccagaaaattgtgctctatgccaaaaaggttgggtacaccccagactggatctttctgctgaggggtgtaatgaagatcagtccggaacagggcctgcagttttctcgaatgctagtgcaggacgaggagccgctggccaacattagccagattgtggacattttcatggaaaacagtttaattcagcagtgtacttccttcttattggatgccttgaagaataatcgcccagctgagggactcctgcagacatggctgttggagatgaaccttgttcatgcaccccaggttgcagatgccatccttggaaataaaatgtttactcattacgaccgggcccacattgcccagctctgtgagaaggcaggcctcctgcagcaagcactggagcactacaccgacctctatgacatcaagagggctgtggtccacactcacctcctcaatcccgagtggcttgtcaatttctttggctccttatcggtggaggattctgtggagtgtctgcatgccatgctgtctgctaacatcagacagaaccttcagctgtgtgtgcaggtggcctctaagtaccacgagcagctgggcacgcaggccctggtggagctctttgaatccttcaagagttacaaaggcctcttctacttcctgggctcaatcgtgaacttcagccaagacccagatgtgcatctgaaatacattcaggctgcctgtaagacagggcagatcaaggaggtggagaggatatgccgagagagcagctgctacaacccagagcgtgtgaagaacttcctgaaggaggccaagctcacagaccagcttcccctcatcatcgtgtgtgatcgttttggctttgtccatgaccttgtcctatatttataccgcaacaacctgcagaggtacattgagatctacgtgcagaaggtcaaccctagccggaccccagctgtgattggagggctgcttgatgtggattgttctgaggaagtgattaaacacttaatcatggcagtgagaggacagttctctactgatgagttggtggctgaagtagaaaaaagaaataggctcaagctgctgcttccctggctggagtcccagattcaggaaggctgtgaggagcctgccactcacaatgcactggctaaaatctacatcgacagcaacaacagccccgagtgcttcctgagagagaatgcctactatgacagcagcgtggtgggccgctactgtgagaagcgagacccccatctggcctgtgttgcctatgagcgggggcagtgtgaccttgagctcatcaaggtgtgcaatgagaattctctgttcaaaagcgaggcccgctacctggtatgcagaaaggatccggagctctgggctcacgtccttgaggagaccaacccatccaggagacagctaattgaccaggtggtacagacagcattgtcagaaacacgggatcctgaagagatttcggtcactgtcaaagcctttatgacagccgacctgcctaatgaactgattgaactgctggagaagatagttctggataactctgtcttcagcgagcacaggaatctacagaatctgttgatcctgactgccatcaaggcagaccgcacacgggtcatggagtacatcagccgcctggacaactatgacgcactggacatcgcgagcatcgctgtcagcagcgcactgtatgaggaggccttcaccgttttccacaagtttgatatgaatgcctcagcaatccaggtcctgatcgagcacattggaaacctggaccgggcatatgagtttgcggagagatgcaatgagcctgctgtgtggagtcagctggcccaagcccagctccagaaagatttggtgaaggaagccatcaactcctatatcagaggggacgacccttcctcttacctggaagttgttcagtcagccagcaggagcaacaactgggaggatctagttaaatttctgcagatggccaggaaaaagggccgtgagtcctatatagagactgaacttatttttgccttggctaaaaccagccgtgtttctgagctagaagattttattaatggacccaacaatgcccacatccagcaggttggagaccgctgttacgaggagggaatgtacgaggctgccaagctgctctatagcaatgtttctaactttgcccgcctggcttccaccttggttcacctcggtgagtatcaggcagcagtggacaacagccgcaaggccagcagcacccggacgtggaaggaggtgtgctttgcctgcatggatggacaagagttccgcttcgcacagctgtgtggtcttcacatcgtcattcatgcagatgagctggaggagctgatgtgctattaccaggatcgtggctactttgaggagctgatcttgctgttggaagcggccctgggcctggagcgggcccacatgggcatgttcactgagctggccatcctctactccaaattcaagccacagaagatgctggagcatctggagcttttctggtcccgtgtcaacatcccaaaggtgctgagggctgcagagcaggcacacctgtgggctgagctggtgttcctctatgacaagtacgaggagtatgacaatgctgtgctcaccatgatgagccaccccactgaggcctggaaggagggtcagttcaaggacatcattaccaaggttgccaacgtcgagctctgttacagagccctgcagttctatttggattacaaaccactgctcatcaatgacctgctgctggtgctttcaccccggctggaccacacctggacagtcagtttcttttcaaaggcaggtcagctgcccctggtgaagccttacctgcggtcagtccagagccacaacaacaagagtgtgaatgaggcactcaaccacctgctgacagaggaggaggactatcaggatgccatgcagcatgctgcagagtcgcgggatgctgagctggcccagaagttgctgcagtggttcctggaggaaggcaagagggagtgcttcgcagcttgtctcttcacctgctatgacctgcttcgcccagacatggtgcttgagctggcctggaggcacaacctcgtggacttggccatgccctacttcatccaggtgatgagggagtacctgagcaaggtggacaaactggatgccttggagagtctgcgcaagcaagaggagcatgtgacagagcctgcccctctcgtgtttgattttgatgggcatgaatgagacccagctgattgcactaagccctgccgtgggcccagcccctgccagcttcccctatggatatgcctctgctcccaacttcgccagcctccaatgtacaacttccgcgtgtagtgggcgttgtcaccacccaccctacctgcagagttactaacttctccaaggagcatgtcactccagcagcacaggggacgcaatgggaggcagggacacctggacaatatttatttttgctgaaacccaatgacggcaacctctgagccatcccagagcctggggaggccagggtagaggctgacggcgcaagaccagctttagccgacaacagagactggactgtgggccctcctgctggagccaggccttcctcctgggcgcctccgactggctggagctgccccctccaggccagtttgaagactacatgaacacgtcttgtttggaggtaccggacctcataaaaggactctcagcctcttggcaatcataaatattaaagtcggtttatccaggcaaa

SEQ ID NO: 1612 - DNA, 16382 bp, Homo sapiens
ctgcagccatgggtgccctatggagctggtggatactctgggctggagcaaccctcctgtggggattgacccaggaggcttcagtggacctcaagaacactggcagagaggaattcctcacagccttcctgcagaactatcagctggcctacagcaaggcctacccccgcctccttatctccagtctgtcagagagccccgcttcagtctccatcctcagccaggcagacaacacctcaaagaaggtcacagtgaggcccggggagtcggtcatggtcaacatcagtgccaaggctgagatgataggcagcaagatcttccagcatgcggtggtgatccattctgactatgccatctctgtgcaggcactaaatgccaagcctgacacagcggagctgacactgctgcggcccatccaggccctaggcaccgagtattttgtgctcacaccccccggcacctcagccaggaatgtcaaggagtttgccgtggtggccggtgccgcaggtgcctcggtcagtgtcacgctgaaggggtcagtgacattcaatggcaagttctatccagcaggcgatgtcctaagagtgactctacagccctacaatgtggcccagctacagagctcagtggatctctcggggtcaaaggtcacagctagtagccccgtggctgtcctctctggccacagctgtgcgcagaaacatacgacctgcaaccatgtggttgagcagctgctacccacgtctgcctggggcacccactatgtagtacccacgctggcctcccaatctcgctatgatttggccttcgttgtggccagccaggccacaaagctgacctacaaccatgggggtatcactggctcccgtgggctccaggcaggtgatgtggtagagtttgaggtccggccatcctggccactctacctgtctgcaaatgtgggcatccaggtcctgttgtttggcacaggtgccataaggaatgaagtgacttatgacccctacctggtcctgatcccagatgtggcggcctactgcccagcctatgtggtcaagagtgtaccaggctgtgagggcgtggccctggtagtggcacagacgaaggctatcagcgggctgaccatagatgggcatgcagtgggggccaagctcacctgggaggctgtgccaggcagtgagttctcgtatgctgaagtggagctcggcacagctgacatgatccacacggccgaggccaccaccaacttgggactgctcaccttcgggctggccaaggctataggctacgcaacagctgctgattgcggccggactgtactgtccccagtggagccctcctgcgaaggcatgcagtgcgcagccgggcagcgctgccaggtggtaggcgggaaggccgggtgtgtggcggagtccaccgctgtctgccgcgcccagggcgacccccattacaccaccttcgacggccgtcgctacgacatgatgggcacctgttcgtacacgatggtggagctgtgcagcgaggacgacaccctgcccgccttcagcgtggaggccaagaacgagcaccggggcagccgccgcgtctcctacgtgggcctcgtcactgtgcgcgcctacagccactctgtgtcgctgacccgcggtgaagttggcttcgtcctggttgacaaccagcgctcgcgcctgccagtctccctgagtgagggtcgcctgcgtgtgtaccagagcggaccacgggccgtggtggagctggtctttgggctggtggtcacttatgactgggactgccagctggcactcagcctgcctgcacgcttccaagaccaggtgtgcgggctgtgtggcaactataatggtgacccagcagacgacttcctcacgcctgacggggctctggctcctgacgctgtggagttcgcaagtagctggaagctggatgatggggactacctgtgtgaggatggctgccagaacaactgtcccgcctgcaccccaggccaggcccaacactatgagggcgaccgactctgtggcatgctgaccaagctcgatggccccttcgctgtctgccatgacaccctggaccccaggcccttcctggagcagtgtgtatatgacctgtgtgtggtcggtggggagcggctcagcctgtgccgtggcctcagcgcctatgcccaggcctgtctggagcttggcatctcggttggggactggagatcaccagccaactgccccctgtcctgccctgccaacagccgctatgagctctgcggccctgcttgcccgacctcctgcaacggggctgcggcgccgtccaactgctccgggcgcccctgcgtggagggctgcgtgtgcctcccaggcttcgtggccagcggcggcgcctgcgtgccggcctcgtcgtgtggctgcaccttccagggtctccagctcgctccgggccaggaagtgtgggcggacgagttgtgccaaaggcgctgcacctgcaacggcgccacccatcaggtcacctgccgcgacaagcagagctgcccggcgggtgagcgctgcagcgtccagaacggcctcctgggctgctaccccgatcgcttcgggacctgccaggggtccggggacccacactatgtgagcttcgacggccggcgcttcgacttcatgggcacctgcacgtacctgctggtcggctcatgcggccagaacgcagcgctgcctgccttccgggtgctggtggaaaacgagcatcggggcagccagactgtgagctacacgcgcgccgtgcgggtggaggcccgcggggtgaaggtggccgtgcgccgggagtaccccgggcaagtgctggtggatgacgtccttcagtatctgcccttccaagcagcagatgggcaggtgcaggtgttccgacagggcagggatgccgtcgtgcgcacggactttggcctgactgtcacttatgactggaatgcacgagtgactgccaaggtgcccagcagctatgctgaggccctgtgtggactctgtgggaacttcaacggggacccagctgatgacctggctctgcggggtgggggtcaagctgccaatgcactggcctttgggaacagctggcaagaagagacgaggcccggctgtggagcaactgaaccgggtgactgtcccaagctggactccctggtggcccagcagctgcagagcaagaatgagtgtggaatccttgccgaccccaaggggcccttccgggagtgccatagcaagctggacccccagggtgccgtgcgcgactgtgtctatgaccgctgcctgctgccaggccagtctgggccactgtgtgacgcactggccacctatgctgctgcatgccaggctgctggagccacagtgcacccctggaggagtgaagaactttgcccactgagctgcccaccccacagccactatgaggcgtgttcctacggctgcccgctgtcctgtggagacctcccagtgcccgggggctgtggctcagaatgccatgagggctgcgtgtgcgatgagggctttgcgctcagtggtgagtcctgcctgcccctggcctcctgtggctgcgtacaccagggcacctaccacccaccaggccagaccttctaccctggccccggatgtgattccctttgccactgccaggagggcggcctggtgtcctgtgagtcctccagctgcggaccgcacgaggcctgccagccatccggtggcagcttgggctgtgtggccgtgggctctagcacctgccaggcgtcaggagacccccactacaccaccttcgatggccgccgcttcgacttcatgggcacctgcgtgtatgtgctggctcagacctgcggcacccggcctggcctgcatcggtttgccgtcctgcaggagaacgtggcctggggtaatgggcgagtcagtgtgaccagggtgatcacggtccaggtggcaaacttcaccctgcggctggagcagagacagtggaaggtcacggtgaacggtgtggacatgaagctgcccgtggtgctggccaacggccagatccgtgcctcccagcatggttcagatgttgtgattgagaccgacttcggcctgcgtgtggcctacgaccttgtgtactatgtgcgggtcaccgtccccggaaactactaccagcagatgtgtggcctgtgtgggaactacaacggcgaccccaaggatgacttccagaagcccaatggctcacaggcaggcaacgccaatgagttcggcaactcctgggaggaggtggtgcccgactctccctgcctgccgcccaccccttgcccgccggggagcgaggactgtatccccagccacaagtgtcctcccgagctggagaagaagtatcagaaggaggagttctgtgggctcctctccagccccacagggccactgtcctcctgccacaagctggtggatccccagggtcccttgaaagattgcatctttgatctctgcctgggtggtgggaacctgagcattctctgcagcaacatccatgcctacgtgagtgcttgccaggcggctggaggccacgtggagccctggaggactgaaactttctgtcccatggagtgccctccgaacagtcactacgagctctgtgcggacacctgctccctgggctgctcagctctcagtgcccctccacagtgccaggatgggtgtgctgagggctgccagtgtgactccggcttcctctacaatggccaagcctgcgtgcccatccagcaatgcggctgctaccacaatggtgtctactatgagccggagcagacagtcctcattgacaactgtcggcagcagtgcacgtgccatgcgggtaaaggcatggtgtgccaggaacacagctgcaagccggggcaggtgtgccagccctccggaggcatcctgagctgcgtcaccaaagacccgtgccacggcgtgacatgccggccacaggagacatgcaaggagcagggtggccagggcgtgtgcctgcccaactatgaggccacgtgctggctgtggggcgacccacactaccactccttcgatggccggaagtttgacttccagggcacctgtaactatgtgctggcaacaactggctgcccgggggtcagcacccagggcctgacacccttcaccgtcaccaccaagaaccagaaccggggcaaccctgctgtgtcctacgtgagagtcgtcaccgtggctgccctcggcaccaacatctccatccacaaggacgagatcggcaaagtccgggtgaacggtgtgctcacagccttgcctgtctctgtggccgacgggcggatttcagtgacccagggtgcatcgaaggcactgctggtggctgactttggactgcaagtcagctatgactggaactggcgggtagacgtgacgctgcccagcagctatcatggcgcagtgtgcgggctctgcggtaacatggaccgcaaccccaacaatgaccaggtcttccctaatggcacactggctccctccatacccatctggggcggcagctggcgagccccaggctgggacccactgtgttgggacgaatgtcgggggtcctgcccaacgtgccctgaggaccggttggagcagtacgagggccctggcttctgcggacccctggcccccggcacagggggccctttcaccacctgccatgctcatgtgccacctgagagcttcttcaagggctgtgttctggacgtctgcatgggtggtggggaccgtgacattctttgcaaggctctggcttcctatgtggccgcctgccaggctgctggggttgtcatcgaagactggcgggcacaggttggctgtgagatcacctgcccagaaaacagccactatgaggtctgtggcccaccctgcccggccagctgtccgtcccctgcaccccttacgacgccagccgtatgtgagggcccctgtgtggagggctgccagtgcgacgcgggtttcgtgttaagtgctgaccgctgtgttcccctcaacaacggctgcggctgctgggccaatggcacctaccacgaggcgggcagtgagttttgggctgatggcacctgctcccagtggtgtcgctgcgggcctgggggtggctcgctggtctgcacacctgccagctgtgggctgggtgaagtgtgtggcctcctgccatccggccagcacggctgccagcccgtcagcacagctgagtgccaggcgtggggtgacccccattacgtcactctggatgggcaccgattcaatttccaaggcacctgcgagtacctgctgagtgcaccctgccacggaccacccttgggggctgagaacttcactgtcactgtagccaatgagcaccggggcagccaggctgtcagctacacccgcagtgtcaccctgcaaatctacaaccacagcctgacactgagtgcccgctggccccggaagctacaggtggacggcgtgttcgtcactctgcccttccagctggactcgctcctgcacgcacacctgagcggcgccgacgtggtggtgaccacaacctcagggctctcgctggctttcgacggggacagcttcgtgcgcctgcgcgtgccggcggcgtacgcgggctctctctgtggcttatgcgggaactacaaccaggaccccgcagacgacctgaaggcggtgggcgggaagcccgccggatggcaggtgggcggcgcccagggctgcggggaatgtgtgtccaagccatgcccgtcgccgtgcaccccagagcagcaagagtccttcggcggcccggacgcctgcggcgtgatctccgccaccgacggcccgctggcgccctgccacggccttgtgccgcccgcgcagtacttccagggctgcttgctggacgcctgccaagttcagggccatcctggaggcctctgtcctgcagtggccacctacgtggcagcctgtcaggccgctggggcccagctccgcgagtggaggcggccggacttctgtcccttccagtgccctgcccacagccactacgagctctgcggtgactcctgtcctgggagctgcccgagcctgtcggcacccgagggctgtgagtcggcctgccgtgaaggctgtgtctgcgatgctggcttcgtgctcagtggtgacacgtgtgtacctgtgggccagtgtggctgcctccacgatgaccgctactacccactgggccagaccttctaccctggccctgggtgtgattccctttgccgctgccgggagggcggtgaggtgtcctgtgagccctccagctgcggcccgcatgagacctgccggccatccggtggcagcttgggctgcgtggccgtgggctctaccacctgccaggcgtcgggagatccccactacaccaccttcgatggccgccgcttcgacttcatgggcacctgcgtgtatgtgctggctcagacctgcggcacccggcctggcctacatcggtttgccgtcctgcaggagaacgtggcctggggtaatgggcgagtcagtgtgaccagggtgatcacggtccaggtggcaaacttcaccctgcggctggagcagagacagtggaaggtcacggtgaacggtgtggacatgaagctgcccgtggtgctggccaacggccagatccgtgcctcccagcatggttcagatgttgtgattgagaccgacttcggcctgcgtgtggcctacgaccttgtgtactatgtgcgggtcaccgtccctggaaactactaccagctgatgtgtggcctgtgtgggaactacaacggcgaccccaaggatgacttccagaagcccaatggctcgcaggcaggcaacgccaatgagttcggcaactcctgggaggaggtggtgcccgactctccctgcctgccgccgcccacctgcccgccggggagcgagggctgtatccccagcgaggagtgtcctcccgagctggagaagaagtatcagaaggaggagttctgtgggctcctctccagccccacagggccactgtcctcctgccacaagctggtggatccccagggtcccttgaaagattgcatctttgatctctgcctgggtggtgggaacctgagcattctctgcagcaacatccatgcctacgtgagtgcttgccaggcggctggaggccacgtggagccctggaggaatgaaactttctgtcccatggaatgccctcagaacagtcactacgagctctgtgcggacacctgctccctgggctgctcggctctcagtgcccctctgcagtgcccagatgggtgtgctgagggctgccagtgtgactccggcttcctctacaacggccaagcctgcgtgcccatccagcaatgtggctgctaccacaatggtgcctactatgagccggagcagacagtcctcattgacaactgtcggcagcagtgcacgtgccatgcgggtaaagtcgtggtgtgccaggaacacagctgcaagccggggcaggtgtgccagccctccggaggcatcctgagctgcgtcaccaaagacccgtgccacggcgtgacatgccggccacaggagacatgcaaggagcagggtggccagggtgtgtgcctgcccaactatgaggccacgtgctggctgtggggcgacccacactaccactccttcgatggccggaagtttgacttccagggcacctgtaactatgtgctggcaacaactggctgcccgggggtcagcacccagggcctgacacccttcaccgtcaccaccaagaaccagaaccggggcaaccctgctgtatcctacgtgagagtcgtcaccgtggctgccctcggcaccaacatctccatccacaaggacgagatcggcaaagtccgggtgaacggtgtgctcacagccttgcctgtctccgtggccgacgggcggatttcagtggcccagggtgcatcgaaggcactgctggtggctgactttggactgcaagtcagctatgactggaactggcgggtagacgtgacgctccccagcagctatcatggcgcagtgtgcgggctctgcggtaacatggaccgcaaccccaacaatgaccaggtcttccctaatggcacactggctccctccatacccatctggggcggcagctggcgagccccaggctgggacccactgtgttgggacgaatgtcgggggtcctgcccaacgtgccctgaggaccggttggagcagtacgagggccctggcttctgcggacccctggcccccggcacagggggccctttcaccacctgccatgctcatgtgccacctgagagcttcttcaagggctgtgttctggacgtctgcatgggtggtggggaccatgacattctttgcaaggctctggcttcctacgtggccgcctgccaggccgctggggttgtcatcgaagactggcgggcacaggttggctgtgagatcacctgcccagaaaacagccactatgaggtctgtggcccaccctgcccggccagctgtccgtcccctgcaccccttacgacgccagccgtatgtgagggcccctgtgtggagggctgccagtgcgacgcgggtttcgtgttaagtgctgaccgctgtgttcccctcaacaacggctgcggctgctgggccaatggcacctaccacgaggcgggcagtgagttttgggctgatggcacctgctcccagtggtgtcgctgcgggcctgggggtggctcgctggtctgcacacctgccagctgtgggctgggtgaagtgtgtggcctcctgccatccggccagcacggctgccagcccgtcagcacagctgagtgccaggcgtggggtgacccccattacgtcactctggatgggcaccgattcgatttccaaggcacctgcgagtacctgctgagtgcaccctgccacggaccacccttgggggctgagaacttcactgtcactgtagccaatgagcaccggggcagccaggctgtcagctacacccgcagtgtcaccctgcaaatctacaaccacagcctgacactgagtgcccgctggccccggaagctacaggtggacggcgtgttcgtcactctgcccttccagctggactcgctcctgcacgcacacctgagcggcgccgacgtggtggtgaccacaacctcagggctctcgctggctttcgacggggacagcttcgtgcgcctgcgcgtgccggcggcgtacgcgggctctctctgtggcttatgcgggaactacaaccaggaccccgcagacgacctgaaggcggtgggcgggaagcccgccggatggcaggtgggcggcgcccagggctgcggggaatgtgtgtccaagccatgcccgtcgccgtgcaccccagagcagcaagagtccttcggcggcccggacgcctgcggcgtgatctccgccaccgacggcccgctggcgccctgccacggccttgtgccgcccgcgcagtacttccagggctgcttgctggacgcctgccaagttcagggccatcctggaggcctctgtcctgcagtggccacctacgtggcagcctgtcaggccgctggggcccagctccgcgagtggaggcggccggacttctgtcccttccagtgccctgcccacagccactacgagctctgcggtgactcctgtcctgggagctgcccgagcctgtcggcacccgagggctgtgagtcggcctgccgtgaaggctgtgtctgcgatgctggcttcgtgctcagtggtgacacgtgtgtacctgtgggccagtgtggctgcctccacgatgaccgctactacccactgggccagaccttctaccctggccctgggtgtgattccctttgccgctgccgggagggcggtgaggtgtcctgtgagccctccagctgcggcccgcatgagacctgccggccatccggtggcagcttgggctgcgtggccgtgggctctaccacctgccaggcgtcgggagatccccactacaccaccttcgatggccgccgcttcgacttcatgggcacctgcgtgtatgtgctggctcagacctgcggcacccggcctggcctacatcggtttgccgtcctgcaggagaacgtggcctggggtaatgggcgagtcagtgtgaccagggtgatcacggtccaggtggcaaacttcaccctgcggctggagcagagacagtggaaggtcacggtgaacggtgtggacatgaagctgcccgtggtgctggccaacggccagatccgtgcctcccagcatggttcagatgttgtgattgagaccgacttcggcctgcgtgtggcctacgaccttgtgtactatgtgcgggtcaccgtccctggaaactactaccagctgatgtgtggcctgtgtgggaactacaacggcgaccccaaggatgacttccagaagcccaatggctcgcaggcaggcaacgccaatgagttcggcaactcctgggaggaggtggtgcccgactctccctgcctgccgccgcccacctgcccgccggggagcgagggctgtatccccagcgaggagtgtcctcccgagctggagaagaagtatcagaaggaggagttctgtgggctcctctccagccccacagggccactgtcctcctgccacaagctggtggatccccagggtcccttgaaagattgcatctttgatctctgcctgggtggtgggaacctgagcattctctgcagcaacatccatgcctacgtgagtgcttgccaggcggctggaggccacgtggagccctggaggaatgaaactttctgtcccatggaatgccctcagaacagtcactacgagctctgtgcggacacctgctccctgggctgctcggctctcagtgcccctctgcagtgcccagatgggtgtgctgagggctgccagtgtgactccggcttcctctacaacggccaagcctgcgtgcccatccagcaatgtggctgctaccacaatggtgtctactatgagccggagcagacagtcctcattgacaactgtcggcagcagtgcacgtgccatgtgggtaaagtcgtggtgtgccaggaacacagctgcaagccggggcaggtgtgccagccctccggaggcatcctgagctgcgtcaacaaagacccgtgccacggcgtgacatgccggccacaggagacatgcaaggagcagggtggccagggtgtgtgcctgcccaactatgaggccacgtgctggctgtggggcgacccacactaccactccttcgatggccggaagtttgacttccagggcacctgtaactatgtgctggcaacaactggctgcccgggggtcagcacccagggcctgacacccttcaccgtcaccaccaagaaccagaaccggggcaaccctgctgtatcctacgtgagagtcgtcaccgtggctgccctcggcaccaacatctccatccacaaggacgagatcggcaaagtccgggtgaacggtgtgctcacagccttgcctgtctccgtggccgacgggcggatttcagtggcccagggtgcatcgaaggcactgctggtggctgactttggactgcaagtcagctatgactggaactggcgggtagacgtgacgctccccagcagctatcatggcgcagtgtgcgggctctgcggtaacatggaccgcaaccccaacaatgaccaggtcttccctaatggcacactggctccctccatacccatctggggcggcagctggcgagccccaggctgggacccactgtgttgggacgaatgtcgggggtcctgcccaacgtgccctgaggaccggttggagcagtacgaggggcctggcttctgcggacccctggcatctggcacagggggccccttcaccacctgccatgctcatgtgccacctgagagcttcttcaagggctgtgttctggacgtctgcatgggtggtggggaccatgacattctttgcaaggctctggcttcctacgtggccgcctgccaggccgctggggttgtcatcgaagactggcgggcacaggttggctgtgagatcacctgcccagaaaacagccactatgaggtctgtggcccaccctgcccggccagctgtccgtcccctgcaccccttacgacgccagccgtatgtgagggcccctgtgtggagggctgccagtgcgacgcgggtttcgtgttaagtgctgaccgctgtgttcccctcaacaacggctgcggctgctgggccaatggcacctaccacgaggcgggcagtgagttttgggctgatggcacctgctcccagtggtgtcgctgcgggcctgggggtggctcgctggtctgcacacctgccagctgtgggctgggtgaagtgtgtggcctcctgccatccggccagcacagctgccagcccgtcagcacagctgagtgccaggcgtggggtgacccccattacgtcactctggatgggcaccgattcgatttccaaggcacctgcgagtacctgctgagtgcaccctgccacggaccacccttgggggctgagaacttcactgtcactgtagccaatgagcaccggggcagccaggctgtcagctacacccgcagtgtcaccctgcaaatctacaaccacagcctgacactgagtgcccgctggccccggaagctacaggtcgacggcgtgttcgtggctctgcctttccagctggactcgctcctgcacgcacacctgagcggcgccgacgtggtggtgaccacaacctcagggctctcgctggctttcgatggggacagcttcgtgcgcctgcgcgtgccggcggcgtacgcggcctctctctgtggcttatgcgggaactacaaccaggaccccgcagacgacctgaaggctgtgggcgggaagcccgctggatggcaggtgggcggggcccagggctgcggggaatgtgtgtccaagccatgcccgtcgccgtgcaccccagagcagcaggagtccttcggcggcccggacgcctgcggcgtgatctccgccaccgacggcccgctggcaccctgccacggccttgtgccgcccgcgcagtacttccagggctgcttgctggacgcctgccaagttcagggccatcctggaggcctctgtcctgcagtggctacctacgtggcagcctgtcaggccgctggggcccagctcggcgagtggaggcggccggacttctgtcccttgcagtgccctgcccacagccactatgagctctgcggtgactcctgccctgtgagctgcccgagcctctcagcacccgagggctgtgagtcggcctgccgtgaaggctgtgtctgcgatgctggcttcgtactcagtggtgacacctgcgtacccgtgggccagtgtggctgcctccatgatggccgctactacccactgggcgaggtcttctacccgggccctgagtgtgagcgacgctgtgagtgtgggccaggtggccatgtcacctgccaggagggcgcagcctgtgggccccatgaggagtgccggttagaggatggtgtccaggcctgtcatgccacaggctgtggccgctgcctggccaacgggggcatccactacatcacccttgatggccgtgtctacgacctgcatggctcctgctcctatgtcttggcccaagtctgccacccaaagcctggggacgaggacttttccatcgtgcttgagaagaatgcagctggacatctccaacgcctcctggttactgtggctggccaggttgtgagcctagctcaggggcagcaggtcaccgtggacggcgaggctgtggccctgcctgtggctgtgggccgcgtgcgggtgaccgccgagggccgaaacatggttctgcagacgaccaaggggctgcggcttctctttgatggcgatgcccacctcctcatgtccatccccagccccttccgtggacggctctgtggcctctgtgggaacttcaatggcaactggagtgacgactttgtcctgcccaatggctcagcagcgtccagtgtggagaccttcggggctgcatggcgggtgcccggctcctccaagggctgtggcgagggctgcgggccccaaggctgcccagtgtgcttggcagaggagactgcaccctatgagagcaacgaggcctgcgggcagctccggaacccccagggccccttcgcgacctgccaggcggtgctgagtccctctgagtacttccgccaatgcgtatacgacctgtgcgcgcaaaagggtgacaaagccttcctgtgccgcagcctggcagcctacacggcggcctgtcaggcagctggcgtggccgtgaagccctggaggacagacagcttctgcccgctccattgccccgcccacagccactactccatctgcactcgcacctgccagggatcctgtgcggctctctccggcctcacgggctgcaccacccgctgttttgagggctgtgagtgcgacgaccgcttcctgctttcccagggtgtctgcatccctgtccaagattgtggctgcacccataatggccgatacttgccggtaaactcctccctgctgacctcagactgcagcgagcgctgttcctgttcctcaagctctggcctgacatgccaggccgctggctgcccaccaggccgtgtatgtgaggtcaaggctgaagcccggaactgctgggccacccgtggtctctgtgtcctgtctgtgggtgccaacctcaccacctttgatggggcccgtggtgccaccacctctcctggtgtctatgagctctcttcccgctgcccaggactacagaataccatcccctggtaccgtgtagttgccgaagtccagatctgccatggcaaaacggaggctgtgggccaggtccacatcttcttccaggatgggatggtgacgttgactccaaacaagggtgtgtgggtgaatggtctccgagtggatctcccagctgagaagttagcatctgtgtccgtgagtcgtacacctgatggctccctgctagtccgccagaaggcaggggtccaggtgtggcttggagccaatgggaaggtggctgtgattgtcagcaatgaccatgctgggaaactgtgtggggcctgtggaaactttgacggggaccagaccaatgattggcatgactcccaggagaagccagcgatggagaaatggagagcgcaggacttctccccatgttatggctgatcagtcatccaccaggaacgaagatttcctgaagaagacctggtccctctggaggttgcggtggctgaaggatgcatcatgtgctcctaccctgctctaccgcttttctgggtcacagaggccaaatgtgagagcattgaataaatatcttaagct

SEQ ID NO: 1613 - DNA, 3006 bp, Homo sapiens
ctgggagccgggccgcgtcctctctcctcggccgcgcggccaccggcgaagttctaggggcggggggctcgccccgcgcaggagtcaccccaactttcacggctccaaaaaatacttcccgagttgggggagggggccaccgagccacgagcaggagtggcttttgtccctcatccttgtttactcggagaaacttcagaccggacgtgtttagtcagaacagaaatacatctcagggccaaaccgataggaaacgaggctgcctcgcggtggcaccgccaccccccaaccgggttccgagcaccggagctggctgctgctccctctttggagcaaagttttatgcaaagagggtgttttttgaaactttcgaaaaataactaaacatgggcaaaggagatcctaagaagccgagaggcaaaatgtcatcatatgcattttttgtgcaaacttgtcgggaggagcataagaagaagcacccagatgcttcagtcaacttctcagagttttctaagaagtgctcagagaggtggaagaccatgtctgctaaagagaaaggaaaatttgaagatatggcaaaagcggacaaggcccgttatgaaagagaaatgaaaacctatatccctcccaaaggggagacaaaaaagaagttcaaggatcccaatgcacccaagaggcctccttcggccttcttcctcttctgctctgagtatcgcccaaaaatcaaaggagaacatcctggcctgtccattggtgatgttgcgaagaaactgggagagatgtggaataacactgctgcagatgacaagcagccttatgaaaagaaggctgcgaagctgaaggaaaaatacgaaaaggatattgctgcatatcgagctaaaggaaagcctgatgcagcaaaaaagggagttgtcaaggctgaaaaaagcaagaaaaagaaggaagaggaggaagatgaggaagatgaagaggatgaggaggaggaggaagatgaagaagatgaagatgaagaagaagatgatgatgatgaataagttggttctagcgcagttttttttttcttgtctataaagcatttaacccccctgtacacaactcactccttttaaagaaaaaaattgaaatgtaaggctgtgtaagatttgtttttaaactgtacagtgtctttttttgtatagttaacacactaccgaatgtgtctttagatagccctgtcctggtggtattttcaatagccactaaccttgcctggtacagtatgggggttgtaaattggcatggaaatttaaagcaggttcttgttggtgcacagcacaaattagttatatatggggatggtagttttttcatcttcagttgtctctgatgcagcttatacgaaataattgttgttctgttaactgaataccactctgtaattgcaaaaaaaaaaaaaaaagttgcagctgttttgttgacattctgaatgcttctaagtaaatacaatttttttattagtattgttgtccttttcataggtctgaaatttttcttcttgaggggaagctagtcttttgcttttgcccattttgaatcacatgaattattacagtgtttatcctttcatatagttagctaataaaaagcttttgtctacccaccctgcatatcataatgggggtaaagttaagttgagatagttttcatccataactgaacatccaaaatcttgatcagttaagaaatttcacatagcccacttacatttacaaactgaagagtaatcaatctactcaaagcatgggattactagaatcaaacattttgaaagtctgtccttgaaggactaatagaaaagtatgttctaacctttacatgaggactctattctttaactcccattaccatgtaatggcagttatattttgcagttcccacattaaagaagacctgagaatgtatccccaaaagcgtgagcttaaaatacaagactgccatattaaattttttgttgacattagtctcagtgaagactatgaaaatgctggctatagatgtcttttcccatttatctaaatatggactgctcaggaaacgagactttccattacaagtatttttaattaattgggccagcttttcaaacaaagatgccacattcaaaatagggtatattttcctatattacggtttgcccctttataaatccaagtagataggaagaaagaagacaaactttgcatctcagtatgaattattcaatttatttgaatgatttttctttacaaaacaaactcattcattagtcatgtttatctgcttaggagtttagggaacaatttggcaattttgtggttttcgagattatcgttttcttaaagtgccagtattttaaaatagcgttcttgtaattttacacgcttttgtgatggagtgctgttttgttatataatttagacttggattctttccatttgcatttgtttatgtaatttcaggaggaatactgaacatctgagtcctggatgatactaataaactaataattgcagaggttttaaatactagttaaatggctttcacttaagaacttaagattttgttacatatttttaaatcttgtttctaataatacctcttagcagtaccttttaaataagtataagggatggcaaagtttttccctttaaaaatactcactttatgcttataaataggttaatgggctgataaaaggttttgtcaaacattgcaagtattcggtgctatatataaaggaggaaaaactagttttactttcagaatgatttaaacaagatttttaaaaacaagatacatgcaagcgaacagcagggttagtgataggctgcaattgtgtcgaacatcagattttttgttaagaggagcaaatgactcaatctgatttagatggaagtttctactgtatagaaatcaccattaatcaccaacattaataattctgatccatttaaaatgaattctggctcaaggagaatttgtaacttt

SEQ ID NO: 1614 - DNA, 1305 bp, Homo sapiens
gaggaacagggtcagctttctgcacccagccctgtcaggtaccaaacccaactgtcttgaatcagagacgaacaggaccaaaggaggtgagtttcaacacccaaactaagaagccgaaggaggcgcagggtccgttaaccctgcccatctccacgctccttggaaaacgaaaacaaactctggtttctcttcagcgttcacctctctgcgcccaaacggatctaaaaataactaaacatgggcaaaggagatcctaagaagccgagaggcaaaatgtcatcatatgcattttttgtgcaaacttgtcgggaggagcataagaagaagcacccagatgcttcagtcaacttctcagagttttctaagaagtgctcagagaggtggaagaccatgtctgctaaagagaaaggaaaatttgaagatatggcaaaagcggacaaggcccgttatgaaagagaaatgaaaacctatatccctcccaaaggggagacaaaaaagaagttcaaggatcccaatgcacccaagaggcctccttcggccttcttcctcttctgctctgagtatcgcccaaaaatcaaaggagaacatcctggcctgtccattggtgatgttgcgaagaaactgggagagatgtggaataacactgctgcagatgacaagcagccttatgaaaagaaggctgcgaagctgaaggaaaaatacgaaaaggatattgctgcatatcgagctaaaggaaagcctgatgcagcaaaaaagggagttgtcaaggctgaaaaaagcaagaaaaagaaggaagaggaggaagatgaggaagatgaagaggatgaggaggaggaggaagatgaagaagatgaagatgaagaagaagatgatgatgatgaataagttggttctagcgcagttttttttttcttgtctataaagcatttaacccccctgtacacaactcactccttttaaagaaaaaaatttatagttaacacactaccgaatgtgtctttagatagccctgtcctggtggtattttcaatagccactaaccttgcctggtacagtatgggggttgtaaattggcatggaaatttaaagcaggttcttgttggtgcacagcacaaattagttatatatggggatggtagttttttcatcttcagttgtctctgatgcagcttatacgaaataattgttgttctgttaactgaataccactctgtaattgcaaaaaaaaaaaaacataggtctgaaatttttcttcttgaggggaagctagtcttttgcttttgcccattttgaatcacatgaatt

SEQ ID NO: 1615 - DNA, 1305 bp, Homo sapiens; identical to SEQ ID NO: 1614

SEQ ID NO: 1616 - DNA, 1305 bp, Homo sapiens; identical to SEQ ID NO: 1614

SEQ ID NO: 1617 - DNA, 1305 bp, Homo sapiens; identical to SEQ ID NO: 1614

SEQ ID NO: 1618 - DNA, 1331 bp, Homo sapiens
gaggaacagggtcagctttctgcacccagccctgtcaggtaccaaacccaactgtcttgaatcagagacgaacaggaccaaaggaggtgagtttcaacacccaaactaagaagccgaaggaggcgcagggtccgttaaccctgcccatctccacgctccttggaaaacgaaaacaaactctggtttctcttcagcgttcacctctctgcgcccaaacggatctaaaaataactaaacatgggcaaaggagatcctaagaagccgagaggcaaaatgtcatcatatgcattttttgtgcaaacttgtcgggaggagcataagaagaagcacccagatgcttcagtcaacttctcagagttttctaagaagtgctcagagaggtggaagaccatgtctgctaaagagaaaggaaaatttgaagatatggcaaaagcggacaaggcccgttatgaaagagaaatgaaaacctatatccctcccaaaggggagacaaaaaagaagttcaaggatcccaatgcacccaagaggcctccttcggccttcttcctcttctgctctgagtatcgcccaaaaatcaaaggagaacatcctggcctgtccattggtgatgttgcgaagaaactgggagagatgtggaataacactgctgcagatgacaagcagccttatgaaaagaaggctgcgaagctgaaggaaaaatacgaaaaggatattgctgcatatcgagctaaaggaaagcctgatgcagcaaaaaagggagttgtcaaggctgaaaaaagcaagaaaaagaaggaagaggaggaagatgaggaagatgaagaggatgaagatgaagaagaagatgatgatgatgaataagttggttctagcgcagttttttttttcttgtctataaagcatttaacccccctgtacacaactcactccttttaaagaaaaaaattgaaatgtaaggctgtgtaagatttgtttttaaactgtacagtgtctttttttgtatagttaacacactaccgaatgtgtctttagatagccctgtcctggtggtattttcaatagccactaaccttgcctggtacagtatgggggttgtaaattggcatggaaatttaaagcaggttcttgttggtgcacagcacaaattagttatatatggggatggtagttttttcatcttcagttgtctctgatgcagcttatacgaaataattgttgttctgttaactgaataccactctgtaattgcaaaaaaaaaaaaacataggtctgaaatttttcttcttgaggggaagctagtcttttgcttttgcccattttgaatcacatgaatt

SEQ ID NO: 1619 - DNA, 1305 bp, Homo sapiens; identical to SEQ ID NO: 1614

SEQ ID NO: 1620 - DNA, 2288 bp, Homo sapiens
gggccttcatagccacaaaaggtcttttggtgccagccgacagtgggcatgcgcccccctgccccacgccgccctttcctgggtgccaagctctttccaagcgacatttgcgtccatctgggctgcctcgtcctagcctggctgctcaagctctaactaaggcagcctctggcctccctccccaggcccagggcaggagctggctgctggccagcggttgtcttctgggtcggtgggggtggagtctggctggtctgtcctccaccctttccgcctcctggcaagtcctgagctgcacctcattgcccggccaaagggcagagacacgagcgactgggggcacctctggtgaccaagaccgggctgcgctccaaagaggccgttgggcctggagtggggttggggggtccgagaggagttgggtgacatcccccaccccatcccgggtccagctgtttcagcccctctcggcgcgccgatactattagccccacccgtcctccatcgagtcccgtgccgctcccaaaccgcacgataagccccacagggagtgcgccataggccggggcgcgtcacggggccggggcggggcggagtccggacgtcgggagcaggatggcggcggagcaggaccccgaggcgcgcgcggcggcgcggccgctgctcactgacctctaccaggccaccatggcgttgggctattggcgcgcgggccgggcgcgggacgccgccgagttcgagctcttcttccgccgctgcccgttcggcggcgccttcgccttggccgccggcttgcgcgactgtgtgcgcttcctgcgcgccttccgcctgcgggacgccgacgtgcagttcctggcctcggtgctgcccccagacacggatcctgcgttcttcgagcaccttcgggccctcgactgctccgaggtgacggtgcgagccctgcccgagggctccctcgccttccccggagtgccgctcctgcaggtgtccgggccgctcctggtggtgcagctgctggagacaccgctgctctgcctggtcagctacgccagcctggtggccaccaacgcagcgcggcttcgcttgatcgcagggccagagaagcggctgctagagatgggcctgaggcgggctcagggccccgatgggggcctgacagcctccacctacagctacctgggcggcttcgacagcagcagcaacgtgctagcgggccagctgcgaggtgtgccggtggccgggaccctggcccactccttcgtcacttccttttcaggcagcgaggtgccccctgacccgatgttggcgccagcagctggtgagggccctggggtggacctggcggccaaagcccaggtgtggctggagcaggtgtgtgcccacctggggctgggggtgcaggagccgcatccaggcgagcgggcagcctttgtggcctatgccttggcttttccccgggccttccagggcctcctggacacctacagcgtgtggaggagtggtctccccaacttcctagcagtcgccttggccctgggagagctgggctaccgggcagtgggcgtgaggctggacagtggtgacctgctacagcaggctcaggagatccgcaaggtcttccgagctgctgcagcccagttccaggtgccctggctggagtcagtcctcatcgtagtcagcaacaacattgacgaggaggcgctggcccgactggcccaggagggcagtgaggtgaatgtcattggcattggcaccagtgtggtcacctgcccccaacagccttccctgggtggtgtctataagctggtggccgtggggggccagccacgaatgaagctgaccgaggaccccgagaagcagacgttgcctgggagcaaggctgctttccggctcctgggctctgacgggtctccactcatggacatgctgcagttagcagaagagccagtgccacaggctgggcaggagctgagggtgtggcctccaggggcccaggagccctgcaccgtgaggccagcccaggtggagccactactgcggctctgcctccagcagggacagctgtgtgagccgctcccatccctggcagagtctagagccttggcccagctgtccctgagccgactcagccctgagcacaggcggctgcggagccctgcacagtaccaggtggtgctgtccgagaggctgcaggccctggtgaacagtctgtgtgcggggcagtccccctgagactcggagcggggctgactggaaacaacacgaatcactcacttttccccacagct

SEQ ID NO: 1621 - DNA, 2288 bp, Homo sapiens; identical to SEQ ID NO: 1620

SEQ ID NO: 1622 - DNA, 1666 bp, Homo sapiens
actcggctccggccggctcggtctcccgcgcttctgcgaccgccgaggcgaacatggcttcaggagtgcaagttgctgatgaagtatgtcgcattttttatgacatgaaagttcggaagtgctccacaccagaagaaatcaagaaaagaaagaaggctgtcattttttgtctcagtgcagacaaaaagtgcatcattgtagaagaaggcaaagagatcttagttggagatgttggtgtaaccataaccgatcctttcaagcatttcgtggggatgcttcctgagaaagattgtcgctatgctttgtatgatgcaagctttgaaaccaaggaatccagaaaagaggagttgatgttttttctgtgggcaccagaactagcacctctgaaaagtaaaatgatctatgccagctccaaggacgcaatcaaaaagaaatttcaaggcataaaacatgaatgtcaagcaaatgggccagaagacctcaatcgggcttgtattgctgaaaagctaggtggatccttaattgtagcctttgaaggatgccctgtgtagatgatcattcagtgccacagatcgaaagcttccgtgttcaatgttatcctcttgctatataagtaaagcaaacactgaggccagggactcactgaggggagctgtcttgtcatttgttagagtaaactaactattctatgaacatgtgcacatggccctaaatcaatctaaactctactttttttgggggtgtgtgtgaaagtcttattggccaaaatatctattttgatgagtctgcttgtagagatttttgttaagctcatgatttttaatcgtttcaacgtgtggttcattaaacaatgcaaggccagatgaagagaattattgcatctttgttaacttcagcagttactttgtttcttttgcttagagaattggtcataatcagttatattggtcatataattttggcccaaattcttgagtctctgctgagctaacctgaataatggaaaataattctactcacaacaggtaacagcactaatatgctaactacagtaagattaaatcaggccagattctaccagacgtggatactgcctccaaaactgtgtgcacttagaaccagcgctgagcttgcaaagcactatttcaagcacgtagttgaaacacagcaaacagctcctgcacttgaagtgagctgcttgctcactagtcagaaggctgtacagagagtgaccttgcatcttggaaatcagaacatgtactgtcttgtaccaactaattagagtacaaattagggctccgttgtaatatgctttattagtggaaatggtaagatggtatatcaacaagctgggtacctatgctatctttaatttatctcctttggaactgtgttgcttctggtacagtaaggtgtagaagaacattctgtttactctggggcctgggagaacctctttaccttcctagagcagtttgccgactgtatgtgatacggggaccagctatgacggcagcatccacaggaagccactgcctgatgacacttggaagtgattgtctttaacatcacaggcataacactctgaacagtatagagatgcaccaacagttgaatttagaagtagcagtactggctttacgtaataaaggaaccattttaactt

SEQ ID NO: 1623 - DNA, 1721 bp, Homo sapiens
ggtaagctcgcgccgccgcgtcagctcagcgctgggtctctcggtcccgcagccgtgaggaggacggtctgcatactcgctgcccgccggctccctcccccgcgtccctgcgaccgccgcggcgaagatggcctcaggagtgcaagtagctgatgaagtatgtcgcattttttatgacatgaaagttcgtaaatgctccacaccagaagaaatcaagaaaagaaagaaggctgtcattttttgtctcagtgcagacaaaaagtgcatcattgtagaagaaggcaaagagatcttggttggagatgttggtgtaaccataactgatcctttcaagcattttgtgggaatgcttcctgaaaaagattgtcgctatgctttgtatgatgcaagctttgaaacaaaagaatccagaaaagaagagttgatgttttttttgtgggcaccagaactagcacctctgaaaagtaaaatgatctatgcaagctccaaggatgcaattaaaaagaaatttcaaggcataaaacatgaatgtcaagcaaatggaccagaagatctcaatcgggcttgtattgctgaaaagttaggtggatccttaattgtagcctttgaaggatgccctgtgtagattattcagtgccacaaattgaaagcttccatgtttaatgttatcctcttgctatataaataaagcaaatatatttaggccagggtctcactgagggggagctgtcttgtcatcttttagagtaaactattctataaacatatgcaaacagccctaaataaatctaaagtctaaagttttattgatgtgaaattaaattcttattggccaaatgcctgttttgatgagttgatttataaagatttttgttaagctcaggattttaaattacacagttcacaaacagtaaaggccatgtgaagagaattattacatctttattaacctcagcatttactttgtttcttttgcttaggaaattgctcataatctggttataattttggtccaaattctttattcttccttgagctaagcagaataatggaatataatatgtcttcataatataacaacactaatacactaatagtaagattaagttaggcagtcttctaccaaatgtgtaatggagattgcctcaaaattgtgtccacataatccacgctcatcttgcaaagcgctatttcaggcacatcattggaatacaggaagtagccctgcacctgccagtgagctcgccattcactgattggaagagtgacctggcatcttggaaatcattgtgtgtcttcaggagaatgtgcagtgtcttgtaacaactaattataatgcaaattagggctacattgtaatctgctttgttaatgaaaatgataaaacagaatattgacaagctaggacacctgtggtatctttaattgtatctccttcagaagtttgcttcttatggtataataaagtatggaagaatattgagtatatgtttactctgggcctgggagaacttaactttctagagcagtttgttgacttgtgtgcaatggggagaggtaccatgatgacactcacagggagccactgttcactgacacttggaagcggtcattgttaatatcacgggcgtaacactttgaacgatatagagatgcacaaacagttgaacttagaagtagcagtattggctttatgtaataaaggaagcatttttgactta

SEQ ID NO: 1624 - DNA, 1721 bp, Homo sapiens; identical to SEQ ID NO: 1623

SEQ ID NO: 1625 - DNA, 1422 bp, Homo sapiens
cggtctgcatactcgctgcccgccggctccctcccccgcgtccctgcgaccgccgcggcgaacataggcctcaggagtgcaagtagctgatgaagtatgtcgcattttttatgacatgaaagttcgtaaatgctccacaccagaagaaatcaagaaaagaaagaaggctgtcattttttgtctcagtgcagacaaaaagtgcatcattgtagaagaaggcaaagagatcttggttggagatgttggtgtaaccataactgatcctttcaagcattttgtgggaatgcttcctgaaaaagattgtcgctatgctttgtatgatgcaagctttgaaacaaaagaatccagaaaagaagagttgatgttttttttgtgggcaccagaactagcacctctgaaaagtaaaatgatctatgcaagctccaaggatgcaattaaaaagaaatttcaaggcataaaacatgaatgtcaagcaaatggaccagaagatctcaatcgggcttgtattgctgaaaagttaggtggatccttaattgtagcctttgaaggatgccctgtgtagattattcagtgccacaaattgaaagcttccatgtttaatgttatcctcttgctatataaataaagcaaatatatttaggccagggtctcactgagggggagctgtcttgtcatcttttagagtaaactattctataaacatatgcaaacagccctaaataaatctaaagtctaaagttttattgatgtgaaattaaattcttattggccaaatgcctgttttgatgagttgatttataaagatttttgttaagctcaggattttaaattacacagttcacaaacagtaaaggccatgtgaagagaattattacatctttattaacctcagcatttactttgtttcttttgcttaggaaattgctcataatctggttataattttggtccaaattctttattcttccttgagctaagcagaataatggaatataatatgtcttcataatataacaacactaatacactaatagtaagattaagttaggcagtcttctaccaaatgtgtaatggagattgcctcaaaattgtgtccacataatccacgctcatcttgcaaagcgctatttcaggcacatcattggaatacaggaagtagccctgcacctgccagtgagctcgccattcactgattggaagagtgacctggcatcttggaaatcattgtgtgtcttcaggagaatgtgcagtgtcttgtaacaactaattataatgcaaattaggccactgttcactgacacttggaagcggtcattgttaatatcacgggcgtaacactttgaacgatatagagatgcacaaacagttgaacttagaagtagcagtattggctttatgtaataaaggaagcatttttgactt

SEQ ID NO: 1626 - DNA, 5289 bp, Homo sapiens
atacagaattcgttgttgggaaggactggggaaacagctgtaacatttgccaccctcagaagctgctggtcctgtgtcacaccaccttagcctcttgatcgaggaagattctcgctgaagtctgttaattctactttttgagtacttatgaataaccacgtgtcttcaaaaccatctaccatgaagctaaaacataccatcaaccctattcttttatattttatacattttctaatatcactttatactattttaacatacattccgttttattttttctccgagtcaagacaagaaaaatcaaaccgaattaaagcaaagcctgtaaattcaaaacctgattctgcatacagatctgttaatagtttggatggtttggcttcagtattataccctggatgtgatactttagataaagtttttacatatgcaaaaaacaaatttaagaacaaaagactcttgggaacacgtgaagttttaaatgaggaagatgaagtacaaccaaatggaaaaatttttaaaaaggttattcttggacagtataattggctttcctatgaagatgtctttgttcgagcctttaattttggaaatggattacagatgttgggtcagaaaccaaagaccaacatcgccatcttctgtgagaccagggccgagtggatgatagctgcacaggcgtgttttatgtataattttcagcttgttacattatatgccactctaggaggtccagccattgttcatgcattaaatgaaacagaggtgaccaacatcattactagtaaagaactcttacaaacaaagttgaaggatatagtttctttggtcccacgcctgcggcacatcatcactgttgatggaaagccaccaacctggtccgagttccccaagggcatcattgtgcataccatggctgcagtggaggccctgggagccaaggccagcatggaaaaccaacctcatagcaaaccattgccctcagatattgcagtaatcatgtacacaagtggatccacaggacttccaaagggagtcatgatctcacatagtaacattattgctggtataactgggatggcagaaaggattccagaactaggagaggaagatgtctacattggatatttgcctctggcccatgttctagaattaagtgctgagcttgtctgtctttctcacggatgccgcattggttactcttcaccacagactttagcagatcagtcttcaaaaattaaaaaaggaagcaaaggggatacatccatgttgaaaccaacactgatggcagcagttccggaaatcatggatcggatctacaaaaatgtcatgaataaagtcagtgaaatgagtagttttcaacgtaatctgtttattctggcctataattacaaaatggaacagatttcaaaaggacgtaatactccactgtgcgacagctttgttttccggaaagttcgaagcttgctagggggaaatattcgtctcctgttgtgtggtggcgctccactttctgcaaccacgcagcgattcatgaacatctgtttctgctgtcctgttggtcagggatacgggctcactgaatctgctggggctggaacaatttccgaagtgtgggactacaatactggcagagtgggagcaccattagtttgctgtgaaatcaaattaaaaaactgggaggaaggtggatactttaatactgataagccacaccccaggggtgaaattcttattgggggccaaagtgtgacaatggggtactacaaaaatgaagcaaaaacaaaagctgatttctttgaagatgaaaatggacaaaggtggctctgtactggggatattggagagtttgaacccgatggatgcttaaagattattgatcgtaaaaaggaccttgtaaaactacaggcaggggaatatgtttctcttgggaaagtagaggcagctttgaagaatcttccactagtagataacatttgtgcatatgcaaacagttatcattcttatgtcattggatttgttgtgccaaatcaaaaggaactaactgaactagctcgaaagaaaggacttaaagggacttgggaggagctgtgtaacagttgtgaaatggaaaatgaggtacttaaagtgctttccgaagctgctatttcagcaagtctggaaaagtttgaaattccagtaaaaattcgtttgagtcctgaaccgtggacccctgaaactggtctggtgacagatgccttcaagctgaaacgcaaagagcttaaaacacattaccaggcggacattgagcgaatgtatggaagaaaataattattctcttctggcatcagtttgctacagtgagctcagatcaaataggaaaatacttgaaatgcatgtctcaagctgcaaggcaaactccattcctcatattaaactattacttctcatgacgtcaccatttttaactgacaggattagtaaaacattaagacagcaaacttgtgtctgtctcttctttcattttccccgccaccaacttactttaccacctatgactgtacttgtcagtatgagaatttttctgaatcatattggggaagcagtgattttaaaacctcaagtttttaaacatgatttatatgttctgtataatgttcagtttgtaactttttaaaagtttggatgtatagagggataaataggaaatataagaattggttatttgggggcttttttacttactgtatttaaaaatacaagggtattgatatgaaattatgtaaatttcaaatgcttatgaatcaaatcattgttgaacaaaagatttgttgctgtgtaattattgtcttgtatgcatttgagagaaataaatatacccatacttatgttttaagaagttgagatcttgtgaatatatgcctgtcagtgtcttctttatatatttattttttattagaaaaaatgaagtttggttggtgatgcatgaaacaaaatagcaagagagggttatagtttaatagtaagggagataacacagcatgtgtagcaccagttgataattggtctctagtagcttactgtcaaaatgttcaatgaagtcttctgttcatctgttgaaactaggaaaatacccaaacttaaatggaagaattctgaaagagaggatagaatttaaagaacaagagtatataaagttattctttgaatatttcgttgactatatgtacattgagttatctatatttgtaaacaaattagtcatggaaaattattctatcccaaagtctccttttagtctagataatcattatttcattttaaaattagtgtttttcatagtttgcactgatgcgtgtatggatgtgtgtgagtcagtggtagcttatttaaaaagcaccttatcctttctcccataacctttgtacactaaaaaatgaaagaatttagaatgtatttgatgatagcattctcactaagacacatgagaatttaactttataaccgcgtgagttaagatttaattcataggttttgatgtcattgttgaagttatttgtaattcagaaaccttgcttgtgtgatacatagtaagtctcttcatttattactgcttgtctgttgttatatctggattatcaaaagcaatagtgcaccaattaagatgtgctcaaatcaggacttaaatcataggcaccacatttttcatgtcagactagttactttgttgattctcagttactgtaggcatcaaaaggcaaaaatcaaaaaaaaaaaaacaaaaaaaacaaaaaaaaagatgaacctaggtctgtgtaaagtaaggggagtgttaggagcagccaggactgtgtagtgtgtgtttggttgcatcacaaacatcgtatgtggagacattgcaatacagtgttttttgttttcaacttttcttgtattcttgtatatttgtattatgttttgaatgcttttctcttttcataattaaatattaatgtttgggataactgccaagaagaagtaaaaatattgaatggaacttctatatgaggatgctgtgatctaaaaattaaatctcagtgggcggagagaatttgtttctgatgccttgtctttagaataattgtttgctttcagatgattaaaaaaaggagattgtatctaggaaaaaagtgtgaatgcttcaaaggagagatactgataattgtgacttgaaatagtgtcagatgaattatgtagctgatcactgatggaaccatctaatgaggcaggcttaaactctatttagtttcgtttgttttctcatatgaagtttataattcctttcagtcctaaaatgtcagatgccaggtgtcaaatgccacagtagaaacgtgaaattaagtagagtccccttttaaacaaatttctctgtaagcaaaactatctttagtgacttaaaaaataatatcctctaaaattaccctttcaagaggaaaaaactgttcaatgaaaaaaccactcaattatgactcatataagaaatactggtttaaccaggagatatttggggagcaaaattttaaggaatttcaaattgctaaatctaatacaaatatctgacaataagatacagatctaaaagaatggttcttaagaactattgtttactgggaataaactaagctctatgaagaattcgtaagcattacatgttccagtaagtttagcaacttagagccaagactggtggccacctccatttatttccccactgctcctccactgacatccttcttagcagaaacttcatgaaaaagtttttgctgacacagaacaaacctgaaagtagtatctactttctaaatactactttgcttttcagtagtggatttgatatttataatgttctctaaagcttgcaactttttcagcaacgtttaaaaatagattaacctggaataacttacttgtttgctgctaaaatactcaagattttgccatttttaaacaaccagtccctgtgatacaactttgaaaaaacttttaaaaatctctgatgtatgggctctttttttcccataagaattatgtacatctgtgatgttttacagggggatccgcttttaaacagtgtacatattggaccacactgaaatgtcatatatcctttctctacttaaaattggttatttactgtgagttcatttccgatgtgttcttggttgttgctgttttctgcctgaagacgtgtatcataaagagctacatggtatggactatttatttgtaatttgacataaagtttgaagaataaagatctataaaagttga

SEQ ID NO: 1627 - DNA, 5289 bp, Homo sapiens; identical to SEQ ID NO: 1626

SEQ ID NO: 1628 - DNA, 4369 bp, Homo sapiens
gtcccaggcggttccgctcaacagacgctgctgtggctgcgccgggctgcgacactgcagttgtctacgcggccggggccgggacgaggaggcgttggacggggtcgcatacgttcgtcccctcgcattgcggccccgacagctgcgccaggatccccgggcggcggcgcggggcgtgaacgctctggggctcagccaggcctgcgcgggcccgaggccggaggaacccggactccggcgtagcggttttgacacaagggcgcatatcttcaaagcacctagtacctcctaccattgtcaactgatacagaattcgttgttgggaaggactggggaaacagctgtaacatttgccaccctcagaagctgctggtcctgtgtcacaccaccttagcctcttgatcgaggaagattctcgctgaagtctgttaattctactttttgagtacttatgaataaccacgtgtcttcaaaaccatctaccatgaagctaaaacataccatcaaccctattcttttatattttatacattttctaatatcactttatactattttaacatacattccgttttattttttctccgagtcaagacaagaaaaatcaaaccgaattaaagcaaagcctgtaaattcaaaacctgattctgcatacagatctgttaatagtttggatggtttggcttcagtattataccctggatgtgatactttagataaagtttttacatatgcaaaaaacaaatttaagaacaaaagactcttgggaacacgtgaagttttaaatgaggaagatgaagtacaaccaaatggaaaaatttttaaaaaggttattcttggacagtataattggctttcctatgaagatgtctttgttcgagcctttaattttggaaatggattacagatgttgggtcagaaaccaaagaccaacatcgccatcttctgtgagaccagggccgagtggatgatagctgcacaggcgtgttttatgtataattttcagcttgttacattatatgccactctaggaggtccagccattgttcatgcattaaatgaaacagaggtgaccaacatcattactagtaaagaactcttacaaacaaagttgaaggatatagtttctttggtcccacgcctgcggcacatcatcactgttgatggaaagccaccgacctggtccgagttccccaagggcatcattgtgcataccatggctgcagtggaggccctgggagccaaggccagcatggaaaaccaacctcatagcaaaccattgccctcagatattgcagtaatcatgtacacaagtggatccacaggacttccaaagggagtcatgatctcacatagtaacattattgctggtataactgggatggcagaaaggattccagaactaggagaggaagatgtctacattggatatttgcctctggcccatgttctagaattaagtgctgagcttgtctgtctttctcacggatgccgcattggttactcttcaccacagactttagcagatcagtcttcaaaaattaaaaaaggaagcaaaggggatacatccatgttgaaaccaacactgatggcagcagttccggaaatcatggatcggatctacaaaaatgtcatgaataaagtcagtgaaatgagtagttttcaacgtaatctgtttattctggcctataattacaaaatggaacagatttcaaaaggacgtaatactccactgtgcgacagctttgttttccggaaagttcgaagcttgctagggggaaatattcgtctcctgttgtgtggtggcgctccactttctgcaaccacgcagcgattcatgaacatctgtttctgctgtcctgttggtcagggatacgggctcactgaatctgctggggctggaacaatttccgaagtgtgggactacaatactggcagagtgggagcaccattagtttgctgtgaaatcaaattaaaaaactgggaggaaggtggatactttaatactgataagccacaccccaggggtgaaattcttattgggggccaaagtgtgacaatggggtactacaaaaatgaagcaaaaacaaaagctgatttctttgaagatgaaaatggacaaaggtggctctgtactggggatattggagagtttgaacccgatggatgcttaaagattattgatcgtaaaaaggaccttgtaaaactacaggcaggggaatatgtttctcttgggaaagtagaggcagctttgaagaatcttccactagtagataacatttgtgcatatgcaaacagttatcattcttatgtcattggatttgttgtgccaaatcaaaaggaactaactgaactagctcgaaagaaaggacttaaagggacttgggaggagctgtgtaacagttgtgaaatggaaaatgaggtacttaaagtgctttccgaagctgctatttcagcaagtctggaaaagtttgaaattccagtaaaaattcgtttgagtcctgaaccgtggacccctgaaactggtctggtgacagatgccttcaagctgaaacgcaaagagcttaaaacacattaccaggcggacattgagcgaatgtatggaagaaaataattattctcttctggcatcagtttgctacagtgagctcagatcaaataggaaaatacttgaaatgcatgtctcaagctgcaaggcaaactccattcctcatattaaactattacttctcatgacgtcaccatttttaactgacaggattagtaaaacattaagacagcaaacttgtgtctgtctcttctttcattttccccgccaccaacttactttaccacctatgactgtacttgtcagtatgagaatttttctgaatcatattggggaagcagtgattttaaaacctcaagtttttaaacatgatttatatgttctgtataatgttcagtttgtaactttttaaaagtttggatgtatagagggataaataggaaatataagaattggttatttgggggcttttttacttactgtatttaaaaatacaagggtattgatatgaaattatgtaaatttcaaatgcttatgaatcaaatcattgttgaacaaaagatttgttgctgtgtaattattgtcttgtatgcatttgagagaaataaatatacccatacttatgttttaagaagttgagatcttgtgaatatatgcctgtcagtgtcttctttatatatttattttttattagaaaaaatgaagtttggttggtgatgcatgaaacaaaatagcaagagagggttatagtttaatagtaagggagataacacagcatgtgtagcaccagttgataattggtctctagtagcttactgtcaaaatgttcaatgaagtcttctgttcatctgttgaaactaggaaaatacccaaacttaaatggaagaattctgaaagagaggatagaatttaaagaacaagagtatataaagttattctttgaatatttcgttgactatatgtacattgagttatctatatttgtaaacaaattagtcatggaaaattattctatctcaaagtctccttttagtctagataatcattatttcattttaaaattagtgtttttcctagtttgcactgatgcgtgtatggatgtgtgtgagtcagtggtagcttatttaaaaagcaccttatcctttctcccataacctttgtacactaaaaaatgaaagaatttagaatgtatttgatgatagcattctcactaagacacatgagaatttaactttataaccgcgtgagttaagatttaattcataggttttgatgtcattgttgaagttatttgtaattcagaaaccttgcttgtgtgatacatagtctcttcatttattactgcttgtctgttgttatatctggattatcaaaagcaatagtgcaccaattaagatgtgctcaaatcaggacttaaatcataggcaccacatttttcatgtcagactagttactttgttgattctcagttactgtaggcatcaaaaggcaaaaatcaaaaaaaaaaaaaacaaaaacaaaaaaaaagatgaacctaggtctgtgtaaagtaaggggagtgttaggagcagccaggactgtgtagtgtgtgtttggttgcatcacaaacatcgtatgtggagacattgcaatacagtgttttttgttttcaacttttcttgtattgtatatttgtattatgttttgaatgcttttctcttttcataattaaatattaatgtttgggataactgccaagaagaagtaaaaatattgaatggaacttctatatgaggatgctgtgatctaaaaattaaatctcagtgggcggagaaaaaaaaa

SEQ ID NO: 1629 - DNA, 5289 bp, Homo sapiens; identical to SEQ ID NO: 1626

SEQ ID NO: 1630 - DNA, 1890 bp, Homo sapiens
tcggtggttagtttctgcgacttgtgttgggactggtgagtgtgggcagtgcggcccctgcggagtgaggcgcggcgcgcccttcttgcctgttgcctcttcctcctcctgtccggggcccgcccgcgctcgggtgggggtgctgtgatgcgtgaggcagccgggggaggcccggagtccgagactgcttgagcgctgcgcacacccctctcgtgggccccccacgtaggtgcgggaacctggttgaaccccaaggcaagcgtggactcgagtcgagtcttcccccggcaactcgagcacgtggcgcggcgtctgggcgggctggtggtgggggtctccgagactagcctcctgccggacggggtgggttcgggaagcttctggaatggacctgtatccagactcgtggctgtagaagacagcctctatgtatttggctgttccgggtcctgagccttgactagctgcggagcttcggctgataggaagatgtcttcaggaaatgctaaaattgggcaccctgcccccaacttcaaagccacagctgttatgccagatggtcagtttaaagatatcagcctgtctgactacaaaggaaaatatgttgtgttcttcttttaccctcttgacttcacctttgtgtgccccacggagatcattgctttcagtgatagggcagaagaatttaagaaactcaactgccaagtgattggtgcttctgtggattctcacttctgtcatctagcatgggtcaatacacctaagaaacaaggaggactgggacccatgaacattcctttggtatcagacccgaagcgcaccattgctcaggattatggggtcttaaaggctgatgaaggcatctcgttcaggggcctttttatcattgatgataagggtattcttcggcagatcactgtaaatgacctccctgttggccgctctgtggatgagactttgagactagttcaggccttccagttcactgacaaacatggggaagtgtgcccagctggctggaaacctggcagtgataccatcaagcctgatgtccaaaagagcaaagaatatttctccaagcagaagtgagcgctgggctgttttagtgccaggctgcggtgggcagccatgagaacaaaacctcttctgtattttttttttccattagtaaaacacaagacttcagattcagccgaattgtggtgtcttacaaggcaggcctttcctacagggggtggaatgtattagtagagcaacccattaatcttttgtagtttgtattaaacttgaactgagaccttgatgagtctttattttaggaagcatattattagcttttgattttaagaggaatttactccttgctttccctgttttggggaaaatgaggagagctgcctccaaatcagggaattatattgacacaggtagatatagggaatggaactgaatgaacccaaggtgttacattttgtttcactacacatgagggagaagaataagccctgctatagtgttggccagagcactgcgactgacgccacaggctgggttaccagttaaagtctcagtgtgactacttggacacctatttttgtttagacacactattcaaagggctgcatgggaaccagaagcttggcctcttctgataaatgcctggtacctgctatgtaaaagagctggaggtttctgttctttttgaactgacagaggaaagaggaagacaaggctggtggccttgggtagggctttcagtagttgcacagtactgggcaattcttagccttcccttggttctagccttgattagagatagtcttttttagtgtcattatgttgcccagagtggttctgaattccttgcctcaggtggtcctccgcctcagc

SEQ ID NO: 1631 - DNA, 1890 bp, Homo sapiens; identical to SEQ ID NO: 1630

SEQ ID NO: 1632 - DNA, 1890 bp, Homo sapiens; identical to SEQ ID NO: 1630

SEQ ID NO: 1633 - DNA, 1890 bp, Homo sapiens; identical to SEQ ID NO: 1630

SEQ ID NO: 1634 - DNA, 1890 bp, Homo sapiens; identical to SEQ ID NO: 1630

SEQ ID NO: 1635 - DNA, 852 bp, Homo sapiens
aactttgagacttgggatagactctgataggaagatgtcttcaggaaatgctaaaattgggcaccctgcccccaacttcaaagccacagctgttatgccagatggtcagtttaaagatatcagcctgtctgactacaaaggaaaatatgttgtgttcttcttttaccctcttgacttcacctttgtgtgccctacggagatcattgctttcagtgatagggcagaagaatttaagaaactcaactgccaagtgattggtgcttctgtggattctcacttctgtcatctagcatgggtcaatacacctaagaaacaaggaggactgggacccatgaacattcctttggtatcagacccgaagcgcaccattgctcaggattatggggtcttaaaggctgacgaaggcatctcgttcaggggcctttttatcattgatgataagggtattcttcggcagatcactgtaaatgacctccctgttggccgctctgtggatgagactttgagactagttcaggccttccagttcactgacaaacatggggaagtgtgcccagctggctggaaacctggcagtgataccatcaagcctgatgtccaaaagagcaaagaatatttctccaagcagaagtgagcgctgggctgttatagtgccaggctgcggtgggcagccatgagaacaaaacctcttctgtatttttttttttccattagtaaaacacaagacttcagattcagccgaattgtggtgtcttacaaggcaggccttttctacagggggtggagagaccagcctttcttcctttggtaggaatggcctgagttggcgttgtgggcaggctactggtttgt

SEQ ID NO: 1636 - DNA, 1890 bp, Homo sapiens; identical to SEQ ID NO: 1630

SEQ ID NO: 1637 - DNA, 1684 bp, Homo sapiens
atagaggccaggtgcggtggctcgcgcttacattcctagcactttgggaggccaaggcgggcggatcacctgaggtcaggcgttggagaccagcctagccaacatgatgaaacctcgtctctactaaaaatacaaaaaattagctgggcgtggtggtgcgtgcttgtagtcccagacactccggaggtgaggcgggagaatcgcttgagcccgggaggtggaggttgcagtaagccaacaccgtgccactgcactacagcctgggcgacaggctgataggaagatgtcttcaggaaatgctaaaattgggcaccctgcccccaacttcaaagccacagctgttatgccagatggtcagtttaaagatatcagcctgtctgactacaaaggaaaatatgttgtgttcttcttttaccctcttgacttcacctttgtgtgccccacggagatcattgctttcagtgatagggcagaagaatttaagaaactcaactgccaagtgattggtgcttctgtggattctcacttctgtcatctagcatgggtcaatacacctaagaaacaaggaggactgggacccatgaacattcctttggtatcagacccgaagcgcaccattgctcaggattatggggtcttaaaggctgatgaaggcatctcgttcaggggcctttttatcattgatgataagggtattcttcggcagatcactgtaaatgacctccctgttggccgctctgtggatgagactttgagactagttcaggccttccagttcactgacaaacatggggaagtgtgcccagctggctggaaacctggcagtgataccatcaagcctgatgtccaaaagagcaaagaatatttctccaagcagaagtgagcgctgggctgttttagtgccaggctgcggtgggcagccatgagaacaaaacctcttctgtattttttttttccattagtaaaacacaagacttcagattcagccgaattgtggtgtcttacaaggcaggcctttcctacagggggtggaatgtattagtagagcaacccattaatcttttgtagtttgtattaaacttgaactgagaccttgatgagtctttattttaggaagcatattattagcttttgattttaagaggaatttactccttgctttccctgttttggggaaaatgaggagagctgcctccaaatcagggaattatattgacacaggtagatatagggaatggaactgaatgaacccaaggtgttacattttgtttcactacacatgagggagaagaataagccctgctatagtgttggccagagcactgcgactgacgccacaggctgggttaccagttaaagtctcagtgtgactacttggacacctatttttgtttagacacactattcaaagggctgcatgggaaccagaagcttggcctcttctgataaatgcctggtacctgctatgtaaaagagctggaggtttctgttctttttgaactgacagaggaaagaggaagacaaggctggtggccttgggtagggctttcagtagttgcacagtactgggcaattcttagccttcccttggttctagccttgattagagatagtcttttttagtgtcattatgttgcccagagtggttctgaattccttgcctcaggtggtcctccgcctcagc

SEQ ID NO: 1638 - DNA, 1890 bp, Homo sapiens; identical to SEQ ID NO: 1630

SEQ ID NO: 1639 - DNA, 6487 bp, Homo sapiens
cgaaattgaaccggagccatcttgggcccggcgcgcagacccgcggagtttcccgtgccgacgccccggggccacttccagtgcggagtagcggaggcgtgggggcctcgaggggctggcgcggcccagcggtcgggccagggtcgtgccgccggcgggtcgggccgggcaatgcctcgcgggcgcaatgaatccgcggcaggggtattccctcagcggatactacacccatccatttcaaggctatgagcacagacagctcagataccagcagcctgggccaggatcttcccccagtagtttcctgcttaagcaaatagaatttctcaaggggcagctcccagaagcaccggtgattggaaagcagacaccgtcactgccaccttccctcccaggactccggccaaggtttccagtactacttgcctccagtaccagaggcaggcaagtggacatcaggggtgtccccaggggcgtgcatctcggaagtcaggggctccagagagggttccagcatccttcaccacgtggcaggagtctgccacagagaggtgttgattgcctttcctcacatttccaggaactgagtatctaccaagatcaggaacaaaggatcttaaagttcctggaagagcttggggaagggaaggccaccacagcacatgatctgtctgggaaacttgggactccgaagaaagaaatcaatcgagttttatactccctggcaaagaagggcaagctacagaaagaggcaggaacaccccctttgtggaaaatcgcggtctccactcaggcttggaaccagcacagcggagtggtaagaccagacggtcatagccaaggagccccaaactcagacccgagtttggaaccggaagacagaaactccacatctgtctcagaagatcttcttgagccttttattgcagtctcagctcaggcttggaaccagcacagcggagtggtaagaccagacagtcatagccaaggatccccaaactcagacccaggtttggaacctgaagacagcaactccacatctgccttggaagatcctcttgagtttttagacatggccgagatcaaggagaaaatctgcgactatctcttcaatgtgtctgactcctctgccctgaatttggctaaaaatattggccttaccaaggcccgagatataaatgctgtgctaattgacatggaaaggcagggggatgtctatagacaagggacaacccctcccatatggcatttgacagacaagaagcgagagaggatgcaaatcaagagaaatacgaacagtgttcctgaaaccgctccagctgcaatccctgagaccaaaagaaacgcagagttcctcacctgtaatatacccacatcaaatgcctcaaataacatggtaaccacagaaaaagtggagaatgggcaggaacctgtcataaagttagaaaacaggcaagaggccagaccagaaccagcaagactgaaaccacctgttcattacaatggcccctcaaaagcagggtatgttgactttgaaaatggccagtgggccacagatgacatcccagatgacttgaatagtatccgcgcagcaccaggtgagtttcgagccatcatggagatgccctccttctacagtcatggcttgccacggtgttcaccctacaagaaactgacagagtgccagctgaagaaccccatcagcgggctgttagaatatgcccagttcgctagtcaaacctgtgagttcaacatgatagagcagagtggaccaccccatgaacctcgatttaaattccaggttgtcatcaatggccgagagtttcccccagctgaagctggaagcaagaaagtggccaagcaggatgcagctatgaaagccatgacaattctgctagaggaagccaaagccaaggacagtggaaaatcagaagaatcatcccactattccacagagaaagaatcagagaagactgcagagtcccagacccccaccccttcagccacatccttcttttctgggaagagccccgtcaccacactgcttgagtgtatgcacaaattggggaactcctgcgaattccgtctcctgtccaaagaaggccctgcccatgaacccaagttccaatactgtgttgcagtgggagcccaaactttccccagtgtgagtgctcccagcaagaaagtggcaaagcagatggccgcagaggaagccatgaaggccctgcatggggaggcgaccaactccatggcttctgataaccaggtcaggaagattggcgagctcgtgagatacctgaacaccaaccctgtgggtggccttttggagtacgcccgctcccatggctttgctgctgaattcaagttggtcgaccagtccggacctcctcacgagcccaagttcgtttaccaagcaaaagttgggggtcgctggttcccagccgtctgcgcacacagcaagaagcaaggcaagcaggaagcagcagatgcggctctccgtgtcttgattggggagaacgagaaggcagaacgcatgggtttcacagagctccctctcactggcagcaccttccatgaccagatagccatgctgagccaccggtgcttcaacactctgactaacagcttccagccctccttgctcggccgcaagattctggccgccatcattatgaaaaaagactctgaggacatgggtgtcgtcgtcagcttgggaacagggaatcgctgtgtgaaaggagattctctcagcctaaaaggagaaactgtcaatgactgccatgcagaaataatctcccggagaggcttcatcaggtttctctacagtgagttaatgaaatacaactcccagactgcgaaggatagtatatttgaacctgctaagggaggagaaaagctccaaataaaaaagactgtgtcattccatctgtatatcagcactgctccgtgtggagatggcgccctctttgacaagtcctgcagcgaccgtgctatggaaagcacagaatcccgccactaccctgtcttcgagaatcccaaacaaggaaagctccgcaccaaggtggagaacggagaaggcacaatccctgtggaatccagtgacattgtgcctacgtgggatggcattcggctcggggagagactccgtaccatgtcctgtagtgacaaaatcctacgctggaacgtgctgggcctgcaaggggcactgttgacccacttcctgcagcccatttatctcaaatctgtcacattgggttaccttttcagccaagggcatctgacccgtgctatttgctgtcgtgtgacaagagatgggagtgcatttgaggatggactacgacatccctttattgtcaaccaccccaaggttggcagagtcagcatatatgattccaaaaggcaatccgggaagactaaggagacaagcgtcaactggtgtctggctgatggctatgacctggagatcctggacggtaccagaggcactgtggatgggccacggaatgaattgtcccgggtctccaaaaagaacatttttcttctatttaagaagctctgctccttccgttaccgcagggatctactgagactctcctatggtgaggccaagaaagctgcccgtgactacgagacggccaagaactacttcaaaaaaggcctgaaggatatgggctatgggaactggattagcaaaccccaggaggaaaagaacttttatctctgcccagtatagtatgctccagtgacagatggattagggtgtgtcatactagggtgtgagagaggtaggtcgtagcattcctcatcacatggtcaggggatttttttttctcctttttttttctttttaagccataattggtgatactgaaaactttgggttcccatttatcctgctttctttgggattgctaggcaaggtctggccaggccccccttttttcccccaagtgaagaggcagaaacctaagaagttatcttttctttctacccaaagcatacatagtcactgagcacctgcggtccatttcctcttaaaagttttgttttgatttgtttccatttcctttccctttgtgtttgctacactgacctcttgcggtcttgattaggtttcagtcaactctggatcatgtcagggactgataatttcatttgtggattacgcagacccctctacttcccctctttcccttctgagattctttccttgtgatctgaatgtctccttttccccctcagagggcaaagaggtgaacataaaggatttggtgaaacatttgtaagggtaggagttgaaaactgcagttcccagtgccacggaagtgtgattggagcctgcagataatgctcagccatcctcccatcctgcactttagccagctgcagggcgggcaaggcaaggaaagctgcttccctggaagtgtatcactttctccggcagctgggaagtctagaaccagccagactgggttaagggagctgctcaagcaatagcagaggtttcacccggcaggatgacacagaccacttcccagggagcacgggcatgccttggaatattgccaagcttccagctgcctcttctcttaaagcattcctaggaatattttccccgccaatgctgggcgtacaccctagccaacgggacaaatcctagagggtataaaatcatctctgctcagataatcatgacttagcaagaataagggcaaaaaatcctgttggcttaacgtcactgttccacccggtgtaatatctctcatgacagtgacaccaagggaagttgactaagtcacatgtaaattaggagtgttttaaagaatgccatagatgttgattcttaactgctacagataacctgtaattgagcagatttaaaattcaggcatacttttccatttatccaagtgctttcatttttccagatggcttcagaagtaggctcgtgggcagggcgcagacctgatctttatagggttgacatagaaagcagtagttgtgggtgaaagggcaggttgtcttcaaactctgtgaggtagaatcctttgtctatacctccatgaacattgactcgtgtgttcagagcctttggcctctctgtggagtctggctctctggctcctgtgcattctttgaatagtcactcgtaaaaactgtcagtgcttgaaactgtttcctttactcatgttgaagggactttgttggcttttagagtgttggtcatgactccaagagcagagcagggaagagcccaagcatagacttggtgccgtggtgatggctgcagtccagttttgtgatgctgcttttacgtgtccctcgataacagtcagctagacacactcaggaggactactgaggctctgcgaccttcaggagctgagcctgcctctctcctttagatgacagaccttcatctgggaacgtgctgagccagcaccctcagatgatttccctccaaactgctgactaggtcatcctctgtctggtagagacattcacatctttgcttttattctgtgctctctgtacttttgaccaaaaattgaccaaagtaagaaaatgcaagttctaaaaatagactaaggatgcctttgcagaacaccaaagcatcccaaggaactggtagggaagtggcgcctgtctcctggagtggaagaggcctgctccctggctctgggtctgctgggggcacagtaaatcagtcttggcacccacatccagggcagagaggtctgtggttctcagcatcagaaggcagcgcagcccctctcctcttcaggctacagggttgtcacctgctgagtcctcaggttgtttggcctctctggtccatcttgggcattaggttctccagcagagctctggccagctgcctcttctttaactgggaacacaggctctcacaagatcagaacccccactcacccccaagatcttatctagcaagcctgtagtattcagtttctgttgtaggaagagagcgaggcatccctgaattccacgcatctgctggaaacgagccgtgtcagatcgcacatccctgcgcccccatgcccccatgcccctctgagtcacacaggacagaggaggcagagcttctgcccactgttatcttcactttctttgtccagtcttttgtttttaataagcagtgaccctccctactcttctttttaatgatttttgtagttgatttgtctgaactgtggctactgtgcattccttgaataatcacttgtaaaaattgtcagtgcttgaagctgtttcctttactcacattgaagggacttcgttggttttttggagtcttggttgtgactccaagagcagagtgaggaagacccccaagcatagactcgggtactgtgatgatggctgcagtccagttttatgattctgcttttatgtgtcccttgataacagtgacttaacaatatacattcctcataaataaaaaaaaaacaagaatctgaattcttag

SEQ ID NO: 1640 - DNA, 6343 bp, Homo sapiens
gcggccgcactggcagcctccgggtgtccggccgtgtcccgaggaagtgcaagacccggggtattccctcagcggatactacacccatccatttcaaggctatgagcacagacagctcagataccagcagcctgggccaggatcttcccccagtagtttcctgcttaagcaaatagaatttctcaaggggcagctcccagaagcaccggtgattggaaagcagacaccgtcactgccaccttccctcccaggactccggccaaggtttccagtactacttgcctccagtaccagaggcaggcaagtggacatcaggggtgtccccaggggcgtgcatctcggaagtcaggggctccagagagggttccagcatccttcaccacgtggcaggagtctgccacagagaggtgttgattgcctttcctcacatttccaggaactgagtatctaccaagatcaggaacaaaggatcttaaagttcctggaagagcttggggaagggaaggccaccacagcacatgatctgtctgggaaacttgggactccgaagaaagaaatcaatcgagttttatactccctggcaaagaagggcaagctacagaaagaggcaggaacaccccctttgtggaaaatcgcggtctccactcaggcttggaaccagcacagcggagtggtaagaccagacggtcatagccaaggagccccaaactcagacccgagtttggaaccggaagacagaaactccacatctgtctcagaagatcttcttgagccttttattgcagtctcagctcaggcttggaaccagcacagcggagtggtaagaccagacagtcatagccaaggatccccaaactcagacccaggtttggaacctgaagacagcaactccacatctgccttggaagatcctcttgagtttttagacatggccgagatcaaggagaaaatctgcgactatctcttcaatgtgtctgactcctctgccctgaatttggctaaaaatattggccttaccaaggcccgagatataaatgctgtgctaattgacatggaaaggcagggggatgtctatagacaagggacaacccctcccatatggcatttgacagacaagaagcgagagaggatgcaaatcaagagaaatacgaacagtgttcctgaaaccgctccagctgcaatccctgagaccaaaagaaacgcagagttcctcacctgtaatatacccacatcaaatgcctcaaataacatggtaaccacagaaaaagtggagaatgggcaggaacctgtcataaagttagaaaacaggcaagaggccagaccagaaccagcaagactgaaaccacctgttcattacaatggcccctcaaaagcagggtatgttgactttgaaaatggccagtgggccacagatgacatcccagatgacttgaatagtatccgcgcagcaccaggtgagtttcgagccatcatggagatgccctccttctacagtcatggcttgccacggtgttcaccctacaagaaactgacagagtgccagctgaagaaccccatcagcgggctgttagaatatgcccagttcgctagtcaaacctgtgagttcaacatgatagagcagagtggaccaccccatgaacctcgatttaaattccaggttgtcatcaatggccgagagtttcccccagctgaagctggaagcaagaaagtggccaagcaggatgcagctatgaaagccatgacaattctgctagaggaagccaaagccaaggacagtggaaaatcagaagaatcatcccactattccacagagaaagaatcagagaagactgcagagtcccagacccccaccccttcagccacatccttcttttctgggaagagccccgtcaccacactgcttgagtgtatgcacaaattggggaactcctgcgaattccgtctcctgtccaaagaaggccctgcccatgaacccaagttccaatactgtgttgcagtgggagcccaaactttccccagtgtgagtgctcccagcaagaaagtggcaaagcagatggccgcagaggaagccatgaaggccctgcatggggaggcgaccaactccatggcttctgataaccaggtcaggaagattggcgagctcgtgagatacctgaacaccaaccctgtgggtggccttttggagtacgcccgctcccatggctttgctgctgaattcaagttggtcgaccagtccggacctcctcacgagcccaagttcgtttaccaagcaaaagttgggggtcgctggttcccagccgtctgcgcacacagcaagaagcaaggcaagcaggaagcagcagatgcggctctccgtgtcttgattggggagaacgagaaggcagaacgcatgggtttcacagagctccctctcactggcagcaccttccatgaccagatagccatgctgagccaccggtgcttcaacactctgactaacagcttccagccctccttgctcggccgcaagattctggccgccatcattatgaaaaaagactctgaggacatgggtgtcgtcgtcagcttgggaacagggaatcgctgtgtgaaaggagattctctcagcctaaaaggagaaactgtcaatgactgccatgcagaaataatctcccggagaggcttcatcaggtttctctacagtgagttaatgaaatacaactcccagactgcgaaggatagtatatttgaacctgctaagggaggagaaaagctccaaataaaaaagactgtgtcattccatctgtatatcagcactgctccgtgtggagatggcgccctctttgacaagtcctgcagcgaccgtgctatggaaagcacagaatcccgccactaccctgtcttcgagaatcccaaacaaggaaagctccgcaccaaggtggagaacggagaaggcacaatccctgtggaatccagtgacattgtgcctacgtgggatggcattcggctcggggagagactccgtaccatgtcctgtagtgacaaaatcctacgctggaacgtgctgggcctgcaaggggcactgttgacccacttcctgcagcccatttatctcaaatctgtcacattgggttaccttttcagccaagggcatctgacccgtgctatttgctgtcgtgtgacaagagatgggagtgcatttgaggatggactacgacatccctttattgtcaaccaccccaaggttggcagagtcagcatatatgattccaaaaggcaatccgggaagactaaggagacaagcgtcaactggtgtctggctgatggctatgacctggagatcctggacggtaccagaggcactgtggatgggccacggaatgaattgtcccgggtctccaaaaagaacatttttcttctatttaagaagctctgctccttccgttaccgcagggatctactgagactctcctatggtgaggccaagaaagctgcccgtgactacgagacggccaagaactacttcaaaaaaggcctgaaggatatgggctatgggaactggattagcaaaccccaggaggaaaagaacttttatctctgcccagtatagtatgctccagtgacagatggattagggtgtgtcatactagggtgtgagagaggtaggtcgtagcattcctcatcacatggtcaggggatttttttttctcctttttttttctttttaagccataattggtgatactgaaaactttgggttcccatttatcctgctttctttgggattgctaggcaaggtctggccaggccccccttttttcccccaagtgaagaggcagaaacctaagaagttatcttttctttctacccaaagcatacatagtcactgagcacctgcggtccatttcctcttaaaagttttgttttgatttgtttccatttcctttccctttgtgtttgctacactgacctcttgcggtcttgattaggtttcagtcaactctggatcatgtcagggactgataatttcatttgtggattacgcagacccctctacttcccctctttcccttctgagattctttccttgtgatctgaatgtctccttttccccctcagagggcaaagaggtgaacataaaggatttggtgaaacatttgtaagggtaggagttgaaaactgcagttcccagtgccacggaagtgtgattggagcctgcagataatgctcagccatcctcccatcctgcactttagccagctgcagggcgggcaaggcaaggaaagctgcttccctggaagtgtatcactttctccggcagctgggaagtctagaaccagccagactgggttaagggagctgctcaagcaatagcagaggtttcacccggcaggatgacacagaccacttcccagggagcacgggcatgccttggaatattgccaagcttccagctgcctcttctcttaaagcattcctaggaatattttccccgccaatgctgggcgtacaccctagccaacgggacaaatcctagagggtataaaatcatctctgctcagataatcatgacttagcaagaataagggcaaaaaatcctgttggcttaacgtcactgttccacccggtgtaatatctctcatgacagtgacaccaagggaagttgactaagtcacatgtaaattaggagtgttttaaagaatgccatagatgttgattcttaactgctacagataacctgtaattgagcagatttaaaattcaggcatacttttccatttatccaagtgctttcatttttccagatggcttcagaagtaggctcgtgggcagggcgcagacctgatctttatagggttgacatagaaagcagtagttgtgggtgaaagggcaggttgtcttcaaactctgtgaggtagaatcctttgtctatacctccatgaacattgactcgtgtgttcagagcctttggcctctctgtggagtctggctctctggctcctgtgcattctttgaatagtcactcgtaaaaactgtcagtgcttgaaactgtttcctttactcatgttgaagggactttgttggcttttagagtgttggtcatgactccaagagcagagcagggaagagcccaagcatagacttggtgccgtggtgatggctgcagtccagttttgtgatgctgcttttacgtgtccctcgataacagtcagctagacacactcaggaggactactgaggctctgcgaccttcaggagctgagcctgcctctctcctttagatgacagaccttcatctgggaacgtgctgagccagcaccctcagatgatttccctccaaactgctgactaggtcatcctctgtctggtagagacattcacatctttgcttttattctgtgctctctgtacttttgaccaaaaattgaccaaagtaagaaaatgcaagttctaaaaatagactaaggatgcctttgcagaacaccaaagcatcccaaggaactggtagggaagtggcgcctgtctcctggagtggaagaggcctgctccctggctctgggtctgctgggggcacagtaaatcagtcttggcacccacatccagggcagagaggtctgtggttctcagcatcagaaggcagcgcagcccctctcctcttcaggctacagggttgtcacctgctgagtcctcaggttgtttggcctctctggtccatcttgggcattaggttctccagcagagctctggccagctgcctcttctttaactgggaacacaggctctcacaagatcagaacccccactcacccccaagatcttatctagcaagcctgtagtattcagtttctgttgtaggaagagagcgaggcatccctgaattccacgcatctgctggaaacgagccgtgtcagatcgcacatccctgcgcccccatgcccccatgcccctctgagtcacacaggacagaggaggcagagcttctgcccactgttatcttcactttctttgtccagtcttttgtttttaataagcagtgaccctccctactcttctttttaatgatttttgtagttgatttgtctgaactgtggctactgtgcattccttgaataatcacttgtaaaaattgtcagtgcttgaagctgtttcctttactcacattgaagggacttcgttggttttttggagtcttggttgtgactccaagagcagagtgaggaagacccccaagcatagactcgggtactgtgatgatggctgcagtccagttttatgattctgcttttatgtgtcccttgataacagtgacttaacaatatacattcctcataaataaaaaaaaaacaagaatctgaattcttag

SEQ ID NO: 1641 - DNA, 6544 bp, Homo sapiens
cgaaattgaaccggagccatcttgggcccggcgcgcagacccgcggagtttcccgtgccgacgccccggggccacttccagtgcggagtagcggaggcgtgggggcctcgaggggctggcgcggcccagcggtcgggccagggtcgtgccgccggcgggtcgggccgggcaatgcctcgcgggcgcaatgaatccgcggcaggggtattccctcagcggatactacacccatccatttcaaggctatgagcacagacagctcagataccagcagcctgggccaggatcttcccccagtagtttcctgcttaagcaaatagaatttctcaaggggcagctcccagaagcaccggtgattggaaagcagacaccgtcactgccaccttccctcccaggactccggccaaggtttccagtactacttgcctccagtaccagaggcaggcaagtggacatcaggggtgtccccaggggcgtgcatctcggaagtcaggggctccagagagggttccagcatccttcaccacgtggcaggagtctgccacagagaggtgttgattgcctttcctcacatttccaggaactgagtatctaccaagatcaggaacaaaggatcttaaagttcctggaagagcttggggaagggaaggccaccacagcacatgatctgtctgggaaacttgggactccgaagaaagaaatcaatcgagttttatactccctggcaaagaagggcaagctacagaaagaggcaggaacaccccctttgtggaaaatcgcggtctccactcaggcttggaaccagcacagcggagtggtaagaccagacggtcatagccaaggagccccaaactcagacccgagtttggaaccggaagacagaaactccacatctgtctcagaagatcttcttgagccttttattgcagtctcagctcaggcttggaaccagcacagcggagtggtaagaccagacagtcatagccaaggatccccaaactcagacccaggtttggaacctgaagacagcaactccacatctgccttggaagatcctcttgagtttttagacatggccgagatcaaggagaaaatctgcgactatctcttcaatgtgtctgactcctctgccctgaatttggctaaaaatattggccttaccaaggcccgagatataaatgctgtgctaattgacatggaaaggcagggggatgtctatagacaagggacaacccctcccatatggcatttgacagacaagaagcgagagaggatgcaaatcaagagaaatacgaacagtgttcctgaaaccgctccagctgcaatccctgagaccaaaagaaacgcagagttcctcacctgtaatatacccacatcaaatgcctcaaataacatggtaaccacagaaaaagtggagaatgggcaggaacctgtcataaagttagaaaacaggcaagaggccagaccagaaccagcaagactgaaaccacctgttcattacaatggcccctcaaaagcagggtatgttgactttgaaaatggccagtgggccacagatgacatcccagatgacttgaatagtatccgcgcagcaccaggtgagtttcgagccatcatggagatgccctccttctacagtcatggcttgccacggtgttcaccctacaagaaactgacagagtgccagctgaagaaccccatcagcgggctgttagaatatgcccagttcgctagtcaaacctgtgagttcaacatgatagagcagagtggaccaccccatgaacctcgatttaaattccaggttgtcatcaatggccgagagtttcccccagctgaagctggaagcaagaaagtggccaagcaggatgcagctatgaaagccatgacaattctgctagaggaagccaaagccaaggacagtggaaaatcagaagaatcatcccactattccacagagaaagaatcagagaagactgcagagtcccagacccccaccccttcagccacatccttcttttctgggaagagccccgtcaccacactgcttgagtgtatgcacaaattggggaactcctgcgaattccgtctcctgtccaaagaaggccctgcccatgaacccaagttccaatactgtgttgcagtgggagcccaaactttccccagtgtgagtgctcccagcaagaaagtggcaaagcagatggccgcagaggaagccatgaaggccctgcatggggaggcgaccaactccatggcttctgataaccagcctgaaggtatgatctcagagtcacttgataacttggaatccatgatgcccaacaaggtcaggaagattggcgagctcgtgagatacctgaacaccaaccctgtgggtggccttttggagtacgcccgctcccatggctttgctgctgaattcaagttggtcgaccagtccggacctcctcacgagcccaagttcgtttaccaagcaaaagttgggggtcgctggttcccagccgtctgcgcacacagcaagaagcaaggcaagcaggaagcagcagatgcggctctccgtgtcttgattggggagaacgagaaggcagaacgcatgggtttcacagagctccctctcactggcagcaccttccatgaccagatagccatgctgagccaccggtgcttcaacactctgactaacagcttccagccctccttgctcggccgcaagattctggccgccatcattatgaaaaaagactctgaggacatgggtgtcgtcgtcagcttgggaacagggaatcgctgtgtgaaaggagattctctcagcctaaaaggagaaactgtcaatgactgccatgcagaaataatctcccggagaggcttcatcaggtttctctacagtgagttaatgaaatacaactcccagactgcgaaggatagtatatttgaacctgctaagggaggagaaaagctccaaataaaaaagactgtgtcattccatctgtatatcagcactgctccgtgtggagatggcgccctctttgacaagtcctgcagcgaccgtgctatggaaagcacagaatcccgccactaccctgtcttcgagaatcccaaacaaggaaagctccgcaccaaggtggagaacggagaaggcacaatccctgtggaatccagtgacattgtgcctacgtgggatggcattcggctcggggagagactccgtaccatgtcctgtagtgacaaaatcctacgctggaacgtgctgggcctgcaaggggcactgttgacccacttcctgcagcccatttatctcaaatctgtcacattgggttaccttttcagccaagggcatctgacccgtgctatttgctgtcgtgtgacaagagatgggagtgcatttgaggatggactacgacatccctttattgtcaaccaccccaaggttggcagagtcagcatatatgattccaaaaggcaatccgggaagactaaggagacaagcgtcaactggtgtctggctgatggctatgacctggagatcctggacggtaccagaggcactgtggatgggccacggaatgaattgtcccgggtctccaaaaagaacatttttcttctatttaagaagctctgctccttccgttaccgcagggatctactgagactctcctatggtgaggccaagaaagctgcccgtgactacgagacggccaagaactacttcaaaaaaggcctgaaggatatgggctatgggaactggattagcaaaccccaggaggaaaagaacttttatctctgcccagtatagtatgctccagtgacagatggattagggtgtgtcatactagggtgtgagagaggtaggtcgtagcattcctcatcacatggtcaggggatttttttttctcctttttttttctttttaagccataattggtgatactgaaaactttgggttcccatttatcctgctttctttgggattgctaggcaaggtctggccaggccccccttttttcccccaagtgaagaggcagaaacctaagaagttatcttttctttctacccaaagcatacatagtcactgagcacctgcggtccatttcctcttaaaagttttgttttgatttgtttccatttcctttccctttgtgtttgctacactgacctcttgcggtcttgattaggtttcagtcaactctggatcatgtcagggactgataatttcatttgtggattacgcagacccctctacttcccctctttcccttctgagattctttccttgtgatctgaatgtctccttttccccctcagagggcaaagaggtgaacataaaggatttggtgaaacatttgtaagggtaggagttgaaaactgcagttcccagtgccacggaagtgtgattggagcctgcagataatgctcagccatcctcccatcctgcactttagccagctgcagggcgggcaaggcaaggaaagctgcttccctggaagtgtatcactttctccggcagctgggaagtctagaaccagccagactgggttaagggagctgctcaagcaatagcagaggtttcacccggcaggatgacacagaccacttcccagggagcacgggcatgccttggaatattgccaagcttccagctgcctcttctcttaaagcattcctaggaatattttccccgccaatgctgggcgtacaccctagccaacgggacaaatcctagagggtataaaatcatctctgctcagataatcatgacttagcaagaataagggcaaaaaatcctgttggcttaacgtcactgttccacccggtgtaatatctctcatgacagtgacaccaagggaagttgactaagtcacatgtaaattaggagtgttttaaagaatgccatagatgttgattcttaactgctacagataacctgtaattgagcagatttaaaattcaggcatacttttccatttatccaagtgctttcatttttccagatggcttcagaagtaggctcgtgggcagggcgcagacctgatctttatagggttgacatagaaagcagtagttgtgggtgaaagggcaggttgtcttcaaactctgtgaggtagaatcctttgtctatacctccatgaacattgactcgtgtgttcagagcctttggcctctctgtggagtctggctctctggctcctgtgcattctttgaatagtcactcgtaaaaactgtcagtgcttgaaactgtttcctttactcatgttgaagggactttgttggcttttagagtgttggtcatgactccaagagcagagcagggaagagcccaagcatagacttggtgccgtggtgatggctgcagtccagttttgtgatgctgcttttacgtgtccctcgataacagtcagctagacacactcaggaggactactgaggctctgcgaccttcaggagctgagcctgcctctctcctttagatgacagaccttcatctgggaacgtgctgagccagcaccctcagatgatttccctccaaactgctgactaggtcatcctctgtctggtagagacattcacatctttgcttttattctgtgctctctgtacttttgaccaaaaattgaccaaagtaagaaaatgcaagttctaaaaatagactaaggatgcctttgcagaacaccaaagcatcccaaggaactggtagggaagtggcgcctgtctcctggagtggaagaggcctgctccctggctctgggtctgctgggggcacagtaaatcagtcttggcacccacatccagggcagagaggtctgtggttctcagcatcagaaggcagcgcagcccctctcctcttcaggctacagggttgtcacctgctgagtcctcaggttgtttggcctctctggtccatcttgggcattaggttctccagcagagctctggccagctgcctcttctttaactgggaacacaggctctcacaagatcagaacccccactcacccccaagatcttatctagcaagcctgtagtattcagtttctgttgtaggaagagagcgaggcatccctgaattccacgcatctgctggaaacgagccgtgtcagatcgcacatccctgcgcccccatgcccccatgcccctctgagtcacacaggacagaggaggcagagcttctgcccactgttatcttcactttctttgtccagtcttttgtttttaataagcagtgaccctccctactcttctttttaatgatttttgtagttgatttgtctgaactgtggctactgtgcattccttgaataatcacttgtaaaaattgtcagtgcttgaagctgtttcctttactcacattgaagggacttcgttggttttttggagtcttggttgtgactccaagagcagagtgaggaagacccccaagcatagactcgggtactgtgatgatggctgcagtccagttttatgattctgcttttatgtgtcccttgataacagtgacttaacaatatacattcctcataaataaaaaaaaaacaagaatctgaattcttag

SEQ ID NO: 1642 - DNA, 6287 bp, Homo sapiens
gcggccgcactggcagcctccgggtgtccggccgtgtcccgaggaagtgcaagacccggggtattccctcagcggatactacacccatccatttcaaggctatgagcacagacagctcagataccagcagcctgggccaggatcttcccccagtagtttcctgcttaagcaaatagaatttctcaaggggcagctcccagaagcaccggtgattggaaagcagacaccgtcactgccaccttccctcccaggactccggccaaggtttccagtactacttgcctccagtaccagaggcaggcaagtggacatcaggggtgtccccaggggcgtgcatctcggaagtcaggggctccagagagggttccagcatccttcaccacgtggcaggagtctgccacagagaggtgttgattgcctttcctcacatttccaggaactgagtatctaccaagatcaggaacaaaggatcttaaagttcctggaagagcttggggaagggaaggccaccacagcacatgatctgtctgggaaacttgggactccgaagaaagaaatcaatcgagttttatactccctggcaaagaagggcaagctacagaaagaggcaggaacaccccctttgtggaaaatcgcggtctccactcaggcttggaaccagcacagcggagtggtaagaccagacggtcatagccaaggagccccaaactcagacccgagtttggaaccggaagacagaaactccacatctgtctcagaagatcttcttgagccttttattgcagtctcagctcaggcttggaaccagcacagcggagtggtaagaccagacagtcatagccaaggatccccaaactcagacccaggtttggaacctgaagacagcaactccacatctgccttggaagatcctcttgagtttttagacatggccgagatcaaggagaaaatctgcgactatctcttcaatgtgtctgactcctctgccctgaatttggctaaaaatattggccttaccaaggcccgagatataaatgctgtgctaattgacatggaaaggcagggggatgtctatagacaagggacaacccctcccatatggcatttgacagacaagaagcgagagaggatgcaaatcaagagaaatacgaacagtgttcctgaaaccgctccagctgcaatccctgagaccaaaagaaacgcagagttcctcacctgtaatatacccacatcaaatgcctcaaataacatggtaaccacagaaaaagtggagaatgggcaggaacctgtcataaagttagaaaacaggcaagaggccagaccagaaccagcaagactgaaaccacctgttcattacaatggcccctcaaaagcagggtatgttgactttgaaaatggccagtgggccacagatgacatcccagatgacttgaatagtatccgcgcagcaccaggtgagtttcgagccatcatggagatgccctccttctacagtcatggcttgccacggtgttcaccctacaagaaactgacagagtgccagctgaagaaccccatcagcgggctgttagaatatgcccagttcgctagtcaaacctgtgagttcaacatgatagagcagagtggaccaccccatgaacctcgatttaaattccaggttgtcatcaatggccgagagtttcccccagctgaagctggaagcaagaaagtggccaagcaggatgcagctatgaaagccatgacaattctgctagaggaagccaaagccaaggacagtggaaaatcagaagaatcatcccactattccacagagaaagaatcagagaagactgcagagtcccagacccccaccccttcagccacatccttcttttctgggaagagccccgtcaccacactgcttgagtgtatgcacaaattggggaactcctgcgaattccgtctcctgtccaaagaaggccctgcccatgaacccaagttccaatactgtgttgcagtgggagcccaaactttccccagtgtgagtgctcccagcaagaaagtggcaaagcagatggccgcagaggaagccatgaaggccctgcatggggaggcgaccaactccatggcttctgataaccagcctgaaggtatgatctcagagtcacttgataacttggaatccatgatgcccaacaaggtcaggaagattggcgagctcgtgagatacctgaacaccaaccctgtgggtggccttttggagtacgcccgctcccatggctttgctgctgaattcaagttggtcgaccagtccggacctcctcacgagcccaagttcgtttaccaagcaaaagttgggggtcgctggttcccagccgtctgcgcacacagcaagaagcaaggcaagcaggaagcagcagatgcggctctccgtgtcttgattggggagaacgagaaggcagaacgcatgggtttcacagaggtaaccccagtgacaggggccagtctcagaagaactatgctcctcctctcaaggtccccagaagcacagccaaagacactccctctcactggcagcaccttccatgaccagatagccatgctgagccaccggtgcttcaacactctgactaacagcttccagccctccttgctcggccgcaagattctggccgccatcattatgaaaaaagactctgaggacatgggtgtcgtcgtcagcttgggaacagggaatcgctgtgtgaaaggagattctctcagcctaaaaggagaaactgtcaatgactgccatgcagaaataatctcccggagaggcttcatcaggtttctctacagtgagttaatgaaatacaactcccagactgcgaaggatagtatatttgaacctgctaagggaggagaaaagctccaaataaaaaagactgtgtcattccatctgtatatcagcactgctccgtgtggagatggcgccctctttgacaagtcctgcagcgaccgtgctatggaaagcacagaatcccgccactaccctgtcttcgagaatcccaaacaaggaaagctccgcaccaaggtggagaacggagaaggcacaatccctgtggaatccagtgacattgtgcctacgtgggatggcattcggctcggggagagactccgtaccatgtcctgtagtgacaaaatcctacgctggaacgtgctgggcctgcaaggggcactgttgacccacttcctgcagcccatttatctcaaatctgtcacattgggttaccttttcagccaagggcatctgacccgtgctatttgctgtcgtgtgacaagagatgggagtgcatttgaggatggactacgacatccctttattgtcaaccaccccaaggttggcagagtcagcatatatgattccaaaaggcaatccgggaagactaaggagacaagcgtcaactggtgtctggctgatggctatgacctggagatcctggacggtaccagaggcactgtggatgggccacggaatgaattgtcccgggtctccaaaaagaacatttttcttctatttaagaagctctgctccttccgttaccgcagggatctactgagactctcctatggtgaggccaagaaagctgcccgtgactacgagacggccaagaactacttcaaaaaaggcctgaaggatatgggctatgggaactggattagcaaaccccaggaggaaaagaacttttatctctgcccagtatagtatgctccagtgacagatggattagggtgtgtcatactagggtgtgagagaggtaggtcgtagcattcctcatcacatggtcaggggatttttttttctcctttttttttctttttaagccataattggtgatactgaaaactttgggttcccatttatcctgctttctttgggattgctaggcaaggtctggccaggccccccttttttcccccaagtgaagaggcagaaacctaagaagttatcttttctttctacccaaagcatacatagtcactgagcacctgcggtccatttcctcttaaaagttttgttttgatttgtttccatttcctttccctttgtgtttgctacactgacctcttgcggtcttgattaggtttcagtcaactctggatcatgtcagggactgataatttcatttgtggattacgcagacccctctacttcccctctttcccttctgagattctttccttgtgatctgaatgtctccttttccccctcagagggcaaagaggtgaacataaaggatttggtgaaacatttgtaagggtaggagttgaaaactgcagttcccagtgccacggaagtgtgattggagcctgcagataatgctcagccatcctcccatcctgcactttagccagctgcagggcgggcaaggcaaggaaagctgcttccctggaagtgtatcactttctccggcagctgggaagtctagaaccagccagactgggttaagggagctgctcaagcaatagcagaggtttcacccggcaggatgacacagaccacttcccagggagcacgggcatgccttggaatattgccaagcttccagctgcctcttctcttaaagcattcctaggaatattttccccgccaatgctgggcgtacaccctagccaacgggacaaatcctagagggtataaaatcatctctgctcagataatcatgacttagcaagaataagggcaaaaaatcctgttggcttaacgtcactgttccacccggtgtaatatctctcatgacagtgacaccaagggaagttgactaagtcacatgtaaattaggagtgttttaaagaatgccatagatgttgtcttcaaactctgtgaggtagaatcctttgtctatacctccatgaacattgactcgtgtgttcagagcctttggcctctctgtggagtctggctctctggctcctgtgcattctttgaatagtcactcgtaaaaactgtcagtgcttgaaactgtttcctttactcatgttgaagggactttgttggcttttagagtgttggtcatgactccaagagcagagcagggaagagcccaagcatagacttggtgccgtggtgatggctgcagtccagttttgtgatgctgcttttacgtgtccctcgataacagtcagctagacacactcaggaggactactgaggctctgcgaccttcaggagctgagcctgcctctctcctttagatgacagaccttcatctgggaacgtgctgagccagcaccctcagatgatttccctccaaactgctgactaggtcatcctctgtctggtagagacattcacatctttgcttttattctgtgctctctgtacttttgaccaaaaattgaccaaagtaagaaaatgcaagttctaaaaatagactaaggatgcctttgcagaacaccaaagcatcccaaggaactggtagggaagtggcgcctgtctcctggagtggaagaggcctgctccctggctctgggtctgctgggggcacagtaaatcagtcttggcacccacatccagggcagagaggtctgtggttctcagcatcagaaggcagcgcagcccctctcctcttcaggctacagggttgtcacctgctgagtcctcaggttgtttggcctctctggtccatcttgggcattaggttctccagcagagctctggccagctgcctcttctttaactgggaacacaggctctcacaagatcagaacccccactcacccccaagatcttatctagcaagcctgtagtattcagtttctgttgtaggaagagagcgaggcatccctgaattccacgcatctgctggaaacgagccgtgtcagatcgcacatccctgcgcccccatgcccccatgcccctctgagtcacacaggacagaggaggcagagcttctgcccactgttatcttcactttctttgtccagtcttttgtttttaataagcagtgaccctccctactcttctttttaatgatttttgtagttgatttgtctgaactgtggctactgtgcattccttgaataatcacttgtaaaaattgtcagtgcttgaagctgtttcctttactcacattgaagggacttcgttggttttttggagtcttggttgtgactccaagagcagagtgaggaagacccccaagcatagactcgggtactgtgatgatggctgcagtccagttttatgattctgcttttatgtgtcccttgataacagtgacttaacaatatacattcctcataaataaaaaaaaaacaagaatctg

SEQ ID NO: 1643 - DNA, 6343 bp, Homo sapiens; identical to SEQ ID NO: 1640

SEQ ID NO: 1644 - DNA, 6209 bp, Homo sapiens
gcggccgcactggcagcctccgggtgtccggccgtgtcccgaggaagtgcaagacccggggtattccctcagcggatactacacccatccatttcaaggctatgagcacagacagctcagataccagcagcctgggccaggatcttcccccagtagtttcctgcttaagcaaatagaatttctcaaggggcagctcccagaagcaccggtgattggaaagcagacaccgtcactgccaccttccctcccaggactccggccaaggtttccagtactacttgcctccagtaccagaggcaggcaagtggacatcaggggtgtccccaggggcgtgcatctcggaagtcaggggctccagagagggttccagcatccttcaccacgtggcaggagtctgccacagagaggtgttgattgcctttcctcacatttccaggaactgagtatctaccaagatcaggaacaaaggatcttaaagttcctggaagagcttggggaagggaaggccaccacagcacatgatctgtctgggaaacttgggactccgaagaaagaaatcaatcgagttttatactccctggcaaagaagggcaagctacagaaagaggcaggaacaccccctttgtggaaaatcgcggtctccactcaggcttggaaccagcacagcggagtggtaagaccagacggtcatagccaaggagccccaaactcagacccgagtttggaaccggaagacagaaactccacatctgtctcagaagatcttcttgagccttttattgcagtctcagctcaggcttggaaccagcacagcggagtggtaagaccagacagtcatagccaaggatccccaaactcagacccaggtttggaacctgaagacagcaactccacatctgccttggaagatcctcttgagtttttagacatggccgagatcaaggagaaaatctgcgactatctcttcaatgtgtctgactcctctgccctgaatttggctaaaaatattggccttaccaaggcccgagatataaatgctgtgctaattgacatggaaaggcagggggatgtctatagacaagggacaacccctcccatatggcatttgacagacaagaagcgagagaggatgcaaatcaagagaaatacgaacagtgttcctgaaaccgctccagctgcaatccctgagaccaaaagaaacgcagagttcctcacctgtaatatacccacatcaaatgcctcaaataacatggtaaccacagaaaaagtggagaatgggcaggaacctgtcataaagttagaaaacaggcaagaggccagaccagaaccagcaagactgaaaccacctgttcattacaatggcccctcaaaagcagggtatgttgactttgaaaatggccagtgggccacagatgacatcccagatgacttgaatagtatccgcgcagcaccaggtgagtttcgagccatcatggagatgccctccttctacagtcatggcttgccacggtgttcaccctacaagaaactgacagagtgccagctgaagaaccccatcagcgggctgttagaatatgcccagttcgctagtcaaacctgtgagttcaacatgatagagcagagtggaccaccccatgaacctcgatttaaattccaggttgtcatcaatggccgagagtttcccccagctgaagctggaagcaagaaagtggccaagcaggatgcagctatgaaagccatgacaattctgctagaggaagccaaagccaaggacagtggaaaatcagaagaatcatcccactattccacagagaaagaatcagagaagactgcagagtcccagacccccaccccttcagccacatccttcttttctgggaagagccccgtcaccacactgcttgagtgtatgcacaaattggggaactcctgcgaattccgtctcctgtccaaagaaggccctgcccatgaacccaagttccaatactgtgttgcagtgggagcccaaactttccccagtgtgagtgctcccagcaagaaagtggcaaagcagatggccgcagaggaagccatgaaggccctgcatggggaggcgaccaactccatggcttctgataaccagcctgaaggtatgatctcagagtcacttgataacttggaatccatgatgcccaacaaggtcaggaagattggcgagctcgtgagatacctgaacaccaaccctgtgggtggccttttggagtacgcccgctcccatggctttgctgctgaattcaagttggtcgaccagtccggacctcctcacgagcccaagttcgtttaccaagcaaaagttgggggtcgctggttcccagccgtctgcgcacacagcaagaagcaaggcaagcaggaagcagcagatgcggctctccgtgtcttgattggggagaacgagaaggcagaacgcatgggtttcacagagctccctctcactggcagcaccttccatgaccagatagccatgctgagccaccggtgcttcaacactctgactaacagcttccagccctccttgctcggccgcaagattctggccgccatcattatgaaaaaagactctgaggacatgggtgtcgtcgtcagcttgggaacagggaatcgctgtgtgaaaggagattctctcagcctaaaaggagaaactgtcaatgactgccatgcagaaataatctcccggagaggcttcatcaggtttctctacagtgagttaatgaaatacaactcccagactgcgaaggatagtatatttgaacctgctaagggaggagaaaagctccaaataaaaaagactgtgtcattccatctgtatatcagcactgctccgtgtggagatggcgccctctttgacaagtcctgcagcgaccgtgctatggaaagcacagaatcccgccactaccctgtcttcgagaatcccaaacaaggaaagctccgcaccaaggtggagaacggagaaggcacaatccctgtggaatccagtgacattgtgcctacgtgggatggcattcggctcggggagagactccgtaccatgtcctgtagtgacaaaatcctacgctggaacgtgctgggcctgcaaggggcactgttgacccacttcctgcagcccatttatctcaaatctgtcacattgggttaccttttcagccaagggcatctgacccgtgctatttgctgtcgtgtgacaagagatgggagtgcatttgaggatggactacgacatccctttattgtcaaccaccccaaggttggcagagtcagcatatatgattccaaaaggcaatccgggaagactaaggagacaagcgtcaactggtgtctggctgatggctatgacctggagatcctggacggtaccagaggcactgtggatgggccacggaatgaattgtcccgggtctccaaaaagaacatttttcttctatttaagaagctctgctccttccgttaccgcagggatctactgagactctcctatggtgaggccaagaaagctgcccgtgactacgagacggccaagaactacttcaaaaaaggcctgaaggatatgggctatgggaactggattagcaaaccccaggaggaaaagaacttttatctctgcccagtatagtatgctccagtgacagatggattagggtgtgtcatactagggtgtgagagaggtaggtcgtagcattcctcatcacatggtcaggggatttttttttctcctttttttttctttttaagccataattggtgatactgaaaactttgggttcccatttatcctgctttctttgggattgctaggcaaggtctggccaggccccccttttttcccccaagtgaagaggcagaaacctaagaagttatcttttctttctacccaaagcatacatagtcactgagcacctgcggtccatttcctcttaaaagttttgttttgatttgtttccatttcctttccctttgtgtttgctacactgacctcttgcggtcttgattaggtttcagtcaactctggatcatgtcagggactgataatttcatttgtggattacgcagacccctctacttcccctctttcccttctgagattctttccttgtgatctgaatgtctccttttccccctcagagggcaaagaggtgaacataaaggatttggtgaaacatttgtaagggtaggagttgaaaactgcagttcccagtgccacggaagtgtgattggagcctgcagataatgctcagccatcctcccatcctgcactttagccagctgcagggcgggcaaggcaaggaaagctgcttccctggaagtgtatcactttctccggcagctgggaagtctagaaccagccagactgggttaagggagctgctcaagcaatagcagaggtttcacccggcaggatgacacagaccacttcccagggagcacgggcatgccttggaatattgccaagcttccagctgcctcttctcttaaagcattcctaggaatattttccccgccaatgctgggcgtacaccctagccaacgggacaaatcctagagggtataaaatcatctctgctcagataatcatgacttagcaagaataagggcaaaaaatcctgttggcttaacgtcactgttccacccggtgtaatatctctcatgacagtgacaccaagggaagttgactaagtcacatgtaaattaggagtgttttaaagaatgccatagatgttgtcttcaaactctgtgaggtagaatcctttgtctatacctccatgaacattgactcgtgtgttcagagcctttggcctctctgtggagtctggctctctggctcctgtgcattctttgaatagtcactcgtaaaaactgtcagtgcttgaaactgtttcctttactcatgttgaagggactttgttggcttttagagtgttggtcatgactccaagagcagagcagggaagagcccaagcatagacttggtgccgtggtgatggctgcagtccagttttgtgatgctgcttttacgtgtccctcgataacagtcagctagacacactcaggaggactactgaggctctgcgaccttcaggagctgagcctgcctctctcctttagatgacagaccttcatctgggaacgtgctgagccagcaccctcagatgatttccctccaaactgctgactaggtcatcctctgtctggtagagacattcacatctttgcttttattctgtgctctctgtacttttgaccaaaaattgaccaaagtaagaaaatgcaagttctaaaaatagactaaggatgcctttgcagaacaccaaagcatcccaaggaactggtagggaagtggcgcctgtctcctggagtggaagaggcctgctccctggctctgggtctgctgggggcacagtaaatcagtcttggcacccacatccagggcagagaggtctgtggttctcagcatcagaaggcagcgcagcccctctcctcttcaggctacagggttgtcacctgctgagtcctcaggttgtttggcctctctggtccatcttgggcattaggttctccagcagagctctggccagctgcctcttctttaactgggaacacaggctctcacaagatcagaacccccactcacccccaagatcttatctagcaagcctgtagtattcagtttctgttgtaggaagagagcgaggcatccctgaattccacgcatctgctggaaacgagccgtgtcagatcgcacatccctgcgcccccatgcccccatgcccctctgagtcacacaggacagaggaggcagagcttctgcccactgttatcttcactttctttgtccagtcttttgtttttaataagcagtgaccctccctactcttctttttaatgatttttgtagttgatttgtctgaactgtggctactgtgcattccttgaataatcacttgtaaaaattgtcagtgcttgaagctgtttcctttactcacattgaagggacttcgttggttttttggagtcttggttgtgactccaagagcagagtgaggaagacccccaagcatagactcgggtactgtgatgatggctgcagtccagttttatgattctgcttttatgtgtcccttgataacagtgacttaacaatatacattcctcataaataaaaaaaaaacaagaatctg

SEQ ID NO: 1645 - DNA, 6622 bp, Homo sapiens
cgaaattgaaccggagccatcttgggcccggcgcgcagacccgcggagtttcccgtgccgacgccccggggccacttccagtgcggagtagcggaggcgtgggggcctcgaggggctggcgcggcccagcggtcgggccagggtcgtgccgccggcgggtcgggccgggcaatgcctcgcgggcgcaatgaatccgcggcaggggtattccctcagcggatactacacccatccatttcaaggctatgagcacagacagctcagataccagcagcctgggccaggatcttcccccagtagtttcctgcttaagcaaatagaatttctcaaggggcagctcccagaagcaccggtgattggaaagcagacaccgtcactgccaccttccctcccaggactccggccaaggtttccagtactacttgcctccagtaccagaggcaggcaagtggacatcaggggtgtccccaggggcgtgcatctcggaagtcaggggctccagagagggttccagcatccttcaccacgtggcaggagtctgccacagagaggtgttgattgcctttcctcacatttccaggaactgagtatctaccaagatcaggaacaaaggatcttaaagttcctggaagagcttggggaagggaaggccaccacagcacatgatctgtctgggaaacttgggactccgaagaaagaaatcaatcgagttttatactccctggcaaagaagggcaagctacagaaagaggcaggaacaccccctttgtggaaaatcgcggtctccactcaggcttggaaccagcacagcggagtggtaagaccagacggtcatagccaaggagccccaaactcagacccgagtttggaaccggaagacagaaactccacatctgtctcagaagatcttcttgagccttttattgcagtctcagctcaggcttggaaccagcacagcggagtggtaagaccagacagtcatagccaaggatccccaaactcagacccaggtttggaacctgaagacagcaactccacatctgccttggaagatcctcttgagtttttagacatggccgagatcaaggagaaaatctgcgactatctcttcaatgtgtctgactcctctgccctgaatttggctaaaaatattggccttaccaaggcccgagatataaatgctgtgctaattgacatggaaaggcagggggatgtctatagacaagggacaacccctcccatatggcatttgacagacaagaagcgagagaggatgcaaatcaagagaaatacgaacagtgttcctgaaaccgctccagctgcaatccctgagaccaaaagaaacgcagagttcctcacctgtaatatacccacatcaaatgcctcaaataacatggtaaccacagaaaaagtggagaatgggcaggaacctgtcataaagttagaaaacaggcaagaggccagaccagaaccagcaagactgaaaccacctgttcattacaatggcccctcaaaagcagggtatgttgactttgaaaatggccagtgggccacagatgacatcccagatgacttgaatagtatccgcgcagcaccaggtgagtttcgagccatcatggagatgccctccttctacagtcatggcttgccacggtgttcaccctacaagaaactgacagagtgccagctgaagaaccccatcagcgggctgttagaatatgcccagttcgctagtcaaacctgtgagttcaacatgatagagcagagtggaccaccccatgaacctcgatttaaattccaggttgtcatcaatggccgagagtttcccccagctgaagctggaagcaagaaagtggccaagcaggatgcagctatgaaagccatgacaattctgctagaggaagccaaagccaaggacagtggaaaatcagaagaatcatcccactattccacagagaaagaatcagagaagactgcagagtcccagacccccaccccttcagccacatccttcttttctgggaagagccccgtcaccacactgcttgagtgtatgcacaaattggggaactcctgcgaattccgtctcctgtccaaagaaggccctgcccatgaacccaagttccaatactgtgttgcagtgggagcccaaactttccccagtgtgagtgctcccagcaagaaagtggcaaagcagatggccgcagaggaagccatgaaggccctgcatggggaggcgaccaactccatggcttctgataaccagcctgaaggtatgatctcagagtcacttgataacttggaatccatgatgcccaacaaggtcaggaagattggcgagctcgtgagatacctgaacaccaaccctgtgggtggccttttggagtacgcccgctcccatggctttgctgctgaattcaagttggtcgaccagtccggacctcctcacgagcccaagttcgtttaccaagcaaaagttgggggtcgctggttcccagccgtctgcgcacacagcaagaagcaaggcaagcaggaagcagcagatgcggctctccgtgtcttgattggggagaacgagaaggcagaacgcatgggtttcacagaggtaaccccagtgacaggggccagtctcagaagaactatgctcctcctctcaaggtccccagaagcacagccaaagacactccctctcactggcagcaccttccatgaccagatagccatgctgagccaccggtgcttcaacactctgactaacagcttccagccctccttgctcggccgcaagattctggccgccatcattatgaaaaaagactctgaggacatgggtgtcgtcgtcagcttgggaacagggaatcgctgtgtgaaaggagattctctcagcctaaaaggagaaactgtcaatgactgccatgcagaaataatctcccggagaggcttcatcaggtttctctacagtgagttaatgaaatacaactcccagactgcgaaggatagtatatttgaacctgctaagggaggagaaaagctccaaataaaaaagactgtgtcattccatctgtatatcagcactgctccgtgtggagatggcgccctctttgacaagtcctgcagcgaccgtgctatggaaagcacagaatcccgccactaccctgtcttcgagaatcccaaacaaggaaagctccgcaccaaggtggagaacggagaaggcacaatccctgtggaatccagtgacattgtgcctacgtgggatggcattcggctcggggagagactccgtaccatgtcctgtagtgacaaaatcctacgctggaacgtgctgggcctgcaaggggcactgttgacccacttcctgcagcccatttatctcaaatctgtcacattgggttaccttttcagccaagggcatctgacccgtgctatttgctgtcgtgtgacaagagatgggagtgcatttgaggatggactacgacatccctttattgtcaaccaccccaaggttggcagagtcagcatatatgattccaaaaggcaatccgggaagactaaggagacaagcgtcaactggtgtctggctgatggctatgacctggagatcctggacggtaccagaggcactgtggatgggccacggaatgaattgtcccgggtctccaaaaagaacatttttcttctatttaagaagctctgctccttccgttaccgcagggatctactgagactctcctatggtgaggccaagaaagctgcccgtgactacgagacggccaagaactacttcaaaaaaggcctgaaggatatgggctatgggaactggattagcaaaccccaggaggaaaagaacttttatctctgcccagtatagtatgctccagtgacagatggattagggtgtgtcatactagggtgtgagagaggtaggtcgtagcattcctcatcacatggtcaggggatttttttttctcctttttttttctttttaagccataattggtgatactgaaaactttgggttcccatttatcctgctttctttgggattgctaggcaaggtctggccaggccccccttttttcccccaagtgaagaggcagaaacctaagaagttatcttttctttctacccaaagcatacatagtcactgagcacctgcggtccatttcctcttaaaagttttgttttgatttgtttccatttcctttccctttgtgtttgctacactgacctcttgcggtcttgattaggtttcagtcaactctggatcatgtcagggactgataatttcatttgtggattacgcagacccctctacttcccctctttcccttctgagattctttccttgtgatctgaatgtctccttttccccctcagagggcaaagaggtgaacataaaggatttggtgaaacatttgtaagggtaggagttgaaaactgcagttcccagtgccacggaagtgtgattggagcctgcagataatgctcagccatcctcccatcctgcactttagccagctgcagggcgggcaaggcaaggaaagctgcttccctggaagtgtatcactttctccggcagctgggaagtctagaaccagccagactgggttaagggagctgctcaagcaatagcagaggtttcacccggcaggatgacacagaccacttcccagggagcacgggcatgccttggaatattgccaagcttccagctgcctcttctcttaaagcattcctaggaatattttccccgccaatgctgggcgtacaccctagccaacgggacaaatcctagagggtataaaatcatctctgctcagataatcatgacttagcaagaataagggcaaaaaatcctgttggcttaacgtcactgttccacccggtgtaatatctctcatgacagtgacaccaagggaagttgactaagtcacatgtaaattaggagtgttttaaagaatgccatagatgttgattcttaactgctacagataacctgtaattgagcagatttaaaattcaggcatacttttccatttatccaagtgctttcatttttccagatggcttcagaagtaggctcgtgggcagggcgcagacctgatctttatagggttgacatagaaagcagtagttgtgggtgaaagggcaggttgtcttcaaactctgtgaggtagaatcctttgtctatacctccatgaacattgactcgtgtgttcagagcctttggcctctctgtggagtctggctctctggctcctgtgcattctttgaatagtcactcgtaaaaactgtcagtgcttgaaactgtttcctttactcatgttgaagggactttgttggcttttagagtgttggtcatgactccaagagcagagcagggaagagcccaagcatagacttggtgccgtggtgatggctgcagtccagttttgtgatgctgcttttacgtgtccctcgataacagtcagctagacacactcaggaggactactgaggctctgcgaccttcaggagctgagcctgcctctctcctttagatgacagaccttcatctgggaacgtgctgagccagcaccctcagatgatttccctccaaactgctgactaggtcatcctctgtctggtagagacattcacatctttgcttttattctgtgctctctgtacttttgaccaaaaattgaccaaagtaagaaaatgcaagttctaaaaatagactaaggatgcctttgcagaacaccaaagcatcccaaggaactggtagggaagtggcgcctgtctcctggagtggaagaggcctgctccctggctctgggtctgctgggggcacagtaaatcagtcttggcacccacatccagggcagagaggtctgtggttctcagcatcagaaggcagcgcagcccctctcctcttcaggctacagggttgtcacctgctgagtcctcaggttgtttggcctctctggtccatcttgggcattaggttctccagcagagctctggccagctgcctcttctttaactgggaacacaggctctcacaagatcagaacccccactcacccccaagatcttatctagcaagcctgtagtattcagtttctgttgtaggaagagagcgaggcatccctgaattccacgcatctgctggaaacgagccgtgtcagatcgcacatccctgcgcccccatgcccccatgcccctctgagtcacacaggacagaggaggcagagcttctgcccactgttatcttcactttctttgtccagtcttttgtttttaataagcagtgaccctccctactcttctttttaatgatttttgtagttgatttgtctgaactgtggctactgtgcattccttgaataatcacttgtaaaaattgtcagtgcttgaagctgtttcctttactcacattgaagggacttcgttggttttttggagtcttggttgtgactccaagagcagagtgaggaagacccccaagcatagactcgggtactgtgatgatggctgcagtccagttttatgattctgcttttatgtgtcccttgataacagtgacttaacaatatacattcctcataaataaaaaaaaaacaagaatctgaattcttag

SEQ ID NO: 1646 - DNA, 6287 bp, Homo sapiens; identical to SEQ ID NO: 1642

SEQ ID NO: 1647 - DNA, 4683 bp, Homo sapiens
ggcggccgagcggagccgagcgcagccgagccgggccgagccgggccgggccgggcccaggagcgcgcggatgatgcgggcggccaggcgggggtcgacgggtccctgaagcccgcgccccgggccagcaagggagccccgcgcaggccgcgcgcatccggaggcggccgggccccgccatggccggggtcagctacgcggcgccctggtgggtgagcctcctgcaccggctgccccacttcgacctgagctgggaggccactagcagccagttccggcccgaggacaccgactaccagcaggccctgctgctcctgggggccgccgccctggcctgcctcgccctggacctcctcttcctgctcttctactccttctggctgtgctgccggcggcgcaagagcgaggagcacctggacgccgactgctgctgcacggcctggtgtgtcatcatcgccacgctggtgtgcagcgccggcatcgcagtgggattctacggcaacggggagaccagtgatggcatccatagggccacctactcgctccgccacgccaaccgcacggtggccggggtccaggaccgcgtgtgggacacggcggtggggctgaaccacacggcggagcccagcctgcagaccctggagcggcagctggccgggcggcccgagcccctgcgagccgtacagaggctgcagggcctgctggagacgctgctgggctacacggccgccatccccttttggaggaacacggcggtgtcgctggaggtgctggcggagcaggtggatctctacgactggtacaggtggctgggctacctgggcctgctgctgctggacgtcatcatctgcctcctggtgctggttggcctcatccgcagctccaagggcatcctggtgggggtctgcctgctgggagtcctggccctggtcatcagctggggcgcgctgggcttggagctggctgtgtccgtgggctccagcgacttctgtgtggaccctgacgcctacgtgaccaaaatggtggaggagtactcggtgctgagtggggacatcctgcagtactacctggcctgctcgccccgcgccgccaaccccttccagcagaagctgtcgggcagccacaaggcactggtggagatgcaggatgtcgtggctgagcttctgaggaccgtcccctgggagcagccggccactaaggaccccctcctccgcgtccaggaggtgctgaatggcacggaggtgaacctgcagcacctcaccgccctggtggactgccgcagcctgcatctggactacgtgcaagcgctgaccggcttctgctatgacggcgtggagggcctcatctacctggccctcttctccttcgtcacagccctcatgttcagctccatcgtctgcagcgtcccgcacacctggcagcaaaagagaggccctgatgaggacggggaggaggaggccgctccagggccgcggcaggcgcacgacagcctctaccgcgtccacatgcccagcctgtacagctgtggcagcagctacggcagtgagaccagcatcccggccgcggcccacaccgtcagcaacgccccggtcactgagtacatgagccagaacgctaatttccagaacccccgctgtgagaacaccccactcattgggcgcgagtccccgccgccctcatacacctccagcatgagagccaaatacctcgccacgagccagcctcgccctgactccagcggcagccactagaccgcgcccggcagccacccaccccacgtgccaacttcccctccccgtgccagcactgccgcttccacctgggccacccaccggaccctcgcacgccgtgccaggcctgccccagacgcgtctgcaggccgcttgccctcctgtcccctccccgcaggggcacagtggagacgcaggggctctgggcccgtaccgccaactcgggtcacacctgaacgctgctgccagccgatgccccagccctgcacgccacccactatcccggcacgctccctctgcagatggtcgccgcacctacaagccctggccgcacccaacctgtgttgttgccgcccggcccttccctccacagctctccttcctcccgcccggcacttctgtggaccccttcttagttcacaggcacggctggggccgctctgtgctggcgcctgctggccactgagggacagggacacgtgccacctgctcatctctgccctgaggtcaccccgtggtccctccacgtgcccatctctctgcagtgccctcctcgcctgtgcagcccgcccacccacaggctcacccctcctgccggctgccagaggccccctccagcagggcctctctccgttgccccagcttcactctctccctcagcacctgccctgctggaggccccagccctccgtggacagcaggggccacgtggagcccgggccgctcacccgccacccagtgctggccgccttcttggtgccaaacccccttcccccacccagagactgggcagctgtgtctggttcgttctttgcactaaccacatttgtcatctctagggcaggctggggctgcgggctgagggggaccgctggcaccccccttccctcccttcttggttccatttccatccatgacaggtacagcatcccaggagcccggcctgaggggctggacccgagccggctgtgaacatccctcagcccctgctgtccccccttgggactaaccactaacctcacccccaaactccacgggtgcccctagctggcccagagccggcagtgtgagcccaagtccgggctggagccgaggccggagcagctgtctgggagtcaaggctgcagtagcgtttcttcatggggtgctccagggggtgccacagaccgacaggcagcccaagggcctggacacccctccccaggcaggtgctgccccaggaggactgtcctcgggaatgaacctcccgcgggctttggactgaggtccctgtggcctcggtctcctccccatgaagtgggagcgaggctccccaatggtgcttttggctttagtgtacgatgtttgctgtgcttcccgccgtggagggcagagccaccccacatcaggatcggacgtgctacccctcccggtcccggccctggcccagccagcccagccctcgaggctcgatgcctgtgccaaggccaggggcagccagagggcagctggatggccacgtgcaggggtcaaggctgggccctgcagtggggcgggccgccagccccagcagtttacagacgcatggctcttcctcccagagcagccggcagctacctggaccggaaatgtcctcatcccctccctggggccaggctctgccctggccttcctctgtgaacccctcctttctttgtgctggtgtctgggaccaaaaagggggaatatgggagggcagagtggggaggggagtccatgggcctggggccccaagccggggcgtctgagctccccaggcatgaccaaacctcagtggaggggcctctgcttcaggccccgcctggctgacattctgagcccccctcggaggccccgccacagccaacctgcccagtctttcctctgggcttgacccgccaggggagttctccaggcctagggccaggagagaggccctggcaccctggcgtgggtgcccgccaaacgccctgcgaccgctcagaagcacaaatgctgtccatggccgtgaggctgcctgccaggtgaatggacatagcgtgagaggcggtgaggccagggcttccagcctcgtgctgtctcgggactcctgaccgtggtgtgcgtgtgtgcccgtctgtgactttctactcaccaaggttgaagaaaggaaacggggaaaatcaaaaggggttcaaaccccacctcagtaggtggaggggagcgcctgccattggttgtatttttgttctgagttttcggtgccgtgttcctaactactccatcccatgacctcgccacacctactggggcatctggctggtgcctgctgccatggccagcccccactctcaccctgcacagggggtcttgcagcccccaggcccacagcctcgttgggaggacagggtggccctggggacaagagggaggagcccaggggcttacctcactgagagtgctccccagcaggcatccactaccccagggccccccacatgtcatggcaaggttggtagtgaatgggcctggttgggagcagcccctggcccattgcccacccacccatctcactatgcaattcgagttccaagcaacatttgctcctgccctggggccagctctgccccagccctgagaggggtggtgaggcagccccctggaccccagaaccccagacaagggggcaggcgggggaccagggcctctcctgtgggatctttgttttgtgtttaaccataatggttgtgaactgaggcctgaaccattttgcatttccccctcctccagcctctgtagggccatggctgtatgtactgtcgctgtgtttttttgtttttttagaactgggtttgggggctgatttttatttctttgggggctttttttcttggcaaatactaaaaatctcgtcaatgtaatttctgtggtttctattcagcttgggtttcatgttttaaaataaattttaaaaagc

SEQ ID NO: 1648 - DNA, 4683 bp, Homo sapiens; identical to SEQ ID NO: 1647

SEQ ID NO: 1649 - DNA, 4891 bp, Homo sapiens
ggcggccgagcggagccgagcgcagccgagccgggccgagccgggccgggccgggcccaggagcgcgcggatgatgcgggcggccaggcgggggtcgacgggtccctgaagcccgcgccccgggccagcaagggagccccgcgcaggccgcgcgcatccggaggcggccgggccccgccatggccggggtcagctacgcggcgccctggtgggtgagcctcctgcaccggctgccccacttcgacctgagctgggaggccactagcagccagttccggcccgaggacaccgactaccagcaggccctgctgctcctgggggccgccgccctggcctgcctcgccctggacctcctcttcctgctcttctactccttctggctgtgctgccggcggcgcaagagcgaggagcacctggacgccgactgctgctgcacggcctggtgtgtcatcatcgccacgctggtgtgcagcgccggcatcgcagtgggattctacggcaacggggagaccagtgatggcatccatagggccacctactcgctccgccacgccaaccgcacggtggccggggtccaggaccgcgtgtgggacacggcggtggggctgaaccacacggcggagcccagcctgcagaccctggagcggcagctggccgggcggcccgagcccctgcgagccgtacagaggctgcagggcctgctggagacgctgctgggctacacggccgccatccccttttggaggaacacggcggtgtcgctggaggtgctggcggagcaggtggatctctacgactggtacaggtggctgggctacctgggcctgctgctgctggacgtcatcatctgcctcctggtgctggttggcctcatccgcagctccaagggcatcctggtgggggtctgcctgctgggagtcctggccctggtcatcagctggggcgcgctgggcttggagctggctgtgtccgtgggctccagcgacttctgtgtggaccctgacgcctacgtgaccaaaatggtggaggagtactcggtgctgagtggggacatcctgcagtactacctggcctgctcgccccgcgccgccaaccccttccagcagaagctgtcgggcagccacaaggcactggtggagatgcaggatgtcgtggctgagcttctgaggaccgtcccctgggagcagccggccactaaggaccccctcctccgcgtccaggaggtgctgaatggcacggaggtgaacctgcagcacctcaccgccctggtggactgccgcagcctgcatctggactacgtgcaagcgctgaccggcttctgctatgacggcgtggagggcctcatctacctggccctcttctccttcgtcacagccctcatgttcagctccatcgtctgcagcgtcccgcacacctggcagcaaaagagaggccctgatgaggacggggaggaggaggccgctccagggccgcggcaggcgcacgacagcctctaccgcgtccacatgcccagcctgtacagctgtggcagcagctacggcagtgagaccagcatcccggccgcggcccacaccgtcagcaacgccccggtcactgagtacatgagccagaacgctaatttccagaacccccgctgtgagaacaccccactcattgggcgcgagtccccgccgccctcacgctatctggctgccctggactctggcagccacgcgggctggcagtttaagcccatggacagtgcccgaacgctgtgtacacctccagcatgagagccaaatacctcgccacgagccagcctcgccctgactccagcggcagccactagaccgcgcccggcagccacccaccccacgtgccaacttcccctccccgtgccagcactgccgcttccacctgggccacccaccggaccctcgcacgccgtgccaggcctgccccagacgcgtctgcaggccgcttgccctcctgtcccctccccgcaggggcacagtggagacgcaggggctctgggcccgtaccgccaactcgggtcacacctgaacgctgctgccagccgatgccccagccctgcacgccacccactatcccggcacgctccctctgcagatggtcgccgcacctacaagccctggccgcacccaacctgtgttgttgccgcccggcccttccctccacagctctccttcctcccgcccggcacttctgtggaccccttcttagttcacaggcacggctggggccgctctgtgctggcgcctgctggccactgagggacagggacacgtgccacctgctcatctctgccctgaggtcaccccgtggtccctccacgtgcccatctctctgcagtgccctcctcgcctgtgcagcccgcccacccacaggctcacccctcctgccggctgccagaggccccctccagcagggcctctctccgttgccccagcttcactctctccctcagcacctgccctgctggaggccccagccctccgtggacagcaggggccacgtggagcccgggccgctcacccgccacccagtgctggccgccttcttggtgccaaacccccttcccccacccagagactgggcagctgtgtctggttcgttctttgcactaaccacatttgtcatctctagggcaggctggggctgcgggctgagggggaccgctggcaccccccttccctcccttcttggttccatttccatccatgacaggtacagcatcccaggagcccggcctgaggggctggacccgagccggctgtgaacatccctcagcccctgctgtccccccttgggactaaccactaacctcacccccaaactccacgggtgcccctagctggcccagagccggcagtgtgagcccaagtccgggctggagccgaggccggagcagctgtctgggagtcaaggctgcagtagcgtttcttcatggggtgctccagggggtgccacagaccgacaggcagcccaagggcctggacacccctccccaggcaggtgctgccccaggaggactgtcctcgggaatgaacctcccgcgggctttggactgaggtccctgtggcctcggtctcctccccatgaagtgggagcgaggctccccaatggtgcttttggctttagtgtacgatgtttgctgtgcttcccgccgtggagggcagagccaccccacatcaggatcggacgtgctacccctcccggtcccggccctggcccagccagcccagccctcgaggctcgatgcctgtgccaaggccaggggcagccagagggcagctggatggccacgtgcaggggtcaaggctgggccctgcagtggggcgggccgccagccccagcagtttacagacgcatggctcttcctcccagagcagccggcagctacctggaccggaaatgtcctcatcccctccctggggccaggctctgccctggccttcctctgtgaacccctcctttctttgtgctggtgtctgggaccaaaaagggggaatatgggagggcagagtggggaggggagtccatgggcctggggccccaagccggggcgtctgagctccccaggcatgaccaaacctcagtggaggggcctctgcttcaggccccgcctggctgacattctgagcccccctcggaggccccgccacagccaacctgcccagtctttcctctgggcttgacccgccaggggagttctccaggcctagggccaggagagaggccctggcaccctggcgtgggtgcccgccaaacgccctgcgaccgctcagaagcacaaatgctgtccatggccgtgaggctgcctgccaggtgaatggacatagcgtgagaggcggtgaggccagggcttccagcctcgtgctgtctcgggactcctgaccgtggtgtgcgtgtgtgcccgtctgtgactttctactcaccaaggttgaagaaaggaaacggggaaaatcaaaaggggttcaaaccccacctcagtaggtggaggggagcgcctgccattggttgtatttttgttctgagttttcggtgccgtgttcctaactactccatcccatgacctcgccacacctactggggcatctggctggtgcctgctgccatggccagcccccactctcaccctgcacagggggtcttgcagcccccaggcccacagcctcgttgggaggacagggtggccctggggacaagagggaggagcccaggggcttacctcactgagagtgctccccagcaggcatccactaccccagggccccccacatgtcatggcaaggttggtagtgaatgggcctggttgggagcagcccctggcccattgcccacccacccatctcactatgcaattcgagttccaagcaacatttgctcctgccctggggccagctctgccccagccctgagaggggtggtgaggcagccccctggaccccagaaccccagacaagggggcaggcgggggaccagggcctctcctgtgggatctttgttttgtgtttaaccataatggttgtgtactgaaccacttcatatttgttatatataatatatatatatataatctccttaagactcagcctcctggtttacccccccggcctgggcatctgacctcccccaccccagtgtgatttaacatccaggaactgaggcctgaaccattttgcatttccccctcctccagcctctgtagggccatggctgtatgtactgtcgctgtgtttttttgtttttttagaactgggtttgggggctgatttttatttctttgggggctttttttcttggcaaatactaaaaatctcgtcaatgtaatttctgtggtttctattcagcttgggtttcatgttttaaaataaattttaaaaagcaa

SEQ ID NO: 1650 - DNA, 4838 bp, Homo sapiens
cgggcgcgggcggccgagcggagccgagcgcagccgagccgggccgagccgggccgggccgggcccaggagcgcgcggatgatgcgggcggccaggcgggggtcgacgggtccctgaagcccgcgccccgggccagcaagggagccccgcgcaggccgcgcgcatccggaggcggccgggccccgccatggccggggtcagctacgcggcgccctggtgggtgagcctcctgcaccggctgccccacttcgacctgagctgggaggccactagcagccagttccggcccgaggacaccgactaccagcaggccctgctgctcctgggggccgccgccctggcctgcctcgccctggacctcctcttcctgctcttctactccttctggctgtgctgccggcggcgcaagagcgaggagcacctggacgccgactgctgctgcacggcctggtgtgtcatcatcgccacgctggtgtgcagcgccggcatcgcagtgggattctacggcaacggggagaccagtgatggcatccatagggccacctactcgctccgccacgccaaccgcacggtggccggggtccaggaccgcgtgtgggacacggcggtggggctgaaccacacggcggagcccagcctgcagaccctggagcggcagctggccgggcggcccgagcccctgcgagccgtacagaggctgcagggcctgctggagacgctgctgggctacacggccgccatccccttttggaggaacacggcggtgtcgctggaggtgctggcggagcaggtggatctctacgactggtacaggtggctgggctacctgggcctgctgctgctggacgtcatcatctgcctcctggtgctggttggcctcatccgcagctccaagggcatcctggtgggggtctgcctgctgggagtcctggccctggtcatcagctggggcgcgctgggcttggagctggctgtgtccgtgggctccagcgacttctgtgtggaccctgacgcctacgtgaccaaaatggtggaggagtactcggtgctgagtggggacatcctgcagtactacctggcctgctcgccccgcgccgccaaccccttccagcagaagctgtcgggcagccacaaggcactggtggagatgcaggatgtcgtggctgagcttctgaggaccgtcccctgggagcagccggccactaaggaccccctcctccgcgtccaggaggtgctgaatggcacggaggtgaacctgcagcacctcaccgccctggtggactgccgcagcctgcatctggactacgtgcaagcgctgaccggcttctgctatgacggcgtggagggcctcatctacctggccctcttctccttcgtcacagccctcatgttcagctccatcgtctgcagcgtcccgcacacctggcagcaaaagagaggccctgatgaggacggggaggaggaggccgctccagggccgcggcaggcgcacgacagcctctaccgcgtccacatgcccagcctgtacagctgtggcagcagctacggcagtgagaccagcatcccggccgcggcccacaccgtcagcaacgccccggtcactgagtacatgagccagaacgctaatttccagaacccccgctgtgagaacaccccactcattgggcgcgagtccccgccgccctcatacacctccagcatgagagccaaatacctcgccacgagccagcctcgccctgactccagcggcagccactagaccgcgcccggcagccacccaccccacgtgccaacttcccctccccgtgccagcactgccgcttccacctgggccacccaccggaccctcgcacgccgtgccaggcctgccccagacgcgtctgcaggccgcttgccctcctgtcccctccccgcaggggcacagtggagacgcaggggctctgggcccgtaccgccaactcgggtcacacctgaacgctgctgccagccgatgccccagccctgcacgccacccactatcccggcacgctccctctgcagatggtcgccgcacctacaagccctggccgcacccaacctgtgttgttgccgcccggcccttccctccacagctctccttcctcccgcccggcacttctgtggaccccttcttagttcacaggcacggctggggccgctctgtgctggcgcctgctggccactgagggacagggacacgtgccacctgctcatctctgccctgaggtcaccccgtggtccctccacgtgcccatctctctgcagtgccctcctcgcctgtgcagcccgcccacccacaggctcacccctcctgccggctgccagaggccccctccagcagggcctctctccgttgccccagcttcactctctccctcagcacctgccctgctggaggccccagccctccgtggacagcaggggccacgtggagcccgggccgctcacccgccacccagtgctggccgccttcttggtgccaaacccccttcccccacccagagactgggcagctgtgtctggttcgttctttgcactaaccacatttgtcatctctagggcaggctggggctgcgggctgagggggaccgctggcaccccccttccctcccttcttggttccatttccatccatgacaggtacagcatcccaggagcccggcctgaggggctggacccgagccggctgtgaacatccctcagcccctgctgtccccccttgggactaaccactaacctcacccccaaactccacgggtgcccctagctggcccagagccggcagtgtgagcccaagtccgggctggagccgaggccggagcagctgtctgggagtcaaggctgcagtagcgtttcttcatggggtgctccagggggtgccacagaccgacaggcagcccaagggcctggacacccctccccaggcaggtgctgccccaggaggactgtcctcgggaatgaacctcccgcgggctttggactgaggtccctgtggcctcggtctcctccccatgaagtgggagcgaggctccccaatggtgcttttggctttagtgtacgatgtttgctgtgcttcccgccgtggagggcagagccaccccacatcaggatcggacgtgctacccctcccggtcccggccctggcccagccagcccagccctcgaggctcgatgcctgtgccaaggccaggggcagccagagggcagctggatggccacgtgcaggggtcaaggctgggccctgcagtggggcgggccgccagccccagcagtttacagacgcatggctcttcctcccagagcagccggcagctacctggaccggaaatgtcctcatcccctccctggggccaggctctgccctggccttcctctgtgaacccctcctttctttgtgctggtgtctgggaccaaaaagggggaatatgggagggcagagtggggaggggagtccatgggcctggggccccaagccggggcgtctgagctccccaggcatgaccaaacctcagtggaggggcctctgcttcaggccccgcctggctgacattctgagcccccctcggaggccccgccacagccaacctgcccagtctttcctctgggcttgacccgccaggggagttctccaggcctagggccaggagagaggccctggcaccctggcgtgggtgcccgccaaacgccctgcgaccgctcagaagcacaaatgctgtccatggccgtgaggctgcctgccaggtgaatggacatagcgtgagaggcggtgaggccagggcttccagcctcgtgctgtctcgggactcctgaccgtggtgtgcgtgtgtgcccgtctgtgactttctactcaccaaggttgaagaaaggaaacggggaaaatcaaaaggggttcaaaccccacctcagtaggtggaggggagcgcctgccattggttgtatttttgttctgagttttcggtgccgtgttcctaactactccatcccatgacctcgccacacctactggggcatctggctggtgcctgctgccatggccagcccccactctcaccctgcacagggggtcttgcagcccccaggcccacagcctcgttgggaggacagggtggccctggggacaagagggaggagcccaggggcttacctcactgagagtgctccccagcaggcatccactaccccagggccccccacatgtcatggcaaggttggtagtgaatgggcctggttgggagcagcccctggcccattgcccacccacccatctcactatgcaattcgagttccaagcaacatttgctcctgccctggggccagctctgccccagccctgagaggggtggtgaggcagccccctggaccccagaaccccagacaagggggcaggcgggggaccagggcctctcctgtgggatctttgttttgtgtttaaccataatggttgtgtactgaaccacttcatatttgttatatataatatatatatatataatctccttaagactcagcctcctggtttacccccccggcctgggcatctgacctcccccaccccagtgtgatttaacatccaggaactgaggcctgaaccattttgcatttccccctcctccagcctctgtagggccatggctgtatgtactgtcgctgtgtttttttgtttttttagaactgggtttgggggctgatttttatttctttgggggctttttttcttggcaaatactaaaaatctcgtcaatgtaatttctgtggtttctattcagcttgggtttcatgttttaaaataaattttaaaaagcaaaaaaaaaaaaaaaaaa

SEQ ID NO: 1651 - DNA, 4921 bp, Homo sapiens
caactgctcctggagtgacctaaggccagtgtttatcagaacttagccagggccagccaagcaggcacagatgctctgctatgaaatgccacgcaggcagagactgacaagcggtaggaactgagctttccccttggactgctgcttcctgctgtgttcaggggagggggtcactttctggcaactctgctgctgctgctgctgctgctgctacttcagcttcctctccactcaaggtaagcaggctaagggagggcaggctgctagggaaagctttgtaccatgaacaggatccgaaagtttttccgaggaagtgggcgagtcttggcatttatctttgtagcttctgtcatctggctcctctttgacatggcagctctccgcctctcattcagtgagatcaacactcgggtcatcaaggaagacattgtgaggagggagcggataggattcagagttcagccagaccaaggaaaaattttttacagcagcataaaagagatgaaacctcccctaaggggacatgggaaaggggcatggggcaaagagaatgttagaaaaactgaggagagtgtgctcaaggttgaggtggacttggaccaaacccagagggaaagaaaaatgcagaatgccctgggaaggggcaaggttgtgccgttgtggcatcctgcacatctgcagaccctccctgtgactcctaacaagcagaagacagacgggagaggcaccaaacctgaagcctcctctcaccaggggacaccaaagcaaacgacagctcagggggctccaaagacctcattcatagcagcaaaaggaactcaggtagtcaaaatatcagtacacatgggacgtgtcagtttaaaacaggagccccggaagagtcatagtcccagcagtgacacatcaaaactagcagctgaaagggacttgaatgtgaccatcagtcttagtactgatagaccaaagcagcgatcacaggcagtagcaaacgagagggcacaccctgccagcacagcagtgccgaagtctggggaagccatggccttaaacaaaactaagactcagagcaaagaagtcaatgcaaataaacacaaagccaatacgagtcttccttttcctaagttcactgtcaattcaaatcgcttaaggaagcaatctattaatgagacacctttgggaagtttgtcaaaggatgatggagctagaggggctcatgggaagaaactcaatttctctgaaagccatcttgtgattataaccaaagaggaagagcaaaaggcagaccccaaagaggtctctaattctaaaaccaaaacaatatttcctaaagtattgggtaaaagccaaagtaaacacatttccaggaatagaagtgagatgtcttcctcttcacttgctccacatagagtgccactgtcccaaactaaccatgctttaactggagggctagagccagcaaaaatcaacataactgccaaagccccctctacagaatacaaccagagtcatataaaagcccttttacctgaagacagtggaacgcaccaggtgttaagaattgatgtgacactttctccaagggaccccaaagctccagggcagtttgggcgtcctgtagttgtcccccatggaaaggagaaggaggcagaaagaagatggaaagaaggaaacttcaatgtctaccttagcgatttgatcccagtggatagagccattgaagacaccagacctgctggatgtgcagagcagctagttcacaataacctcccaaccaccagtgtcatcatgtgctttgtggatgaagtgtggtccactctcctgagatctgttcacagtgtcatcaatcgctctcctccacacctcatcaaggagattctgctggtagatgacttcagcaccaaagactatctaaaagataatttggataaatacatgtcccagtttccaaaagttcggattcttcgcctcaaagagagacatggcttaataagggccaggctggcaggagcacagaatgcaacaggtgatgtgttgacatttttagattctcatgtggaatgtaacgttggttggttggaacctcttctggaaagagtttatttaagtagaaagaaagtggcctgtccagtaatcgaagtcatcaatgataaggatatgagttacatgacagtggataactttcaaagaggcatctttgtgtggcccatgaactttggttggagaacaattcctccagatgtcattgcaaaaaacagaattaaagaaactgatacaataaggtgccctgtcatggctggtggattgttttctattgacaaaagttacttttttgaacttggaacatacgaccctggccttgatgtttggggtggggaaaatatggagctctcattcaaggtgtggatgtgtggtggtgaaattgagatcattccctgctcccgagtgggccatatattcagaaatgacaatccatattccttccccaaagaccggatgaagacagtggagcggaacttggtgcgggttgccgaggtctggctggatgagtataaggagctgttctatggccacggagaccacctcatcgaccaagggctagatgttggcaacctcacccagcaaagggagctgcgaaagaaactgaagtgcaaaagtttcaaatggtacttggagaatgtctttcctgacttaagggctcccattgtgagagctagtggtgtgcttattaatgtggctttgggtaaatgcatttccattgaaaacactacagtcattctggaagactgcgatgggagcaaagagcttcaacaatttaattacacctggttaagacttattaaatgtggagaatggtgtatagcccccatccctgataaaggagccgtaaggctgcacccttgtgataacagaaacaaagggctaaaatggctgcataaatcaacatcagtctttcatccagaactggtgaatcacattgtttttgaaaacaatcagcaattattatgcttggaaggaaatttttctcaaaagatcctgaaagtagctgcctgtgacccagtgaagccatatcaaaagtggaaatttgaaaaatattatgaagcctgaagtgtaactgatgtttttatatagtaaacccattaaatactgtgaaaataacactgaacttggaaactatatttctcagcggtagtttaaattttcaattttaataacatttgaatggaagattttttataaatcacaatatttggaataccaaaagatgactcaggaaaacagtccaacattggactgaagtccttcttcggaactgggtggcctttgaattgcctgctttccaccctatgctagacctcatcatgcaaatttccctgtgaaagctaacaggtaactggaaatgaagacagaaggacttgagaaagcatgaggatattcccaatgactatgtttggtaataatcagctcttctggcccacaagtaggaatgatcaatgagaacttaacttagtcctttatttggggattttttcatcaaacaaaaatttcttgagttcttatggctagaagacctcagatgcccacagctgtcacgtttgtgaaatccctccagactacatgcatgcttacctaacagtttgaaatagtattgatctactgctggtaaccctgcttgatggcagcattttgatctaaattacataatggtttttcccaatctgaatcagtggaaaaaaatttaagtgaggaagaagaggccttcaaatgcttatttaattctaggtatgaacactatttcagttcattttgtgcttttaaaactacagttttaaagatttatgataccaataacttcctagattcatgtggattttttttaaggcaatgaaaaaaggctggattataacacactgtagtaatcaaaaatgcatttaagcattgaatgcactctagtgcagggccaagtaagaggagttgaaatgagtaaagcagaaatagagctgctgaaagtttcttttatataaaaataataaaatactactttagatatagtagcattcacagggatgaaatatgcgaaaaatgggttctaaaatatttcaaagggaaaatgaagtgaaggaaacatcatgaaaggggaaaggaatgaggtaaacaagtcttaggaagagagttaagaaaaaattccgctggacttggccaaagaaagaaggggatctagtatctctatgaaggaaaaaagagtaaagccctcagtgtgaacccagtgagaacactgacaaatttgggaaaagttaaatactgatttcatccaaataaagcctctaatcttaagcataccaatactttggcataccagaagacaccttagaaatcaggatagcctttgcattcattttggtaagaaaactgatgctgagaggataaattacctaaaaatcttaaaacccaggcaagttagtcaaagaatcaagattagaattcaggtttccagagacagggctcattctaatgcctcaggtcactggcccgaacaaatctgcttcacagaattccttagaaagagatacacaattctttgctgggattgggtccctggaggacaaccatactatattcttgttaatatgttttttctttttttaaatttaaacttttgttcagttgagatgattgtgaaactaggtatctttcattctgactcctagtttaacatttaattttgactcccaatgagttacgtaaaagcaaaactataactaagaatgggaaaaagaactatttctgcacatttgtaacatatttaagatgttttcttcatataattgaaaactgcagatgagtaagagaatgactaggaaatgagatacagttatatgacacataatgatgttttagtcaacaatgaaccacatatttgaca

SEQ ID NO: 1652 - DNA, 3116 bp, Homo sapiens
gcgcgcgcgcgggcgggagcggagggcaacggggcggcgcgggcggccgggcgcagggtcgcgggaggtgacgcgcggcgaggatggcggcgcggggccgggggctgctgctgctgacgctgtcggtgctgttggcggcgggcccctccgccgctgcggccaagctcaacatccccaaagtgctgctgcccttcacgcgggccacgcgcgttaacttcacgctggaggcctcggagggctgctaccgctggttgtccacccggccggaggtggccagcatcgagccgctgggcctggacgagcagcagtgctcccagaaggcagtggtgcaggcccgcctgacccagcctgcccgcctcaccagcatcatcttcgcagaggacatcaccacaggccaggtcctgcgctgtgatgccattgtggacctcatccatgacatccagatcgtctccaccacccgcgagctctacctggaggactcccccctggagctgaagatccaggccctggactccgaagggaacaccttcagcactctggctggactggtcttcgagtggacgattgtgaaggactccgaggcggacaggttctcagactcccacaatgcgctgcgaatcctcactttcttggagtctacgtacatccctccttcttacatctcagagatggagaaggctgccaagcaaggggacaccatcctggtgtctgggatgaagaccgggagctccaagctcaaggctcgcatccaggaggctgtctacaagaatgtacgccctgcagaagtcaggctgctgattttggaaaacatccttctgaacccggcctatgacgtctacctgatggtgggaacctccattcactacaaggtgcagaagatcaggcaagggaaaattacagaactctccatgccttccgatcagtacgagttgcagcttcagaacagcatcccgggccccgaaggagacccagcccggccggtggctgtcttggcccaggacacgtcgatggtcactgcactgcagctgggacagagcagcctcgtccttggccacaggagtattcgcatgcaaggtgcttctaggttacccaacagcactatctacgtggtcgaacctggatacctagggttcactgttcaccctggtgacaggtgggtgctggagaccggccgcctgtatgaaatcaccatcgaagtttttgacaagttcagcaacaaggtctatgtatctgacaacatccgaattgaaactgtgcttcctgctgagttcttcgaggtgctctcgtcctcccagaatgggtcataccatcgcatcagggcactaaagaggggacagacggccattgacgcggccctcacctctgtggtggaccaggcaagggtccacatactacaggtgcctgtgtggaaccagcaggaggtggaaattcacatcccgatcaccctgtatcccagcatcttgacatttccgtggcaaccaaagacgggcgcctatcagtacacaataagggcccacggtggcagtgggaacttcagctggtcttcgtcaagccacctggttgccacagttactgtcaagggcgtgatgaccacaggcagtgacatcgggttcagtgtgatccaggcacatgatgtgcagaacccactccatttcggtgagatgaaggtgtatgtgatcgagccccacagcatggagtttgccccgtgccaggtggaggcacgtgtgggccaggccctggagctgcccctgaggatcagtggcctcatgcccggcggggccagtgaggtggtcaccttgagcgactgctcccactttgacttggctgtcgaggtggagaaccagggtgtgttccagccactcccagggaggctgccgccaggctctgagcactgcagcggcatccgggtaaaggccgaggcccagggctctaccacgcttcttgtgagctacagacacggccacgtccacctgagtgccaagatcaccattgctgcctacctgcccctcaaggctgtggatccctcctctgttgccttggtaaccctgggctcctcaaaggagatgctgtttgaaggaggtcccagaccttggatcctcgagccgtccaaattcttccagaacgtcaccgctgaggacactgacagcatcggcctggctctctttgccccccattcctcccggaattatcagcaacactggatccttgtgacctgtcaggccttgggtgagcaggtcatcgccctgtcggtggggaacaagcccagcctcaccaacccctttcctgcggtggagcctgccgtggtgaagttcgtctgcgccccaccgtccaggctcaccctcgcgcctgtctacaccagcccccagctggacatgtcctgtccgctgctgcagcagaacaagcaggtggtcccagtgtccagccaccgcaaccccctgctggacctggctgcttacgaccaggagggccgccggttcgacaacttcagctctctgagcatccagtgggagtccaccaggccagtgttggccagcatcgagcctgagctgcccatgcagctggtgtcccaggacgatgagagtggccaaaagaagctgcacggtttgcaggccattttggttcacgaggcatcaggaaccacagccatcactgccactgccactggctaccaggagtcccacctcagctctgccagaacaaagcagccgcatgaccctctggtgcctctgtcggcctccatagagctcatcctggtggaggacgtgagggtgagcccagaagaggtgaccatctacaaccaccctggcatccaggcagagctccgcatcagggaaggctcaggttacttcttcctcaacaccagcaccgcagatgttgtcaaggtggcctaccaggaggccaggggtgtcgccatggtaagcttgggccatcggtccccactgttggttttcattccttatctgggctgttgtgtggttaattgattgatcattttgaaagctagcacttgactcacactcggaatcccagaactttgggaggtcaaggcaggaagatcacttgagcccaggagttcaagaccagcctggacaatatagtgagacccccatctctac

SEQ ID NO: 1653 - DNA, 1851 bp, Homo sapiens
gcgcgcgcgcgggcgggagcggagggcaacggggcggcgcgggcggccgggcgcagggtcgcgggaggtgacgcgcggcgaggatggcggcgcggggccgggggctgctgctgctgacgctgtcggtgctgttggcggcgggcccctccgccgctgcggccaagctcaacatccccaaagtgctgctgcccttcacgcgggccacgcgcgttaacttcacgctggaggcctcggagggctgctaccgctggttgtccacccggccggaggtggccagcatcgagccgctgggcctggacgagcagcagtgctcccagaaggcagtggtgcaggcccgcctgacccagcctgcccgcctcaccagcatcatcttcgcagaggacatcaccacaggccaggtcctgcgctgtgatgccattgtggacctcatccatgacatccagatcgtctccaccacccgcgagctctacctggaggactcccccctggagctgaagatccaggccctggactccgaagggaacaccttcagcactctggctggactggtcttcgagtggacgattgtgaaggactccgaggcggacaggttctcagactcccacaatgcgctgcgaatcctcactttcttggagtctacgtacatccctccttcttacatctcagagatggagaaggctgccaagcaaggggacaccatcctggtgtctgggatgaagaccgggagctccaagctcaaggctcgcatccaggaggctgtctacaagaatgtacgccctgcagaagtcaggctgctgattttggaaaacatccttctgaacccggcctatgacgtctacctgatggtgggaacctccattcactacaaggtgcagaagatcaggcaagggaaaattacagaactctccatgccttccgatcagtacgagttgcagcttcagaacagcatcccgggccccgaaggagacccagcccggccggtggctgtcttggcccaggacacgtcgatggtcactgcactgcagctgggacagagcagcctcgtccttggccacaggagtattcgcatgcaaggtgcttctaggttacccaacagcactatctacgtggtcgaacctggatacctagggttcactgttcaccctggtgacaggtgggtgctggagaccggccgcctgtatgaaatcaccatcgaagtttttgacaagttcagcaacaaggtctatgtatctgacaacatccgaattgaaactgtgcttcctgctgagttcttcgaggtgctctcgtcctcccagaatgggtcataccatcgcatcagggcactaaagaggggacagacggccattgacgcggccctcacctctgtggtggaccaggatggaggggtccacatactacaggtgcctgtgtggaaccagcaggaggtggaaattcacatcccgatcaccctgtatcccagcatcttgacatttccgtggcaaccaaagacgggcgcctatcagtacacaataagggtacgtgagacccctcacctctgcgtgcattcctttggtgttttcatgggattgtggctttttgtccattctattacttttagtattactctctagtggttgtggagaattttaaatcacagtctttatgtttcctgaggtttccatcatagcaatgcattctggtaattaggaaaaaaaacaacaaaaaccaacaatgaaaaaattgagaataaggcagggtgcggtggctaacacctgcagtcccagcactttcggaggctgaagtgagaggattgcttaaacccaggagtttgataccaggctgagcaacatagggagacctccatctctactc

SEQ ID NO: 1654 - DNA, 3119 bp, Homo sapiens
gcgcgcgcgcgggcgggagcggagggcaacggggcggcgcgggcggccgggcgcagggtcgcgggaggtgacgcgcggcgaggatggcggcgcggggccgggggctgctgctgctgacgctgtcggtgctgttggcggcgggcccctccgccgctgcggccaagctcaacatccccaaagtgctgctgcccttcacgcgggccacgcgcgttaacttcacgctggaggcctcggagggctgctaccgctggttgtccacccggccggaggtggccagcatcgagccgctgggcctggacgagcagcagtgctcccagaaggcagtggtgcaggcccgcctgacccagcctgcccgcctcaccagcatcatcttcgcagaggacatcaccacaggccaggtcctgcgctgtgatgccattgtggacctcatccatgacatccagatcgtctccaccacccgcgagctctacctggaggactcccccctggagctgaagatccaggccctggactccgaagggaacaccttcagcactctggctggactggtcttcgagtggacgattgtgaaggactccgaggcggacaggttctcagactcccacaatgcgctgcgaatcctcactttcttggagtctacgtacatccctccttcttacatctcagagatggagaaggctgccaagcaaggggacaccatcctggtgtctgggatgaagaccgggagctccaagctcaaggctcgcatccaggaggctgtctacaagaatgtacgccctgcagaagtcaggctgctgattttggaaaacatccttctgaacccggcctatgacgtctacctgatggtgggaacctccattcactacaaggtgcagaagatcaggcaagggaaaattacagaactctccatgccttccgatcagtacgagttgcagcttcagaacagcatcccgggccccgaaggagacccagcccggccggtggctgtcttggcccaggacacgtcgatggtcactgcactgcagctgggacagagcagcctcgtccttggccacaggagtattcgcatgcaaggtgcttctaggttacccaacagcactatctacgtggtcgaacctggatacctagggttcactgttcaccctggtgacaggtgggtgctggagaccggccgcctgtatgaaatcaccatcgaagtttttgacaagttcagcaacaaggtctatgtatctgacaacatccgaattgaaactgtgcttcctgctgagttcttcgaggtgctctcgtcctcccagaatgggtcataccatcgcatcagggcactaaagaggggacagacggccattgacgcggccctcacctctgtggtggaccaggatggaggggtccacatactacaggtgcctgtgtggaaccagcaggaggtggaaattcacatcccgatcaccctgtatcccagcatcttgacatttccgtggcaaccaaagacgggcgcctatcagtacacaataagggcccacggtggcagtgggaacttcagctggtcttcgtcaagccacctggttgccacagttactgtcaagggcgtgatgaccacaggcagtgacatcgggttcagtgtgatccaggcacatgatgtgcagaacccactccatttcggtgagatgaaggtgtatgtgatcgagccccacagcatggagtttgccccgtgccaggtggaggcacgtgtgggccaggccctggagctgcccctgaggatcagtggcctcatgcccggcggggccagtgaggtggtcaccttgagcgactgctcccactttgacttggctgtcgaggtggagaaccagggtgtgttccagccactcccagggaggctgccgccaggctctgagcactgcagcggcatccgggtaaaggccgaggcccagggctctaccacgcttcttgtgagctacagacacggccacgtccacctgagtgccaagatcaccattgctgcctacctgcccctcaaggctgtggatccctcctctgttgccttggtaaccctgggctcctcaaaggagatgctgtttgaaggaggtcccagaccttggatcctcgagccgtccaaattcttccagaacgtcaccgctgaggacactgacagcatcggcctggctctctttgccccccattcctcccggaattatcagcaacactggatccttgtgacctgtcaggccttgggtgagcaggtcatcgccctgtcggtggggaacaagcccagcctcaccaacccctttcctgcggtggagcctgccgtggtgaagttcgtctgcgccccaccgtccaggctcaccctcgcgcctgtctacaccagcccccagctggacatgtcctgtccgctgctgcagcagaacaagcaggtggtcccagtgtccagccaccgcaaccccctgctggacctggctgcttacgaccaggagggccgccggttcgacaacttcagctctctgagcatccagtgggagtccaccaggccagtgttggccagcatcgagcctgagctgcccatgcagctggtgtcccaggacgatgagagtggccaaaagaagctgcacggtttgcaggccattttggttcacgaggcatcaggaaccacagccatcactgccactgccactggctaccaggagtcccacctcagctctgccagaacaaagcagccgcatgaccctctggtgcctctgtcggcctccatagagctcatcctggtggaggacgtgagggtgagcccagaagaggtgaccatctacaaccaccctggcatccaggcagagctccgcatcagggaaggctcaggttacttcttcctcaacaccagcaccgcagatgttgtcaaggtggcctaccaggaggccaggggtgtcgccatggtaagcttgggccatcggtccccactgttggttttcattccttatctgggctgttgtgtggttaattgattgatcattttgaaagctagcacttgactcacactcggaatcccagaactttgggaggtcaaggcaggaagatcacttgagcccaggagttcaagaccagcctggacaatatagtgagacccccatctctac

SEQ ID NO: 1655 - DNA, 2895 bp, Homo sapiens
gcttgattttttaggggttggagttagctaggaccaactgggaaaagaatcccgtaagtgggagaaaggctgtggtgttgttagggagtgcacttcagcctaagtggtgattagcagcatttagcctctaaaaataactggtgagcagagtttgtagtcaggtccaatttcagttctagaggcccttacagtgcagggattggccagtctcaagctctggtaggcaagtgcatgcagtgtgcctaaaacctgccagcagtacttttgagtttttttttttgttttgttttactttagcatttattattcatggattgaagaaatcaaaatggctgaagataaagagacaaagcatggaggacacaagaatgggaggaaaggcggactctcaggaacttcattcttcacgtggtttatggtgattgcattgctgggcgtctggacatctgtagctgtcgtttggtttgatcttgttgactatgaggaagttctagccaaagcaaaggacttccgttataacttatcagaggtgcttcaaggaaaactaggaatctatgatgctgatggtgatggagattttgatgtggatgatgccaaagttttattaggacttaaagagagatctacttcagagccagcagtcccgccagaagaggctgagccacacactgagcccgaggagcaggttcctgtggaggcagaaccccagaatatcgaagatgaagcaaaagaacaaattcagtcccttctccatgaaatggtacacgcagaacatgttgagggagaagacttgcaacaagaagatggacccacaggagaaccacaacaagaggatgatgagtttcttatggcgactgatgtagatgatagatttgagaccctggaacctgaagtatctcatgaagaaaccgagcatagttaccacgtggaagagacagtttcacaagactgtaatcaggatatggaagagatgatgtctgagcaggaaaatccagattccagtgaaccagtagtagaagatgaaagattgcaccatgatacagatgatgtaacataccaagtctatgaggaacaagcagtatatgaacctctagaaaatgaagggatagaaatcacagaagtaactgctccccctgaggataatcctgtagaagattcacaggtaattgtagaagaagtaagcatttttcctgtggaagaacagcaggaagtaccaccagatacttaaagcttcaaaaagactgcccctaccaccacaggaggaccagcctaaccatacgctccaaaagatggctgtgatagatcttgtgaagcaattactgagcagatcaagatctttgggaaggaacactaaagatgttttgaatgaattatagtccactggcattttagtgtatttttttttctttttagaaacacacatttctaaaaatgtcatgttacattcctgcatgtcccttttgatagcattagtggatccattggatttcttttttctttttgtgagacagcttttagtcttacctgaatttatgtgtgtttttccgacagtggttaataattatattggtgatgtagcagcaattgtgttggcagggttttcatatattattagtaattaacactaactgttggactgacttgtgtacactgtgttaaacatgatttaaaagctattaagagtactttgtgttagcactcttaaaaacgctaacagagatcatcattagctgtgaagatttgagttgtatatacctgcactgatattcttatcaaaaatttctacattagctttaagtgttcagattaacacttttgaaatttttgtagcttttagctgattaattagaaaaatttaatatttcagtgaaagttttaaattatcatttatttatttttttaaatgagaggggaaagctgaaattccttgttaagacacaaggaaaaagaatggccctactattatcatgcaaaaatgctttgttggcacctcagattaatcatataatagctatagtctcttcagcatttgtttaaattttagaaaacctgtataaattactggtgcataacttaaagattattctgcctttggctaattgagtaattcccctccagcactagagaccgctcagtgctcttactagatgaactcagtaacgccttgagctgggttgattgaggatgtgtgaaaatgtggtttattttgggctcagaaataattgctctgttgaaaataatcctttgtcagaaaagaaggtagctaccacatcattttgaaaggaccatgagcaactataagcaaagccataagaagtggtttgatcgatatattaggggtagctcttgattttgttaacattaagataaggtgactttttccccctgcttttaggattaaaatcaaagatacttctatatttttatcactatagatcatagttattatacaatgtagtgagtcctgcatgggtactcgatgtgtaatgaaacctgaaataataagataataagaaaagcaataattttctaaagctgtgctgtcggtgatacagagatgatactcaaattataataaaactcttcattttgtgaattatagaagctactttttataaagccatatttttttagggaaactaaggagtgacatagaactgatgaatgagtaaaagtaagttttgctggatttttgtagaactctggacgttgaggattcattatgctgtggttaactttaaatatttttgaattccaaatatctgaattaatgagccttgtctttacaaatatgtgccattgtgcaacatcggtggattttctaaaaataatgtaaatgtcttctattaaatgttgagtgcaataaaatacagaagaattctctatattgtcatt

SEQ ID NO: 1656 - DNA, 1669 bp, Homo sapiens
gcttgattttttaggggttggagttagctaggaccaactgggaaaagaatcccgtaagtgggagaaaggctgtggtgttgttagggagtgcacttcagcctaagtggtgattagcagcatttagcctctaaaaataactggtgagcagagtttgtagtcaggtccaatttcagttctagaggcccttacagtgcagggattggccagtctcaagctctggtaggcaagtgcatgcagtgtgcctaaaacctgccagcagtacttttgagtttttttttttgttttgttttactttagcatttattattcatggattgaagaaatcaaaatggctgaagataaagagacaaagcatggaggacacaagaatgggaggaaaggcggactctcaggaacttcattcttcacgtggtttatggtgattgcattgctgggcgtctggacatctgtagctgtcgtttggtttgatcttgttgactatgaggaagttctagccaaagcaaaggacttccgttataacttatcagaggtgcttcaaggaaaactaggaatctatgatgctgatggtgatggagattttgatgtggatgatgccaaagttttattaggcctgaccaaagatggcagtaatgaaaatattgattctcttgaggaagtccttaatattttagcagaggaaagttcagattggttttatggtttcctctcatttctctatgatataatgactccttttgaaatgctagaagaagaagaagaagaaagcgaaaccgcagatggtgttgatggtacgtcacagaatgaaggggttcagggaaagacttgtgtcatattggatttacataaccagtaaccttgattcagggactgaagtcattggctaatgaacacctgaagcagcctcctttttcttttctttccttggcttatgcagggcttaatgtgcagtggggtggttgtgatcttaccgtgcaagtcaaccatgtgatcttgcccagtacagctactagctagtcccttgctcgctcagctcccccaacttctattgaagaaaatggtactcctcattcttgtagtcagctacaaagtacactgaaaatgatgttcttggtggtataattggtttctgtatcgttttgtttcaactcatgtattcactgaactaaatttggacacttaacagcaaattgtgttgtggttaacccttgatgcttgtctttctaacacactattaattatgatgattctaatggatttcattataaaaatatttctggcatgatttttaagttaaatgcttctctgttctttaacatgactgatgtataaaatgatggttctttactaagctgatattttttattgtaatttgtttaggtttgtcagataggttcatacaaatttctatgtaaaattctgtgttaatggtgcttttaaaataatttaaaaataactccatgtttttgccttagagtaagttaacttactgttttcagatagtagcatgacatatttctgtctgtgaaagcaaaatttattttaaattttatttccaaatatacatccagagaaagtaatttgtattttttttaaagtaggcatattacacaagagggaacatgtgaatatgtatcttaatgttgtacatattaaaattattcatcctaaa

SEQ ID NO: 1657 - DNA, 1254 bp, Homo sapiens
cctactttacgatttattattcatggattgaagaaatcaaaatggctgaagataaagagacaaagcatggaggacacaagaatgggaggaaaggcggactctcaggaacttcattcttcacgtggtttatggtgattgcattgctgggcgtctggacatctgtagctgtcgtttggtttgatcttgttgactatgaggaagttctagccaaagcaaaggacttccgttataacttatcagaggtgcttcaaggaaaactaggaatctatgatgctgatggtgatggagattttgatgtggatgatgccaaagttttattagaaggacccagtggggtagccaagagaaaaactaaggctaaagttaaagaactcactaaagaagagctcaagaaggagaaagagaaacctgagtcaaggaaggaaagtaagaatgaagagagaaaaaaggggaagaaagaggatgtccgaaaggataagaaaattgctgatgcagacctatccaggaaggagtctcctaagggtaaaaaggacagagaaaaagagaaagtggacctagaaaaaagtgctaaaaccaaggaaaataggaaaaaatcaacaaatatgaaggatgtttctagtaaaatggcatcccgagacaaagatgacagaaaggaaagtagaagttctaccagatatgcacacttaacaaagggaaatacccagaaaagaaacggctaaagctctggcatcatcatcccagaacatggtcatgttccagattgcagtttgttacaaaaaagcatggaaaatgtaatattgctctgattggtgagggtgtgtaaattagccattgaatgtatcattggtgcttagcaagtaaattacctgaaatttaaatataccgtctcatacttctaaatgtaaaaacattttaaaaatgtcacagaatatgatgtaataacttctatttattgatcatttattgatcatgtattcagataaatgtatatgtatcatgaatttttatggattaatatattgaatactttcattgacgttaaataagaatattaagattttaaatgttaccctgtgcataatgccttgtaactttttcaagtatgctaaatactcagggagatggatttgctcgttgttttcttccctccttccccttcctgcttccctgttttctctttcgtggacacctccccaggctcatgtgccaccaccttccctcctctccagccctcccagccctcccgcagccttt

SEQ ID NO: 1658 - DNA, 1507 bp, Homo sapiens
gcttgattttttaggggttggagttagctaggaccaactgggaaaagaatcccgtaagtgggagaaaggctgtggtgttgttagggagtgcacttcagcctaagtggtgattagcagcatttagcctctaaaaataactggtgagcagagtttgtagtcaggtccaatttcagttctagaggcccttacagtgcagggattggccagtctcaagctctggtaggcaagtgcatgcagtgtgcctaaaacctgccagcagtacttttgagtttttttttttgttttgttttactttagcatttattattcatggattgaagaaatcaaaatggctgaagataaagagacaaagcatggaggacacaagaatgggaggaaaggcggactctcaggaacttcattcttcacgtggtttatggtgattgcattgctgggcgtctggacatctgtagctgtcgtttggtttgatcttgttgactatgaggaagttctagccaaagcaaaggacttccgttataacttatcagaggtgcttcaaggaaaactaggaatctatgatgctgatggtgatggagattttgatgtggatgatgccaaagttttattaggcaagtacacattttatgttttttgttagtggtgataaaatgctggaaacaattatttttgctttaataatatctatctcaatagtatatatcttacaggagacttttctcccttaaatcatatatttcattactgttaaaattttaaatggcttatttttccacactctttcatgtcaatttacttttatcaatgaataagtgtatatctcttacacatatatcttttgataagtataataatttcatgtgtgtttccagatttaaagtacttcttattctgaacttagaatttgaatagataatatcctagtctgtttttagatatggtaattatagccatttttcattaacattacacattcacttccatttcaaaatgtaaatttctacaggcttacataaattaatgatgaaataaaagtgataataaacatcttaaaatgtcccatgcatattttaacggtagcattaaaatatgaactcctggtcttttgacccagtgtctttattttggaagtcttggacccttctctttcattatcagaattacttgtctttatcagagatgtttcttgtaataaataacaatgtggtattcccttatttgttttaaagtgctgtcttgctggaaagaatggtgttaatttcaatatgcaaattttatataatctggcctggtgagacttcctttgcttttgtatgtagcataatatatgttaaaactttttatataagagtctttagaaaaataatggatatggcatgatattatacactaagcttataaaataatgacccaaacaaattcttcttagttaacattgttttgtgtatatttattagatatgaaaacatggtaggatgccacatctgtaactagtgaaactgcttttagt

SEQ ID NO: 1659 - DNA, 2773 bp, Homo sapiens
caagctctggtaggcaagtgcatgcagtgtgcctaaaacctgccagcagtacttttgagtttttttttttgttttgttttactttagcatttattattcatggattgaagaaatcaaaatggctgaagataaagagacaaagcatggaggacacaagaatgggaggaaaggcggactctcaggaacttcattcttcacgtggtttatggtgattgcattgctgggcgtctggacatctgtagctgtcgtttggtttgatcttgttgactatgaggaagttctagccaaagcaaaggacttccgttataacttatcagaggtgcttcaaggaaaactaggaatctatgatgctgatggtgatggagattttgatgtggatgatgccaaagttttattaggacttaaagagagatctacttcagagccagcagtcccgccagaagaggctgagccacacactgagcccgaggagcaggttcctgtggaggcagaaccccagaatatcgaagatgaagcaaaagaacaaattcagtcccttctccatgaaatggtacacgcagaacatgttgagggagaagacttgcaacaagaagatggacccacaggagaaccacaacaagaggatgatgagtttcttatggcgactgatgtagatgatagatttgagaccctggaacctgaagtatctcatgaagaaaccgagcatagttaccacgtggaagagacagtttcacaagactgtaatcaggatatggaagagatgatgtctgagcaggaaaatccagattccagtgaaccagtagtagaagatgaaagattgcaccatgatacagatgatgtaacataccaagtctatgaggaacaagcagtatatgaacctctagaaaatgaagggatagaaatcacagaagtaactgctccccctgaggataatcctgtagaagattcacaggtaattgtagaagaagtaagcatttttcctgtggaagaacagcaggaagtaccaccagatacttaaagcttcaaaaagactgcccctaccaccacaggaggaccagcctaaccatacgctccaaaagatggctgtgatagatcttgtgaagcaattactgagcagatcaagatctttgggaaggaacactaaagatgttttgaatgaattatagtccactggcattttagtgtatttttttttctttttagaaacacacatttctaaaaatgtcatgttacattcctgcatgtcccttttgatagcattagtggatccattggatttcttttttctttttgtgagacagcttttagtcttacctgaatttatgtgtgtttttccgacagtggttaataattatattggtgatgtagcagcaattgtgttggcagggttttcatatattattagtaattaacactaactgttggactgacttgtgtacactgtgttaaacatgatttaaaagctattaagagtactttgtgttagcactcttaaaaacgctaacagagatcatcattagctgtgaagatttgagttgtatatacctgcactgatattcttatcaaaaatttctacattagctttaagtgttcagattaacacttttgaaatttttgtagcttttagctgattaattagaaaaatttaatatttcagtgaaagttttaaattatcatttatttatttttttaaatgagaggggaaagctgaaattccttgttaagacacaaggaaaaagaatggccctactattatcatgcaaaaatgctttgttggcacctcagattaatcatataatagctatagtctcttcagcatttgtttaaattttagaaaacctgtataaattactggtgcataacttaaagattattctgcctttggctaattgagtaattcccctccagcactagagaccgctcagtgctcttactagatgaactcagtaacgccttgagctgggttgattgaggatgtgtgaaaagctcacagagcccgatgcctgctgctatttcacggcaatgagcctttttctttctacactgaagattttcttcttatttaatgtggtttattttgggctcagaaataattgctctgttgaaaataatcctttgtcagaaaagaaggtagctaccacatcattttgaaaggaccatgagcaactataagcaaagccataagaagtggtttgatcgatatattaggggtagctcttgattttgttaacattaagataaggtgactttttccccctgcttttaggattaaaatcaaagatacttctatatttttatcactatagatcatagttattatacaatgtagtgagtcctgcatgggtactcgatgtgtaatgaaacctgaaataataagataataagaaaagcaataattttctaaagctgtgctgtcggtgatacagagatgatactcaaattataataaaactcttcattttgtgaattatagaagctactttttataaagccatatttttttagggaaactaaggagtgacatagaactgatgaatgagtaaaagtaagttttgctggatttttgtagaactctggacgttgaggattcattatgctgtggttaactttaaatatttttgaattccaaatatctgaattaatgagccttgtctttacaaatatgtgccattgtgcaacatcggtggattttctaaaaataatgtaaatgtcttctattaaatgttgagtgcaataaaatacagaagaattctctaaaaaaaaaaaaaaaaaa

SEQ ID NO: 1660 - DNA, 2980 bp, Homo sapiens
ccgcgcgctctcgccccgggagggagtcacaggttcgtacacgcgaggccgggcgcgcgcagccggcaggcgggtgaagtcttcccaggtgctgcaggcggtgctgaggcacagggtctgctgcaggagcagcggcccgaacccgctccagcggcccgccgccgccagcggttcccgcgtcgcgtgtgtacccccgcgcactgaaggaggtccgccagccctcaccagcccccgcggaccgtgcaatggcccagcgtaagaatgccaagagcagcggcaacagcagcagcagcggctccggcagcggtagcacgagtgcgggcagcagcagccccggggcccggagagagacaaagcatggaggacacaagaatgggaggaaaggcggactctcaggaacttcattcttcacgtggtttatggtgattgcattgctgggcgtctggacatctgtagctgtcgtttggtttgatcttgttgactatgaggaagttctagccaaagcaaaggacttccgttataacttatcagaggtgcttcaaggaaaactaggaatctatgatgctgatggtgatggagattttgatgtggatgatgccaaagttttattaggacttaaagagagatctacttcagagccagcagtcccgccagaagaggctgagccacacactgagcccgaggagcaggttcctgtggaggcagaaccccagaatatcgaagatgaagcaaaagaacaaattcagtcccttctccatgaaatggtacacgcagaacatgttgagggagaagacttgcaacaagaagatggacccacaggagaaccacaacaagaggatgatgagtttcttatggcgactgatgtagatgatagatttgagaccctggaacctgaagtatctcatgaagaaaccgagcatagttaccacgtggaagagacagtttcacaagactgtaatcaggatatggaagagatgatgtctgagcaggaaaatccagattccagtgaaccagtagtagaagatgaaagattgcaccatgatacagatgatgtaacataccaagtctatgaggaacaagcagtatatgaacctctagaaaatgaagggatagaaatcacagaagtaactgctccccctgaggataatcctgtagaagattcacaggtaattgtagaagaagtaagcatttttcctgtggaagaacagcaggaagtaccaccagatacttaaagcttcaaaaagactgcccctaccaccacaggaggaccagcctaaccatacgctccaaaagatggctgtgatagatcttgtgaagcaattactgagcagatcaagatctttgggaaggaacactaaagatgttttgaatgaattatagtccactggcattttagtgtatttttttttctttttagaaacacacatttctaaaaatgtcatgttacattcctgcatgtcccttttgatagcattagtggatccattggatttcttttttctttttgtgagacagcttttagtcttacctgaatttatgtgtgtttttccgacagtggttaataattatattggtgatgtagcagcaattgtgttggcagggttttcatatattattagtaattaacactaactgttggactgacttgtgtacactgtgttaaacatgatttaaaagctattaagagtactttgtgttagcactcttaaaaacgctaacagagatcatcattagctgtgaagatttgagttgtatatacctgcactgatattcttatcaaaaatttctacattagctttaagtgttcagattaacacttttgaaatttttgtagcttttagctgattaattagaaaaatttaatatttcagtgaaagttttaaattatcatttatttatttttttaaatgagaggggaaagctgaaattccttgttaagacacaaggaaaaagaatggccctactattatcatgcaaaaatgctttgttggcacctcagattaatcatataatagctatagtctcttcagcatttgtttaaattttagaaaacctgtataaattactggtgcataacttaaagattattctgcctttggctaattgagtaattcccctccagcactagagaccgctcagtgctcttactagatgaactcagtaacgccttgagctgggttgattgaggatgtgtgaaaagctcacagagcccgatgcctgctgctatttcacggcaatgagcctttttctttctacactgaagattttcttcttatttaatgtggtttattttgggctcagaaataattgctctgttgaaaataatcctttgtcagaaaagaaggtagctaccacatcattttgaaaggaccatgagcaactataagcaaagccataagaagtggtttgatcgatatattaggggtagctcttgattttgttaacattaagataaggtgactttttccccctgcttttaggattaaaatcaaagatacttctatatttttatcactatagatcatagttattatacaatgtagtgagtcctgcatgggtactcgatgtgtaatgaaacctgaaataataagataataagaaaagcaataattttctaaagctgtgctgtcggtgatacagagatgatactcaaattataataaaactcttcattttgtgaattatagaagctactttttataaagccatatttttttagggaaactaaggagtgacatagaactgatgaatgagtaaaagtaagttttgctggatttttgtagaactctggacgttgaggattcattatgctgtggttaactttaaatatttttgaattccaaatatctgaattaatgagccttgtctttacaaatatgtgccattgtgcaacatcggtggattttctaaaaataatgtaaatgtcttctattaaatgttgagtgcaataaaatacagaagaattctctatattgtcatt

SEQ ID NO: 1661 - DNA, 1532 bp, Homo sapiens
gcttgattttttaggggttggagttagctaggaccaactgggaaaagaatcccgtaagtgggagaaaggctgtggtgttgttagggagtgcacttcagcctaagtggtgattagcagcatttagcctctaaaaataactggtgagcagagtttgtagtcaggtccaatttcagttctagaggcccttacagtgcagggattggccagtctcaagctctggtaggcaagtgcatgcagtgtgcctaaaacctgccagcagtacttttgagtttttttttttgttttgttttactttagcatttattattcatggattgaagaaatcaaaatggctgaagataaagagacaaagcatggaggacacaagaatgggaggaaaggcggactctcaggaacttcattcttcacgtggtttatggtgattgcattgctgggcgtctggacatctgtagctgtcgtttggtttgatcttgttgactatgaggaagttctagccaaagcaaaggacttccgttataacttatcagaggtgcttcaaggaaaactaggaatctatgatgctgatggtgatggagattttgatgtggatgatgccaaagttttattagaaggacccagtggggtagccaagagaaaaactaaggctaaagttaaagaactcactaaagaagagctcaagaaggagaaagagaaacctgagtcaaggaaggaaagtaagaatgaagagagaaaaaaggggaagaaagaggatgtccgaaaggataagaaaattgctgatgcagacctatccaggaaggagtctcctaagggtaaaaaggacagagaaaaagagaaagtggacctagaaaaaagtgctaaaaccaaggaaaataggaaaaaatcaacaaatatgaaggatgtttctagtaaaatggcatcccgagacaaagatgacagaaaggaaagtagaagttctaccagatatgcacacttaacaaagggaaatacccagaaaagaaacggctaaagctctggcatcatcatcccagaacatggtcatgttccagattgcagtttgttacaaaaaagcatggaaaatgtaatattgctctgattggtgagggtgtgtaaattagccattgaatgtatcattggtgcttagcaagtaaattacctgaaatttaaatataccgtctcatacttctaaatgtaaaaacattttaaaaatgtcatagaatatgatgtaataacttctatttattgatcatgtattcagataaatgtatatgtatcatgaatttttatggattaatatattgaatactttcattgacgttaaataagaatattaagattttaaatgttatttctgtgcataatgccttgtaactttttcaagtatgctaaatactcagggagatggatttgctcgttgttttcttccctccttccccttcctgcttccctgtttttctctttcgtggacacctccccaggctcatgtgccaccaccttccctcctctccagccctcccagccctcccgcagccttt

SEQ ID NO: 1662 - DNA, 3901 bp, Homo sapiens
ttaaagaagggggggcctgagcgaaggggttggaagcggagtgattccccacccctgctccatctagctctttccagtgcagccactgccgccgcccaggagccctcgtcccctgccttgtccccctactcgttcccgctcccacggcatggagcaggacactgccgcagtggcagccaccgtggcagccgcggatgcgaccgccactatcgtggtcatagaggacgagcagcccgggccgtccacctctcaggaggagggagcggccgccgcggccaccgaagccaccgcggccacggagaagggcgagaagaagaaggagaaagccgaccgagcaaagagatttgaatttttactgaagcagacagaactttttgcacatttcattcagccttcagcacagaaatctccaacatctccactgaacatgaaattgggacgtccccgaataaagaaagatgaaaagcagagcttaatttctgctggagactaccgccataggcgcacagagcaagaagaagatgaagagctactgtctgagagtcggaaaacatctaatgtgtgtattagatttgaggtgtcaccttcatatgtgaaaggggggccactgagagattatcagattcgaggactgaattggttgatctctttatatgaaaatggagtcaatggcattttggctgatgaaatgggccttgggaaaactttacaaacaattgctttgcttggttacctgaaacactaccgaaatattcctggacctcacatggttttagttccaaagtctactttacacaactggatgaatgaatttaaacgatgggtcccatctctccgtgtcatttgttttgtcggagacaaggatgccagagctgcttttattcgtgatgaaatgatgccaggagagtgggatgtttgcgttacttcttatgagatggtaattaaagaaaaatctgtattcaaaaagtttcactggcgatacctggtcattgatgaagctcacagaataaagaatgaaaaatctaagctttcagagattgttcgtgagttcaagtcgactaaccgcttgctcctaactggaacacctttgcagaataacctgcatgaactgtgggccttactcaactttttattgcctgatgtctttaattctgcagatgactttgattcttggtttgacactaaaaattgtcttggtgatcaaaaactcgtggaaagacttcatgcagttttaaaaccatttttgttacgccgtataaaaactgatgtagagaagagtctgccacctaaaaaggaaataaagatttacttggggctgagtaagatgcaacgagaatggtatacaaaaatcctgatgaaagatattgatgttttaaactcttctggcaagatggacaagatgcgactcttaaacattctgatgcagcttcgaaagtgttgtaatcatccatatctgtttgatggtgctgaacctggtccaccttataccactgatgagcatattgtcagcaacagtggtaaaatggtagttctggataaactattggccaaactcaaagaacagggttcaagggttctcattttcagccagatgactcgcttgctggatattttggaagattattgcatgtggcgtggttatgagtattgtcgactggatggacaaaccccgcatgaagaaagagaggaagcaatagaggcttttaatgctcctaatagtagcaaattcatctttatgctaagtaccagggctggaggtctcggaattaacctggcaagtgctgatgtggttatactatatgattcagactggaacccacaggttgatctacaagctatggatcgagcacatcgtattggtcagaagaaaccagtacgtgtattccgtctcatcactgacaacactgttgaagagaggattgtagaaagagctgagataaaactgagactcgattcaattgttatacaacaaggaagactcattgaccaacagtctaacaagctggcaaaagaggaaatgttacaaatgatacggcatggagccacccatgtttttgcttctaaagagagtgagttgacagatgaagacattacaactattctggaaagaggggaaaagaagactgcagagatgaatgaacgcctgcaaaaaatgggagagtcttctctaagaaattttagaatggacattgaacaaagtttatacaaatttgagggagaagattatagagaaaaacagaagcttggcatggtggaatggattgaacctcctaaacgagaacgcaaagcaaactacgcagtggatgcctactttagagaggctttgcgtgtcagcgagccaaagattccaaaggctccacggcctccaaaacagccaaatgttcaggattttcaatttttcccaccacgcttatttgagctcctggaaaaggaaattctttattatcggaagacaataggctataaggttccaaggaatcctgatatcccaaatccagctctggctcaaagagaagagcaaaaaaagattgatggagctgaacctcttacaccagaagagactgaagaaaaggaaaaacttctcacacaaggtttcacaaactggactaaacgagattttaaccagtttattaaagctaatgagaaatatggaagagatgacattgataacatagctcgagaggtagagggcaaatcccctgaggaggtcatggagtattcagctgtattttgggaacgttgcaatgaattacaggacattgagaaaattatggctcaaattgaacgtggagaagcaagaattcaacgaaggatcagtatcaagaaagccctggatgccaaaattgcaagatacaaggctccatttcatcagttgcgcattcagtatggaaccagcaaaggaaagaactatactgaggaagaagatagattcttgatttgtatgttacacaaaatgggctttgatagagaaaatgtatatgaagaattaagacagtgtgtacgaaatgctccccagtttagatttgactggtttatcaagtctaggactgccatggaattccagagacgctgtaacactctgatttcattgattgagaaagaaaatatggaaattgaggaaagagagagagcagaaaagaagaaacgggcaactaaaactccaatgtcacagaaaagaaaagcagagtcagctactgagagctctggaaagaaggatgtcaagaaggtgaaatcctaaagcctagaaataaagttttaaatgggaaactgctattttcttgttcccatcttcaaatgctaattgccagttccagtgtattcatggtactctaagaaaaatctctttggttttgatttcttgcatattttatatattttacaatgctttctacctgaaatgtgtagctttatattttatggcattctagtatttttgtgtactgtattttgtgcatttcatgtcttcatcaaaatcctctcagtccttgttcttttgaagcttgtgctgaggttttagcttttctatgttttatatgccgctgctttgaaagagaacctagattctatagttgtattattgttgtttcatactttaaatttatatggctgtggaaaaacgaattaaaatgttttgaggagaaagactttttcacttctttgttgctttcttttctattgagtctgggcttgtttgtgttactgcatactgtgattagcataataattgtttctttgaggtcatctaaatatttttttcctaaaggaataaagggtgaggaaagaaaaatattaaaaaagctaatatttgatactgtgcttgctgtcagtatgcattacatttaaattattctctattcaagtgggaaaatataataaagaaatgtctataagaaatttaatt

SEQ ID NO: 1663 - DNA, 3606 bp, Homo sapiens
gcggaagagcagaacgtttgggagtgtgcagctcctgggcccggctcaggcccgtcgcggaggcgcggcgcaggggagcgctcgggtgggagtctcgctcctccaccagtttattgcgacgtagcatccaggcctaggcctccccgtccatccccgccggactcgggcctctggcagcagcgggtgacgcagacggaacatcatgtcgtccgcggccgagcctccgccacccccgcctcccgagagcgcgccttccaagcccgcagcctcgatcgccagcggcgggagcaacagcagcaacaaaggcggccccgaaggcgtcgcggcgcaggcggttgcgtctgcggccagcgctggtcccgcagacgccgagatggaggaaatatttgatgatgcgtcacctggaaagcaaaaggaaatccaagaaccagatcctacctatgaagaaaaaatgcaaactgaccgggcaaatagattcgagtatttattaaagcagacagaactttttgcacatttcattcaacctgctgctcagaagactccaacttcacctttgaagatgaaaccagggcgcccacgaataaaaaaagatgagaagcagaacttactatccgttggcgattaccgacaccgtagaacagagcaagaggaggatgaagagctattaacagaaagctccaaagcaaccaatgtttgcactcgatttgaagactctccatcgtatgtaaaatggggtaaactgagagattatcaggtccgaggattaaactggctcatttctttgtatgagaatggcatcaatggtatccttgcagatgaaatgggcctaggaaagactcttcaaacaatttctcttcttgggtacatgaaacattatagaaacattcctgggcctcatatggttttggttcctaagtctacattacacaactggatgagtgaattcaagagatgggtaccaacacttagatctgtttgtttgataggagataaagaacaaagagctgcttttgtcagagacgttttattaccgggagaatgggatgtatgtgtaacatcttatgaaatgcttattaaagagaagtctgtgttcaaaaaatttaattggagatacttagtaatagatgaagctcacaggatcaaaaatgaaaaatctaagttgtcagaaatagtgagggaattcaagactacaaatagactattattaactggaacacctcttcagaacaacttgcatgagctgtggtcacttcttaactttctgttgccagatgtgtttaattcagcagatgactttgattcctggtttgatacaaacaactgccttggggatcaaaaactagttgagaggcttcatatggttttgcgtccattcctccttcgtcgaattaaggctgatgttgaaaagagtttgcctccaaagaaggaagtaaaaatctatgtgggcctcagcaaaatgcaaagggaatggtatactcggatattaatgaaggatatagatatactcaactcagcaggcaagatggacaaaatgaggttattgaacatcctaatgcagttgagaaaatgttgtaatcatccatatctctttgatggagcagaacctggtccaccttatacaacagatatgcatctagtaaccaacagtggcaaaatggtggttttagacaagctgctccctaagttaaaagaacaaggttcacgagtactaatcttcagtcaaatgacaagggtattggacattttggaagattattgcatgtggagaaattatgagtactgcaggttggatggtcagacaccccatgatgagagacaagactccatcaatgcatacaatgaaccaaacagcacaaagtttgttttcatgttaagcacgcgtgctggtggtcttggcatcaatcttgcgactgctgatgtagtaattttgtatgattctgattggaatccccaagtagatcttcaggctatggaccgagcacatagaattgggcagactaagacagtcagagtgttccgctttataactgataacactgtagaagaaagaatagtagaacgtgctgagatgaaactcagactggattcaatagtcattcaacaagggaggcttgtggatcagaatctgaacaaaattgggaaagatgaaatgcttcaaatgattagacatggagcaacacatgtgtttgcttcaaaggaaagtgagatcactgatgaagatatcgatggtattttggaaagaggtgcaaagaagactgcagagatgaatgaaaagctctccaagatgggcgaaagttcacttagaaactttacaatggatacagagtcaagtgtttataacttcgaaggagaagactatagagaaaaacaaaagattgcattcacagagtggattgaaccacctaaacgagaaagaaaagccaactatgccgttgatgcatatttcagggaagctcttcgtgttagtgaacctaaagcacccaaggctcctcgacctccaaaacaacccaatgttcaggatttccagttctttcctccacgtttatttgaattactggaaaaagaaattctgttttacagaaaaactattgggtacaaggtacctcgaaatcctgagctgcctaacgcagcacaggcacaaaaagaagaacagcttaaaattgatgaagctgaatcccttaatgatgaagagttagaggaaaaagagaagcttctaacacagggatttaccaattggaataagagagattttaaccagtttatcaaagctaatgagaagtggggtcgtgatgatattgaaaatatagcaagagaagtagaaggcaaaactccagaagaagtcattgaatattcagctgtgttttgggaaaggtgcaacgagctccaggacatagagaagattatggctcagattgaaaggggagaggcgagaattcaaagaagaataagcatcaagaaagcacttgacacaaagattggacggtacaaagcaccttttcatcagctgagaatatcatatggtactaacaaaggaaaaaactatactgaagaagaagatcgttttctgatttgtatgcttcacaaacttggatttgacaaagaaaatgtttatgatgaattgcgacagtgtattcgcaactctcctcagttcagatttgactggtttcttaagtccagaactgcaatggagctccagaggagatgtaataccttaattactttgattgaaagagaaaacatggaactagaagaaaaggagaaggcagagaaaaagaaacgaggaccaaagccttcaacacagaaacgtaaaatggatggcgcacctgatggtcgaggaagaaaaaagaagctgaaactatgaatatgtttttgtttcataatcactaactttaaaccagtagttctttaatttacgggtcttcataagatgtactgtacaatgctcaattgttatgtcatttaaagacatcaggttcatctgtttactgagctagaaacatagtatgtagtttcacttttttaaatgcaacagctgtgctgaaatttttttatcattaacacttgaagtaataaaataggcttcatttattaaaaaaaaaaaaaaaa

SEQ ID NO: 1664 - DNA, 4067 bp, Homo sapiens
ctgctccatctagctctttccagtgcagccactgccgccgcccaggagccctcgtcccctgccttgtccccctactcgttcccgctcccacggcatggagcaggacactgccgcagtggcagccaccgtggcagccgcggatgcgaccgccactatcgtggtcatagaggacgagcagcccgggccgtccacctctcaggaggagggagcggccgccgcggccaccgaagccaccgcggccacggagaagggcgagaagaagaaggagaaaaacgtttcttcatttcaactcaaacttgctgctaaagcgcctaaatctgaaaaggaaatggacccagaatatgaagagaaaatgaaagccgaccgagcaaagagatttgaatttttactgaagcagacagaactttttgcacatttcattcagccttcagcacagaaatctccaacatctccactgaacatgaaattgggacgtccccgaataaagaaagatgaaaagcagagcttaatttctgctggagactaccgccataggcgcacagagcaagaagaagatgaagagctactgtctgagagtcggaaaacatctaatgtgtgtattagatttgaggtgtcaccttcatatgtgaaaggggggccactgagagattatcagattcgaggactgaattggttgatctctttatatgaaaatggagtcaatggcattttggctgatgaaatgggccttgggaaaactttacaaacaattgctttgcttggttacctgaaacactaccgaaatattcctggacctcacatggttttagttccaaagtctactttacacaactggatgaatgaatttaaacgatgggtcccatctctccgtgtcatttgttttgtcggagacaaggatgccagagctgcttttattcgtgatgaaatgatgccaggagagtgggatgtttgcgttacttcttatgagatggtaattaaagaaaaatctgtattcaaaaagtttcactggcgatacctggtcattgatgaagctcacagaataaagaatgaaaaatctaagctttcagagattgttcgtgagttcaagtcgactaaccgcttgctcctaactggaacacctttgcagaataacctgcatgaactgtgggccttactcaactttttattgcctgatgtctttaattctgcagatgactttgattcttggtttgacactaaaaattgtcttggtgatcaaaaactcgtggaaagacttcatgcagttttaaaaccatttttgttacgccgtataaaaactgatgtagagaagagtctgccacctaaaaaggaaataaagatttacttggggctgagtaagatgcaacgagaatggtatacaaaaatcctgatgaaagatattgatgttttaaactcttctggcaagatggacaagatgcgactcttaaacattctgatgcagcttcgaaagtgttgtaatcatccatatctgtttgatggtgctgaacctggtccaccttataccactgatgagcatattgtcagcaacagtggtaaaatggtagttctggataaactattggccaaactcaaagaacagggttcaagggttctcattttcagccagatgactcgcttgctggatattttggaagattattgcatgtggcgtggttatgagtattgtcgactggatggacaaaccccgcatgaagaaagagaggataaattcctagaagtggaatttctgggtcaaagggaagcaatagaggcttttaatgctcctaatagtagcaaattcatctttatgctaagtaccagggctggaggtctcggaattaacctggcaagtgctgatgtggttatactatatgattcagactggaacccacaggttgatctacaagctatggatcgagcacatcgtattggtcagaagaaaccagtacgtgtattccgtctcatcactgacaacactgttgaagagaggattgtagaaagagctgagataaaactgagactcgattcaattgttatacaacaaggaagactcattgaccaacagtctaacaagctggcaaaagaggaaatgttacaaatgatacggcatggagccacccatgtttttgcttctaaagagagtgagttgacagatgaagacattacaactattctggaaagaggggaaaagaagactgcagagatgaatgaacgcctgcaaaaaatgggagagtcttctctaagaaattttagaatggacattgaacaaagtttatacaaatttgagggagaagattatagagaaaaacagaagcttggcatggtggaatggattgaacctcctaaacgagaacgcaaagcaaactacgcagtggatgcctactttagagaggctttgcgtgtcagcgagccaaagattccaaaggctccacggcctccaaaacagccaaatgttcaggattttcaatttttcccaccacgcttatttgagctcctggaaaaggaaattctttattatcggaagacaataggctataaggttccaaggaatcctgatatcccaaatccagctctggctcaaagagaagagcaaaaaaagattgatggagctgaacctcttacaccagaagagactgaagaaaaggaaaaacttctcacacagggtttcacaaactggactaaacgagattttaaccagtttattaaagctaatgagaaatatggaagagatgacattgataacatagctcgagaggtagagggcaaatcccctgaggaggtcatggagtattcagctgtattttgggaacgttgcaatgaattacaggacattgagaaaattatggctcaaattgaacgtggagaagcaagaattcaacgaaggatcagtatcaagaaagccctggatgccaaaattgcaagatacaaggctccatttcatcagttgcgcattcagtatggaaccagcaaaggaaagaactatactgaggaagaagatagattcttgatttgtatgttacacaaaatgggctttgatagagaaaatgtatatgaagaattaagacagtgtgtacgaaatgctccccagtttagatttgactggtttatcaagtctaggactgccatggaattccagagacgctgtaacactctgatttcattgattgagaaagaaaatatggaaattgaggaaagagagagagcagaaaagaagaaacgggcaactaaaactccaatggtaaaattttcagcattttcctaacttttagatttaacattgttgggccatttaaaatgtgcatattggagcagaacattaaatctgtttccattttagtcacagaaaagaaaagcagagtcagctactgagagctctggaaagaaggatgtcaagaaggtgaaatcctaaagcctagaaataaagttttaaatgggaaactgctattttcttgttcccatcttcaaatgctaattgccagttccagtgtattcatggtactctaagaaaaatctctttggttttgatttcttgcatattttatatattttacaatgctttctacctgaaatgtgtagctttatattttatggcattctagtatttttgtgtactgtattttgtgcatttcatgtcttcatcaaaatcctctcagtccttgttcttttgaagcttgtgctgaggttttagcttttctatgttttatatgccgctgctttgaaagagaacctagattctatagttgtattattgttgtttcatactttaaatttatatggctgtggaaaaacgaattaaaatgttttgaggagaaagactttttcacttctttgttgctttcttttctattgagtctgggcttgtttgtgttactgcatactgtgattagcataataattgtttctttgaggtcatctaaatatttttttcctaaaggaataaagggtgaggaaagaaaaatattaaaaaagctaatatttgatactgtgcttgctgtcagtatgcattacatttaaattattctctattcaagtgggaaaatataataaagaaatgtctataagaaatttaa

SEQ ID NO: 1665 - DNA, 5631 bp, Homo sapiens
cggatacggcagaagttttggggccagacacaagacttccaagtttgaatgggcagcgcaaaacccagacaagttttccggtagtgccgccaacccctgtcaggcacagaagacacagcgagaaccgtgagccgttacgaaagcctaaaacactgagctcgcgtcctgccaagcagcaggcgcacaaacctacacctccgagcgctccctggaggtcccgcccactcttctctcccgagccggctagagatctggaagagggcgggccaaggccggccttccttgacctcagtgacccgtctggccccgcccaccctcgtcgacgtgattcccgccgtgagccccgcggaagagcagaacgtttgggagtgtgcagctcctgggcccggctcaggcccgtcgcggaggcgcggcgcaggggagcgctcgggtgggagtctcgctcctccaccagtttattgcgacgtagcatccaggcctaggcctccccgtccatccccgccggactcgggcctctggcagcagcgggtgacgcagacggaacatcatgtcgtccgcggccgagcctccgccacccccgcctcccgagagcgcgccttccaagcccgcagcctcgatcgccagcggcgggagcaacagcagcaacaaaggcggccccgaaggcgtcgcggcgcaggcggttgcgtctgcggccagcgctggtcccgcagacgccgagatggaggaaatatttgatgatgcgtcacctggaaagcaaaaggaaatccaagaaccagatcctacctatgaagaaaaaatgcaaactgaccgggcaaatagattcgagtatttattaaagcagacagaactttttgcacatttcattcaacctgctgctcagaagactccaacttcacctttgaagatgaaaccagggcgcccacgaataaaaaaagatgagaagcagaacttattatccgttggcgattaccgacaccgtagaacagagcaagaggaggatgaagagctattaacagaaagctccaaagcaaccaatgtttgcactcgatttgaagactctccatcgtatgtaaaatggggtaaactgagagattatcaggtccgaggattaaactggctcatttctttgtatgagaatggcatcaatggtatccttgcagatgaaatgggcctaggaaagactcttcaaacaatttctcttcttgggtacatgaaacattatagaaacattcctgggcctcatatggttttggttcctaagtctacattacacaactggatgagtgaattcaagagatgggtaccaacacttagatctgtttgtttgataggagataaagaacaaagagctgcttttgtcagagacgttttattaccgggagaatgggatgtatgtgtaacatcttatgaaatgcttattaaagagaagtctgtgttcaaaaaatttaattggagatacttagtaatagatgaagctcacaggatcaaaaatgaaaaatctaagttgtcagaaatagtgagggaattcaagactacaaatagactattattaactggaacacctcttcagaacaacttgcatgagctgtggtcacttcttaactttctgttgccagatgtgtttaattcagcagatgactttgattcctggtttgatacaaacaactgccttggggatcaaaaactagttgagaggcttcatatggttttgcgtccattcctccttcgtcgaattaaggctgatgttgaaaagagtttgcctccaaagaaggaagtaaaaatctatgtgggcctcagcaaaatgcaaagggaatggtatactcggatattaatgaaggatatagatatactcaactcagcaggcaagatggacaaaatgaggttattgaacatcctaatgcagttgagaaaatgttgtaatcatccatatctctttgatggagcagaacctggtccaccttatacaacagatatgcatctagtaaccaacagtggcaaaatggtggttttagacaagctgctccctaagttaaaagaacaaggttcacgagtactaatcttcagtcaaatgacaagggtattggacattttggaagattattgcatgtggagaaattatgagtactgcaggttggatggtcagacaccccatgatgagagacaagactccatcaatgcatacaatgaaccaaacagcacaaagtttgttttcatgttaagcacgcgtgctggtggtcttggcatcaatcttgcgactgctgatgtagtaattttgtatgattctgattggaatccccaagtagatcttcaggctatggaccgagcacatagaattgggcagactaagacagtcagagtgttccgctttataactgataacactgtagaagaaagaatagtagaacgtgctgagatgaaactcagactggattcaatagtcattcaacaagggaggcttgtggatcagaatctgaacaaaattgggaaagatgaaatgcttcaaatgattagacatggagcaacacatgtgtttgcttcaaaggaaagtgagatcactgatgaagatatcgatggtattttggaaagaggtgcaaagaagactgcagagatgaatgaaaagctctccaagatgggcgaaagttcacttagaaactttacaatggatacagagtcaagtgtttataacttcgaaggagaagactatagagaaaaacaaaagattgcattcacagagtggattgaaccacctaaacgagaaagaaaagccaactatgccgttgatgcatatttcagggaagctcttcgtgttagtgaacctaaagcacccaaggctcctcgacctccaaaacaacccaatgttcaggatttccagttctttcctccacgtttatttgaattactggaaaaagaaattctgttttacagaaaaactattgggtacaaggtacctcgaaatcctgagctgcctaacgcagcacaggcacaaaaagaagaacagcttaaaattgatgaagctgaatcccttaatgatgaagagttagaggaaaaagagaagcttctaacacagggatttaccaattggaataagagagattttaaccagtttatcaaagctaatgagaagtggggtcgtgatgatattgaaaatatagcaagagaagtagaaggcaaaactccagaagaagtcattgaatattcagctgtgttttgggaaaggtgcaacgagctccaggacatagagaagattatggctcagattgaaaggggagaggcgagaattcaaagaagaataagcatcaagaaagcacttgacacaaagattggacggtacaaagcaccttttcatcagctgagaatatcatatggtactaacaaaggaaaaaactatactgaagaagaagatcgttttctgatttgtatgcttcacaaacttggatttgacaaagaaaatgtttatgatgaattgcgacagtgtattcgcaactctcctcagttcagatttgactggtttcttaagtccagaactgcaatggagctccagaggagatgtaataccttaattactttgattgaaagagaaaacatggaactagaagaaaaggagaaggcagagaaaaagaaacgaggaccaaagccttcaacacagaaacgtaaaatggatggcgcacctgatggtcgaggaagaaaaaagaagctgaaactatgaatatgtttttgtttcataatcactaactttaaaccagtagttctttaatttacgggtcttcataagatgtactgtacaatgctcaattgttatgtcatttaaagacatcaggttcatctgtttactgagctagaaacatagtatgtagtttcacttttttaaatgcaacagctgtgctgaaatttttttatcattaacacttgaagtaataaaataggcttcatttattactaagtgtttcatttgatttatttttctattgtagttccatttgtgaagattgtgactttttgtttattagctataatttctacacttgtaaggcttaaaaacaagttaaaaagaaaattgcaaataacatttgtccctttcagtcttcacctagttgtgtaattattttaattcactttgcctttgcagaaatttgggtattttctttgtagtgctattgagtctcatctggaaagattatataaattgcattctccttgcttatgtgggtagaatgggaaaagaaggcaagacaaagtatacttaaattctatgcatatttctgttatgctttctgttttttttagttgattctgaaatgaatatgccctattcttttgaaagaatggccttttagttgtatagccaaagacatttagtattttccggttccttaaggtattactgtaccattttgtaaaaggaatattattattattatttttaattatttggtaaatattttgtcatatgaccttctgaagcagccacaacttagataatgtcagaactaaggtgattttttttttttaattttgaaagcccagccaaaatgaggtgtgaatttgtcatactgttacattgaaattggtaacaaaatatatcccctcccatttggacttttagggtaaatgaaaattttattgtattttaaagtagtttctaagtgttagcaagactgactataattccagtttctgttttctatggacagacctgataaactggagaccctaaagcaggaatacccaaattatagtgtcaggattttagctgtaccagaggcctttatgtgctacacataatttgtataaaattttatatgtgcagattgggtacataaacagttctccatttttctaagggaatgcaataaatgtagcatcgtgaataaatataacttttataatccgtaaagtggtcttttctttccatttctttaattgttttctcaatttttattcactttttcctttaggacacatttcccttaattggatatctttcccttaaatttctattagtagttgttttcatctgcccacatgtaattgaagatttaaaaaaaaaattctgatacctgcagtattactaatactgcttaatttcttgaaatgtggaattgctgctgttaatgtcaagcaaaacgcagtatttatggcaaattgtaaagtaatttgaatttagtgctacctcaaaattaactttttaaatactatgttagattcttaacagttaaaggtctaatacatgcatgaggaatggttacttatgaaaggaaaaagaatttgtaagagttatcacctcagtttggaagaaattgaaaaaatgtaaggctgaagaaaacttacggaggtcacaaaagtgatgttttcaagaggaagagaaactgggagggagatacacagtggaaatgcaaaatgaatcaagtatagtggtagccctgagagcttagggactcaaatggaaactgtgtgaagggaaactcacttgaaaaaaaagcatgaaccagctaggccctgccaccactgtgtttggccaagttcacaaatctgttttaacctgtcgcttccctgtcacttctctggctttcctctcctgctaagcttttgtttcctggcagtaattaaaatcttctgtcagtgccacagcta

SEQ ID NO: 1666 - DNA, 3866 bp, Homo sapiens
gcgagtgttgaaagtcggtggcgtaggtcgtcgtcctggatgctggcgagatagatgttatcttccagaggaagaggaggaggcggcgaagcgttttcccagcctcagtctctctttcgttttccttttcccttcccccaaccctccgcccttctctaaatcagccggccttccttgacctcagtgacccgtctggccccgcccaccctcgtcgacgtgattcccgccgtgaggtaagcgccggtggaacctagagccccgcggaagagcagaacgtttgggagtgtgcagctcctgggcccggctcaggcccgtcgcggaggcgcggcgcaggggagcgctcgggtgggagtctcgctcctccaccagtttattgcgacgtagcatccaggcctaggcctccccgtccatccccgccggactcgggcctctggcagcagcgggtgacgcagacggaacatcatgtcgtccgcggccgagcctccgccacccccgcctcccgagagcgcgccttccaagcccgcagcctcgatcgccagcggcgggagcaacagcagcaacaaaggcggccccgaaggcgtcgcggcgcaggcggttgcgtctgcggtcagcgctggtcccgcagacgccgagatggaggaaatatttgatgatgcgtcacctggaaagcaaaaggaaatccaagaaccagatcctacctatgaagaaaaaatgcaaactgaccgggcaaatagattcgagtatttattaaagcagacagaactttttgcacatttcattcaacctgctgctcagaagactccaacttcacctttgaagatgaaaccagggcgcccacgaataaaaaaagatgagaagcagaacttactatccgttggcgattaccgacaccgtagaacagagcaagaggaggatgaagagctattaacagaaagctccaaagcaaccaatgtttgcactcgatttgaagactctccatcgtatgtaaaatggggtaaactgagagattatcaggtccgaggattaaactggctcatttctttgtatgagaatggcatcaatggtatccttgcagatgaaatgggcctaggaaagactcttcaaacaatttctcttcttgggtacatgaaacattatagaaacattcctgggcctcatatggttttggttcctaagtctacattacacaactggatgagtgaattcaagagatgggtaccaacacttagatctgtttgtttgataggagataaagaacaaagagctgcttttgtcagagacgttttattaccgggagaatgggatgtatgtgtaacatcttatgaaatgcttattaaagagaagtctgtgttcaaaaaatttaattggagatacttagtaatagatgaagctcacaggatcaaaaatgaaaaatctaagttgtcagaaatagtgagggaattcaagactacaaatagactattattaactggaacacctcttcagaacaacttgcatgagctgtggtcacttcttaactttctgttgccagatgtgtttaattcagcagatgactttgattcctggtttgatacaaacaactgccttggggatcaaaaactagttgagaggcttcatatggttttgcgtccattcctccttcgtcgaattaaggctgatgttgaaaagagtttgcctccaaagaaggaagtaaaaatctatgtgggcctcagcaaaatgcaaagggaatggtatactcggatattaatgaaggatatagatatactcaactcagcaggcaagatggacaaaatgaggttattgaacatcctaatgcagttgagaaaatgttgtaatcatccatatctctttgatggagcagaacctggtccaccttatacaacagatatgcatctagtaaccaacagtggcaaaatggtggttttagacaagctgctccctaagttaaaagaacaaggttcacgagtactaatcttcagtcaaatgacaagggtattggacattttggaagattattgcatgtggagaaattatgagtactgcaggttggatggtcagacaccccatgatgagagacaagactccatcaatgcatacaatgaaccaaacagcacaaagtttgttttcatgttaagcacgcgtgctggtggtcttggcatcaatcttgcgactgctgatgtagtaattttgtatgattctgattggaatccccaagtagatcttcaggctatggaccgagcacatagaattgggcagactaagacagtcagagtgttccgctttataactgataacactgtagaagaaagaatagtagaacgtgctgagatgaaactcagactggattcaatagtcattcaacaagggaggcttgtggatcagaatctgaacaaaattgggaaagatgaaatgcttcaaatgattagacatggagcaacacatgtgtttgcttcaaaggaaagtgagatcactgatgaagatatcgatggtattttggaaagaggtgcaaagaagactgcagagatgaatgaaaagctctccaagatgggcgaaagttcacttagaaactttacaatggatacagagtcaagtgtttataacttcgaaggagaagactatagagaaaaacaaaagattgcattcacagagtggattgaaccacctaaacgagaaagaaaagccaactatgccgttgatgcatatttcagggaagctcttcgtgttagtgaacctaaagcacccaaggctcctcgacctccaaaacaacccaatgttcaggatttccagttctttcctccacgtttatttgaattactggaaaaagaaattctgttttacagaaaaactattgggtacaaggtacctcgaaatcctgagctgcctaacgcagcacaggcacaaaaagaagaacagcttaaaattgatgaagctgaatcccttaatgatgaagagttagaggaaaaagagaagcttctaacacagggatttaccaattggaataagagagattttaaccagtttatcaaagctaatgagaagtggggtcgtgatgatattgaaaatatagcaagagaagtagaaggcaaaactccagaagaagtcattgaatattcagctgtgttttgggaaaggtgcaacgagctccaggacatagagaagattatggctcagattgaaaggggagaggcgagaattcaaagaagaataagcatcaagaaagcacttgacacaaagattggacggtacaaagcaccttttcatcagctgagaatatcatatggtactaacaaaggaaaaaactatactgaagaagaagatcgttttctgatttgtatgcttcacaaacttggatttgacaaagaaaatgtttatgatgaattgcgacagtgtattcgcaactctcctcagttcagatttgactggtttcttaagtccagaactgcaatggagctccagaggagatgtaataccttaattactttgattgaaagagaaaacatggaactagaagaaaaggagaaggcagagaaaaagaaacgaggaccaaagccttcaacacagaaacgtaaaatggatggcgcacctgatggtcgaggaagaaaaaagaagctgaaactatgaatatgtttttgtttcataatcactaactttaaaccagtagttctttaatttacgggtcttcataagatgtactgtacaatgctcaattgttatgtcatttaaagacatcaggttcatctgtttactgagctagaaacatagtatgtagtttcacttttttaaatgcaacagctgtgctgaaatttttttatcattaacacttgaagtaataaaataggcttcatttattaaaaaaaaaaaaaaaa

SEQ ID NO: 1667 - DNA, 4121 bp, Homo sapiens
ttaaagaagggggggcctgagcgaaggggttggaagcggagtgattccccacccctgctccatctagctctttccagtgcagccactgccgccgcccaggagccctcgtcccctgccttgtccccctactcgttcccgctcccacggcatggagcaggacactgccgcagtggcagccaccgtggcagccgcggatgcgaccgccactatcgtggtcatagaggacgagcagcccgggccgtccacctctcaggaggagggagcggccgccgcggccaccgaagccaccgcggccacggagaagggcgagaagaagaaggagaaaaacgtttcttcatttcaactcaaacttgctgctaaagcgcctaaatctgaaaaggaaatggacccagaatatgaagagaaaatgaaagccgaccgagcaaagagatttgaatttttactgaagcagacagaactttttgcacatttcattcagccttcagcacagaaatctccaacatctccactgaacatgaaattgggacgtccccgaataaagaaagatgaaaagcagagcttaatttctgctggagactaccgccataggcgcacagagcaagaagaagatgaagagctactgtctgagagtcggaaaacatctaatgtgtgtattagatttgaggtgtcaccttcatatgtgaaaggggggccactgagagattatcagattcgaggactgaattggttgatctctttatatgaaaatggagtcaatggcattttggctgatgaaatgggccttgggaaaactttacaaacaattgctttgcttggttacctgaaacactaccgaaatattcctggacctcacatggttttagttccaaagtctactttacacaactggatgaatgaatttaaacgatgggtcccatctctccgtgtcatttgttttgtcggagacaaggatgccagagctgcttttattcgtgatgaaatgatgccaggagagtgggatgtttgcgttacttcttatgagatggtaattaaagaaaaatctgtattcaaaaagtttcactggcgatacctggtcattgatgaagctcacagaataaagaatgaaaaatctaagctttcagagattgttcgtgagttcaagtcgactaaccgcttgctcctaactggaacacctttgcagaataacctgcatgaactgtgggccttactcaactttttattgcctgatgtctttaattctgcagatgactttgattcttggtttgacactaaaaattgtcttggtgatcaaaaactcgtggaaagacttcatgcagttttaaaaccatttttgttacgccgtataaaaactgatgtagagaagagtctgccacctaaaaaggaaataaagatttacttggggctgagtaagatgcaacgagaatggtatacaaaaatcctgatgaaagatattgatgttttaaactcttctggcaagatggacaagatgcgactcttaaacattctgatgcagcttcgaaagtgttgtaatcatccatatctgtttgatggtgctgaacctggtccaccttataccactgatgagcatattgtcagcaacagtggtaaaatggtagttctggataaactattggccaaactcaaagaacagggttcaagggttctcattttcagccagatgactcgcttgctggatattttggaagattattgcatgtggcgtggttatgagtattgtcgactggatggacaaaccccgcatgaagaaagagaggataaattcctagaagtggaatttctgggtcaaagggaagcaatagaggcttttaatgctcctaatagtagcaaattcatctttatgctaagtaccagggctggaggtctcggaattaacctggcaagtgctgatgtggttatactatatgattcagactggaacccacaggttgatctacaagctatggatcgagcacatcgtattggtcagaagaaaccagtacgtgtattccgtctcatcactgacaacactgttgaagagaggattgtagaaagagctgagataaaactgagactcgattcaattgttatacaacaaggaagactcattgaccaacagtctaacaagctggcaaaagaggaaatgttacaaatgatacggcatggagccacccatgtttttgcttctaaagagagtgagttgacagatgaagacattacaactattctggaaagaggggaaaagaagactgcagagatgaatgaacgcctgcaaaaaatgggagagtcttctctaagaaattttagaatggacattgaacaaagtttatacaaatttgagggagaagattatagagaaaaacagaagcttggcatggtggaatggattgaacctcctaaacgagaacgcaaagcaaactacgcagtggatgcctactttagagaggctttgcgtgtcagcgagccaaagattccaaaggctccacggcctccaaaacagccaaatgttcaggattttcaatttttcccaccacgcttatttgagctcctggaaaaggaaattctttattatcggaagacaataggctataaggttccaaggaatcctgatatcccaaatccagctctggctcaaagagaagagcaaaaaaagattgatggagctgaacctcttacaccagaagagactgaagaaaaggaaaaacttctcacacaaggtttcacaaactggactaaacgagattttaaccagtttattaaagctaatgagaaatatggaagagatgacattgataacatagctcgagaggtagagggcaaatcccctgaggaggtcatggagtattcagctgtattttgggaacgttgcaatgaattacaggacattgagaaaattatggctcaaattgaacgtggagaagcaagaattcaacgaaggatcagtatcaagaaagccctggatgccaaaattgcaagatacaaggctccatttcatcagttgcgcattcagtatggaaccagcaaaggaaagaactatactgaggaagaagatagattcttgatttgtatgttacacaaaatgggctttgatagagaaaatgtatatgaagaattaagacagtgtgtacgaaatgctccccagtttagatttgactggtttatcaagtctaggactgccatggaattccagagacgctgtaacactctgatttcattgattgagaaagaaaatatggaaattgaggaaagagagagagcagaaaagaagaaacgggcaactaaaactccaatggtaaaattttcagcattttcctaacttttagatttaacattgttgggccatttaaaatgtgcatattggagcagaacattaaatctgtttccattttagtcacagaaaagaaaagcagagtcagctactgagagctctggaaagaaggatgtcaagaaggtgaaatcctaaagcctagaaataaagttttaaatgggaaactgctattttcttgttcccatcttcaaatgctaattgccagttccagtgtattcatggtactctaagaaaaatctctttggttttgatttcttgcatattttatatattttacaatgctttctacctgaaatgtgtagctttatattttatggcattctagtatttttgtgtactgtattttgtgcatttcatgtcttcatcaaaatcctctcagtccttgttcttttgaagcttgtgctgaggttttagcttttctatgttttatatgccgctgctttgaaagagaacctagattctatagttgtattattgttgtttcatactttaaatttatatggctgtggaaaaacgaattaaaatgttttgaggagaaagactttttcacttctttgttgctttcttttctattgagtctgggcttgtttgtgttactgcatactgtgattagcataataattgtttctttgaggtcatctaaatatttttttcctaaaggaataaagggtgaggaaagaaaaatattaaaaaagctaatatttgatactgtgcttgctgtcagtatgcattacatttaaattattctctattcaagtgggaaaatataataaagaaatgtctataagaaatttaa

SEQ ID NO: 1668 - DNA, 4024 bp, Homo sapiens
ttaaagaagggggggcctgagcgaaggggttggaagcggagtgattccccacccctgctccatctagctctttccagtgcagccactgccgccgcccaggagccctcgtcccctgccttgtccccctactcgttcccgctcccacggcatggagcaggacactgccgcagtggcagccaccgtggcagccgcggatgcgaccgccactatcgtggtcatagaggacgagcagcccgggccgtccacctctcaggaggagggagcggccgccgcggccaccgaagccaccgcggccacggagaagggcgagaagaagaaggagaaaaacgtttcttcatttcaactcaaacttgctgctaaagcgcctaaatctgaaaaggaaatggacccagaatatgaagagaaaatgaaagccgaccgagcaaagagatttgaatttttactgaagcagacagaactttttgcacatttcattcagccttcagcacagaaatctccaacatctccactgaacatgaaattgggacgtccccgaataaagaaagatgaaaagcagagcttaatttctgctggagactaccgccataggcgcacagagcaagaagaagatgaagagctactgtctgagagtcggaaaacatctaatgtgtgtattagatttgaggtgtcaccttcatatgtgaaaggggggccactgagagattatcagattcgaggactgaattggttgatctctttatatgaaaatggagtcaatggcattttggctgatgaaatgggccttgggaaaactttacaaacaattgctttgcttggttacctgaaacactaccgaaatattcctggacctcacatggttttagttccaaagtctactttacacaactggatgaatgaatttaaacgatgggtcccatctctccgtgtcatttgttttgtcggagacaaggatgccagagctgcttttattcgtgatgaaatgatgccaggagagtgggatgtttgcgttacttcttatgagatggtaattaaagaaaaatctgtattcaaaaagtttcactggcgatacctggtcattgatgaagctcacagaataaagaatgaaaaatctaagctttcagagattgttcgtgagttcaagtcgactaaccgcttgctcctaactggaacacctttgcagaataacctgcatgaactgtgggccttactcaactttttattgcctgatgtctttaattctgcagatgactttgattcttggtttgacactaaaaattgtcttggtgatcaaaaactcgtggaaagacttcatgcagttttaaaaccatttttgttacgccgtataaaaactgatgtagagaagagtctgccacctaaaaaggaaataaagatttacttggggctgagtaagatgcaacgagaatggtatacaaaaatcctgatgaaagatattgatgttttaaactcttctggcaagatggacaagatgcgactcttaaacattctgatgcagcttcgaaagtgttgtaatcatccatatctgtttgatggtgctgaacctggtccaccttataccactgatgagcatattgtcagcaacagtggtaaaatggtagttctggataaactattggccaaactcaaagaacagggttcaagggttctcattttcagccagatgactcgcttgctggatattttggaagattattgcatgtggcgtggttatgagtattgtcgactggatggacaaaccccgcatgaagaaagagaggataaattcctagaagtggaatttctgggtcaaagggaagcaatagaggcttttaatgctcctaatagtagcaaattcatctttatgctaagtaccagggctggaggtctcggaattaacctggcaagtgctgatgtggttatactatatgattcagactggaacccacaggttgatctacaagctatggatcgagcacatcgtattggtcagaagaaaccagtacgtgtattccgtctcatcactgacaacactgttgaagagaggattgtagaaagagctgagataaaactgagactcgattcaattgttatacaacaaggaagactcattgaccaacagtctaacaagctggcaaaagaggaaatgttacaaatgatacggcatggagccacccatgtttttgcttctaaagagagtgagttgacagatgaagacattacaactattctggaaagaggggaaaagaagactgcagagatgaatgaacgcctgcaaaaaatgggagagtcttctctaagaaattttagaatggacattgaacaaagtttatacaaatttgagggagaagattatagagaaaaacagaagcttggcatggtggaatggattgaacctcctaaacgagaacgcaaagcaaactacgcagtggatgcctactttagagaggctttgcgtgtcagcgagccaaagattccaaaggctccacggcctccaaaacagccaaatgttcaggattttcaatttttcccaccacgcttatttgagctcctggaaaaggaaattctttattatcggaagacaataggctataaggttccaaggaatcctgatatcccaaatccagctctggctcaaagagaagagcaaaaaaagattgatggagctgaacctcttacaccagaagagactgaagaaaaggaaaaacttctcacacaaggtttcacaaactggactaaacgagattttaaccagtttattaaagctaatgagaaatatggaagagatgacattgataacatagctcgagaggtagagggcaaatcccctgaggaggtcatggagtattcagctgtattttgggaacgttgcaatgaattacaggacattgagaaaattatggctcaaattgaacgtggagaagcaagaattcaacgaaggatcagtatcaagaaagccctggatgccaaaattgcaagatacaaggctccatttcatcagttgcgcattcagtatggaaccagcaaaggaaagaactatactgaggaagaagatagattcttgatttgtatgttacacaaaatgggctttgatagagaaaatgtatatgaagaattaagacagtgtgtacgaaatgctccccagtttagatttgactggtttatcaagtctaggactgccatggaattccagagacgctgtaacactctgatttcattgattgagaaagaaaatatggaaattgaggaaagagagagagcagaaaagaagaaacgggcaactaaaactccaatgtcacagaaaagaaaagcagagtcagctactgagagctctggaaagaaggatgtcaagaaggtgaaatcctaaagcctagaaataaagttttaaatgggaaactgctattttcttgttcccatcttcaaatgctaattgccagttccagtgtattcatggtactctaagaaaaatctctttggttttgatttcttgcatattttatatattttacaatgctttctacctgaaatgtgtagctttatattttatggcattctagtatttttgtgtactgtattttgtgcatttcatgtcttcatcaaaatcctctcagtccttgttcttttgaagcttgtgctgaggttttagcttttctatgttttatatgccgctgctttgaaagagaacctagattctatagttgtattattgttgtttcatactttaaatttatatggctgtggaaaaacgaattaaaatgttttgaggagaaagactttttcacttctttgttgctttcttttctattgagtctgggcttgtttgtgttactgcatactgtgattagcataataattgtttctttgaggtcatctaaatatttttttcctaaaggaataaagggtgaggaaagaaaaatattaaaaaagctaatatttgatactgtgcttgctgtcagtatgcattacatttaaattattctctattcaagtgggaaaatataataaagaaatgtctataagaaatttaatt

SEQ ID NO: 1669 - DNA, 3634 bp, Homo sapiens
caagactggaagcagagagagagagcaagagtgagagagagcgagcgagcgtagtcaggagatggtgttgtattccaggagaaaaacgtttcttcatttcaactcaaacttgctgctaaagcgcctaaatctgaaaaggaaatggacccagaatatgaagagaaaatgaaagccgaccgagcaaagagatttgaatttttactgaagcagacagaactttttgcacatttcattcagccttcagcacagaaatctccaacatctccactgaacatgaaattgggacgtccccgaataaagaaagatgaaaagcagagcttaatttctgctggagactaccgccataggcgcacagagcaagaagaagatgaagagctactgtctgagagtcggaaaacatctaatgtgtgtattagatttgaggtgtcaccttcatatgtgaaaggggggccactgagagattatcagattcgaggactgaattggttgatctctttatatgaaaatggagtcaatggcattttggctgatgaaatgggccttgggaaaactttacaaacaattgctttgcttggttacctgaaacactaccgaaatattcctggacctcacatggttttagttccaaagtctactttacacaactggatgaatgaatttaaacgatgggtcccatctctccgtgtcatttgttttgtcggagacaaggatgccagagctgcttttattcgtgatgaaatgatgccaggagagtgggatgtttgcgttacttcttatgagatggtaattaaagaaaaatctgtattcaaaaagtttcactggcgatacctggtcattgatgaagctcacagaataaagaatgaaaaatctaagctttcagagattgttcgtgagttcaagtcgactaaccgcttgctcctaactggaacacctttgcagaataacctgcatgaactgtgggccttactcaactttttattgcctgatgtctttaattctgcagatgactttgattcttggtttgacactaaaaattgtcttggtgatcaaaaactcgtggaaagacttcatgcagttttaaaaccatttttgttacgccgtataaaaactgatgtagagaagagtctgccacctaaaaaggaaataaagatttacttggggctgagtaagatgcaacgagaatggtatacaaaaatcctgatgaaagatattgatgttttaaactcttctggcaagatggacaagatgcgactcttaaacattctgatgcagcttcgaaagtgttgtaatcatccatatctgtttgatggtgctgaacctggtccaccttataccactgatgagcatattgtcagcaacagtggtaaaatggtagttctggataaactattggccaaactcaaagaacagggttcaagggttctcattttcagccagatgactcgcttgctggatattttggaagattattgcatgtggcgtggttatgagtattgtcgactggatggacaaaccccgcatgaagaaagagaggataaattcctagaagtggaatttctgggtcaaagggaagcaatagaggcttttaatgctcctaatagtagcaaattcatctttatgctaagtaccagggctggaggtctcggaattaacctggcaagtgctgatgtggttatactatatgattcagactggaacccacaggttgatctacaagctatggatcgagcacatcgtattggtcagaagaaaccagtacgtgtattccgtctcatcactgacaacactgttgaagagaggattgtagaaagagctgagataaaactgagactcgattcaattgttatacaacaaggaagactcattgaccaacggtctaacaagctggcaaaagaggaaatgttacaaatgatacggcatggagccacccatgtttttgcttctaaagagagtgagttgacagatgaagacattacaactattctggaaagaggggaaaagaagactgcagagatgaatgaacgcctgcaaaaaatgggagagtcttctctaagaaattttagaatggacattgaacaaagtttatacaaatttgagggagaagattatagagaaaaacagaagcttggcatggtggaatggattgaacctcctaaacgagaacgcaaagcaaactacgcagtggatgcctactttagagaggctttgcgtgtcagcgagccaaagattccaaaggctccacggcctccaaaacagccaaatgttcaggattttcaatttttcccaccacgcttatttgagctcctggaaaaggaaattctttattatcggaagacaataggctataaggttccaaggaatcctgatatcccaaatccagctctggctcaaagagaagagcaaaaaaagattgatggagctgaacctcttacaccagaagagactgaagaaaaggaaaaacttctcacacaaggtttcacaaactggactaaacgagattttaaccagtttattaaagctaatgagaaatatggaagagatgacattgataacatagctcgagaggtagagggcaaatcccctgaggaggtcatggagtattcagctgtattttgggaacgttgcaatgaattacaggacattgagaaaattatggctcaaattgaacgtggagaagcaagaattcaacgaaggatcagtatcaagaaagccctggatgccaaaattgcaagatacaaggctccatttcatcagttgcgcattcagtatggaaccagcaaaggaaagaactatactgaggaagaagatagattcttgatttgtatgttacacaaaatgggctttgatagagaaaatgtatatgaagaattaagacagtgtgtacgaaatgctccccagtttagatttgactggtttatcaagtctaggactgccatggaattccagagacgctgtaacactctgatttcattgattgagaaagaaaatatggaaattgaggaaagagagagagcagaaaagaagaaacgggcaactaaaactccaatggtaaaattttcagcattttcctaacttttagatttaacattgttgggccatttaaaatgtgcatattggagcagaacattaaatctgtttccattttagtcacagaaaagaaaagcagagtcagctactgagagctctggaaagaaggatgtcaagaaggtgaaatcctaaagcctagaaataaagttttaaatgggaaactgctattttcttgttcccatcttcaaatgctaattgccagttccagtgtattcatggtactctaagaaaaatctctttggttttgatttcttgcatattttatatattttacaatgctttctacctgaaatgtgtagctttatattttatggcattctagtatttttgtgtactgtattttgtgcatttcatgtcttcatcaaaatcctctcagtccttgttcttttgaagcttgtgctgaggttttagcttttctatgttttatatgccgctgctttgaaagagaacctagattctatagttgtattattgttgtttcatactttaaatttatatggctgtggaaaaacgaattaaaatgttttgaggagaaagaaaaaaaaaa

SEQ ID NO: 1670 - DNA, 4004 bp, Homo sapiens
ctgctccatctagctctttccagtgcagccactgccgccgcccaggagccctcgtcccctgccttgtccccctactcgttcccgctcccacggcatggagcaggacactgccgcagtggcagccaccgtggcagccgcggatgcgaccgccactatcgtggtcatagaggacgagcagcccgggccgtccacctctcaggaggagggagcggccgccgcggccaccgaagccaccgcggccacggagaagggcgagaagaagaaggagaaaaacgtttcttcatttcaactcaaacttgctgctaaagcgcctaaatctgaaaaggaaatggacccagaatatgaagagaaaatgaaagccgaccgagcaaagagatttgaatttttactgaagcagacagaactttttgcacatttcattcagccttcagcacagaaatctccaacatctccactgaacatgaaattgggacgtccccgaataaagaaagatgaaaagcagagcttaatttctgctggagactaccgccataggcgcacagagcaagaagaagatgaagagctactgtctgagagtcggaaaacatctaatgtgtgtattagatttgaggtgtcaccttcatatgtgaaaggggggccactgagagattatcagattcgaggactgaattggttgatctctttatatgaaaatggagtcaatggcattttggctgatgaaattcctggacctcacatggttttagttccaaagtctactttacacaactggatgaatgaatttaaacgatgggtcccatctctccgtgtcatttgttttgtcggagacaaggatgccagagctgcttttattcgtgatgaaatgatgccaggagagtgggatgtttgcgttacttcttatgagatggtaattaaagaaaaatctgtattcaaaaagtttcactggcgatacctggtcattgatgaagctcacagaataaagaatgaaaaatctaagctttcagagattgttcgtgagttcaagtcgactaaccgcttgctcctaactggaacacctttgcagaataacctgcatgaactgtgggccttactcaactttttattgcctgatgtctttaattctgcagatgactttgattcttggtttgacactaaaaattgtcttggtgatcaaaaactcgtggaaagacttcatgcagttttaaaaccatttttgttacgccgtataaaaactgatgtagagaagagtctgccacctaaaaaggaaataaagatttacttggggctgagtaagatgcaacgagaatggtatacaaaaatcctgatgaaagatattgatgttttaaactcttctggcaagatggacaagatgcgactcttaaacattctgatgcagcttcgaaagtgttgtaatcatccatatctgtttgatggtgctgaacctggtccaccttataccactgatgagcatattgtcagcaacagtggtaaaatggtagttctggataaactattggccaaactcaaagaacagggttcaagggttctcattttcagccagatgactcgcttgctggatattttggaagattattgcatgtggcgtggttatgagtattgtcgactggatggacaaaccccgcatgaagaaagagaggataaattcctagaagtggaatttctgggtcaaagggaagcaatagaggcttttaatgctcctaatagtagcaaattcatctttatgctaagtaccagggctggaggtctcggaattaacctggcaagtgctgatgtggttatactatatgattcagactggaacccacaggttgatctacaagctatggatcgagcacatcgtattggtcagaagaaaccagtacgtgtattccgtctcatcactgacaacactgttgaagagaggattgtagaaagagctgagataaaactgagactcgattcaattgttatacaacaaggaagactcattgaccaacagtctaacaagctggcaaaagaggaaatgttacaaatgatacggcatggagccacccatgtttttgcttctaaagagagtgagttgacagatgaagacattacaactattctggaaagaggggaaaagaagactgcagagatgaatgaacgcctgcaaaaaatgggagagtcttctctaagaaattttagaatggacattgaacaaagtttatacaaatttgagggagaagattatagagaaaaacagaagcttggcatggtggaatggattgaacctcctaaacgagaacgcaaagcaaactacgcagtggatgcctactttagagaggctttgcgtgtcagcgagccaaagattccaaaggctccacggcctccaaaacagccaaatgttcaggattttcaatttttcccaccacgcttatttgagctcctggaaaaggaaattctttattatcggaagacaataggctataaggttccaaggaatcctgatatcccaaatccagctctggctcaaagagaagagcaaaaaaagattgatggagctgaacctcttacaccagaagagactgaagaaaaggaaaaacttctcacacagggtttcacaaactggactaaacgagattttaaccagtttattaaagctaatgagaaatatggaagagatgacattgataacatagctcgagaggtagagggcaaatcccctgaggaggtcatggagtattcagctgtattttgggaacgttgcaatgaattacaggacattgagaaaattatggctcaaattgaacgtggagaagcaagaattcaacgaaggatcagtatcaagaaagccctggatgccaaaattgcaagatacaaggctccatttcatcagttgcgcattcagtatggaaccagcaaaggaaagaactatactgaggaagaagatagattcttgatttgtatgttacacaaaatgggctttgatagagaaaatgtatatgaagaattaagacagtgtgtacgaaatgctccccagtttagatttgactggtttatcaagtctaggactgccatggaattccagagacgctgtaacactctgatttcattgattgagaaagaaaatatggaaattgaggaaagagagagagcagaaaagaagaaacgggcaactaaaactccaatggtaaaattttcagcattttcctaacttttagatttaacattgttgggccatttaaaatgtgcatattggagcagaacattaaatctgtttccattttagtcacagaaaagaaaagcagagtcagctactgagagctctggaaagaaggatgtcaagaaggtgaaatcctaaagcctagaaataaagttttaaatgggaaactgctattttcttgttcccatcttcaaatgctaattgccagttccagtgtattcatggtactctaagaaaaatctctttggttttgatttcttgcatattttatatattttacaatgctttctacctgaaatgtgtagctttatattttatggcattctagtatttttgtgtactgtattttgtgcatttcatgtcttcatcaaaatcctctcagtccttgttcttttgaagcttgtgctgaggttttagcttttctatgttttatatgccgctgctttgaaagagaacctagattctatagttgtattattgttgtttcatactttaaatttatatggctgtggaaaaacgaattaaaatgttttgaggagaaagactttttcacttctttgttgctttcttttctattgagtctgggcttgtttgtgttactgcatactgtgattagcataataattgtttctttgaggtcatctaaatatttttttcctaaaggaataaagggtgaggaaagaaaaatattaaaaaagctaatatttgatactgtgcttgctgtcagtatgcattacatttaaattattctctattcaagtgggaaaatataataaagaaatgtctataagaaatttaa

SEQ ID NO: 1671 - DNA, 4024 bp, Homo sapiens; identical to SEQ ID NO: 1668

SEQ ID NO: 1672 - DNA, 6790 bp, Homo sapiens
cttctctcccagggcggtgcgacccggagctccagcgcccgagtctccacttcgtttgctgaaacttgctttctaccagctaagaaccatgctgcgagtgattgtggaatctgccagcaatatccctaaaacgaaatttggcaagccggatcctattgtttctgtcatttttaaggatgagaaaaagaaaacaaagaaagttgataatgaattgaaccctgtctggaatgagattttggagtttgacttgaggggtataccactggacttttcatcttcccttgggattattgtgaaagattttgagacaattggacaaaataaattaattggcacggcgactgtagccctgaaggacctgactggtgaccagagcagatccctgccgtacaagctgatctccctgctaaatgaaaaagggcaagatactggggccaccattgacttggtgatcggctatgatccgccttctgctccacatccaaatgacctgagcgggcccagcgtgccaggcatgggaggagatggggaagaagatgaaggtgatgaagacaggttggacaatgcagtcaggggccctgggcccaaggggccagttgggacggtgtcggaagctcagcttgctcggaggctcaccaaagtaaagaacagccggcggatgctgtcaaataagccacaggacttccagatccgcgtccgagtgattgagggccgacagttaagtggtaacaacataaggcctgtggtcaaagttcacgtctgtggccagacacaccgaacaagaatcaagagaggaaacaaccctttttttgatgagttgtttttctacaatgtcaacatgaccccttctgaattgatggatgagatcatcagcatccgggtttataattctcactctctgcgggcagattgtctgatgggggaatttaagattgatgttggatttgtttatgatgaacctggccatgctgtcatgagaaagtggcttcttctcaatgacccggaagataccagttcaggttctaaaggttatatgaaagtcagcatgtttgtcctgggaaccggagatgagcctcctcctgagagacgagatcgtgataatgacagtgatgatgtggagagtaatttgttactccctgctggcattgccctccggtgggtgaccttcttgctgaaaatctaccgagctgaggacatcccccagatggatgatgccttctcacagacagtaaaggaaatatttggaggcaatgcagataagaaaaatctcgtggatccttttgtagaagtttcctttgctggaaaaaaggtttgtacaaacataattgagaaaaatgcaaacccagagtggaatcaggtcgtcaatcttcagatcaagtttccttcagtgtgtgaaaaaataaaactaacaatatatgactgggaccgtcttactaaaaatgatgtagttggaacaacatatctacacctctctaaaattgctgcctctggtggggaagtggaagtaaacacaggagaaacagaggtaggctttgttccaacgtttggaccttgttacctgaatctttatggaagccccagggagtacacgggattcccagacccctatgatgagctgaatactggaaagggggaaggagttgcctacagaggcaggatcttggttgaattagccacttttcttgagaagacaccaccagataaaaagcttgagcccatttcaaatgatgacctgctggttgttgagaaataccagcgaaggcggaagtacagcctgtctgccgtgtttcattcagccaccatgttgcaagatgttggtgaggccattcagtttgaagtcagcattgggaactatggcaacaagtttgacaccacctgtaagcctttggcatcaacaactcagtacagccgtgctgtatttgatggcaactactattattacttgccttgggcccacaccaagccagttgttaccctgacttcatactgggaggatattagtcatcgcctggatgcggtgaacactctcctagctatggcagaacggctgcaaacaaatatagaagctctaaaatcagggatacaaggtaaaattcctgcaaaccagctggctgaattgtggctgaagctgatagatgaagttatagaagacacgagatacacgttgcctctcacagaaggaaaagccaacgtcacagttctcgatactcagatccgaaagctgcggtccaggtctctctcccaaatacatgaggcggctgtgaggatgaggtcggaagccacagatgtgaagtccacactggcagaaattgaggactggcttgataaattaatgcagctgactgaagagccacagaacagcatgcctgacatcatcatctggatgatccggggagagaagagactggcctatgcacgaattcccgcacatcaggtcttgtactccaccagtggtgagaatgcatctggaaaatactgtgggaaaacccaaaccatctttctgaagtatccacaggagaaaaacaacgggccaaaggtgcctgtggagttgcgagtgaacatctggctaggcttaagtgctgtggagaagaagtttaacagcttcgcagaaggaactttcaccgtctttgctgaaatgtatgaaaatcaagctctcatgtttggaaaatggggtacttctggattagtaggacgtcataagttttctgatgtcacaggaaaaataaaactcaagagggaattttttctgcctccaaaaggctgggaatgggaaggagagtggatagttgatcctgaaagaagcttgctgactgaggcagatgcaggtcacacggagttcactgatgaagtctatcagaacgagagccgctaccccgggggcgactggaagccggccgaggacacctacacggatgcgaacggcgataaagcagcatcacccagcgagttgacttgtcctccaggttgggaatgggaagatgatgcatggtcttatgacataaatcgagcggtggatgagaaaggctgggaatatggaatcaccattcctcctgatcataagcccaaatcctgggttgcagcagagaaaatgtaccacactcatagacggcgaaggctggtccgaaaacgcaagaaagatttaacacagactgcttcaagcaccgcaagggccatggaggaattgcaagaccaagagggctgggaatatgcttctctaattggctggaaatttcactggaaacaacgtagttcagataccttccgccgcagacgctggaggagaaaaatggctccttcagaaacacatggtgcagctgccatctttaaacttgaaggtgcccttggggcagacactaccgaagatggggatgagaagagcctggagaaacagaagcacagtgccaccactgtgttcggagcaaacacccccattgtttcctgcaattttgacagagtctacatctaccatctgcgctgctatgtctatcaagccagaaacctcttggctttagataaggatagcttttcagatccatatgctcatatctgtttcctccatcggagcaaaaccactgagatcatccattcaaccctgaatcccacgtgggaccaaacaattatattcgatgaagttgaaatctatggggaaccccaaacagttctacagaatccacccaaagttatcatggaactttttgacaatgaccaagtgggcaaagatgaatttttaggacgaagcattttctctcctgtggtgaaactgaactcagaaatggacatcacacccaaacttctctggcacccagtaatgaatggagacaaagcctgcggggatgttcttgtaactgcagagctgattctgaggggcaaggatggctccaaccttcccattcttccccctcaaagggcgccaaatctatacatggtcccccaggggatcaggcctgtggtccagctcactgccattgagattctagcttggggcttaagaaatatgaaaaacttccagatggcttctatcacatcccccagtcttgttgtggagtgtggaggagaaagggtggaatcggtggtgatcaaaaaccttaagaagacacccaactttccaagttctgttctcttcatgaaagtgttcttgcccaaggaggaattgtacatgcccccactggtgatcaaggtcatcgaccacaggcagtttgggcggaagcctgtcgtcggccagtgcaccatcgagcgcctggaccgctttcgctgtgacccttatgcagggaaagaggacatcgtcccacagctcaaagcctcccttctgtctgccccaccatgccgggacatcgttatcgaaatggaagacaccaaaccattactggcttctaagctgacagaaaaggaggaagaaatcgtggactggtggagtaaattttatgcttcctcaggggaacatgaaaaatgcggacagtatattcagaaaggctattccaagctcaagatatataattgtgaactagaaaatgtagcagaatttgagggcctgacagacttctcagatacgttcaagttgtaccgaggcaagtcggatgaaaatgaagatccttctgtggttggagagtttaagggctcctttcggatctaccctctgccggatgaccccagcgtgccagcccctcccagacagtttcgggaattacctgacagcgtcccacaggaatgcacggttaggatttacattgttcgaggcttagagctccagccccaggacaacaatggcctgtgtgacccttacataaaaataacactgggcaaaaaagtcattgaagaccgagatcactacattcccaacactctcaacccagtctttggcaggatgtacgaactgagctgctacttacctcaagaaaaagacctgaaaatttctgtctatgattatgacacctttacccgggatgaaaaagtaggagaaacaattattgatctggaaaaccgattcctttcccgctttgggtcccactgcggcataccagaggagtactgtgtttctggagtcaatacctggcgagatcaactgagaccaacacagctgcttcaaaatgtcgccagattcaaaggcttcccacaacccatcctttccgaagatgggagtagaatcagatatggaggacgagactacagcttggatgaatttgaagccaacaaaatcctgcaccagcacctcggggcccctgaagagcggcttgctcttcacatcctcaggactcaggggctggtccctgagcacgtggaaacaaggactttgcacagcaccttccagcccaacatttcccagggaaaacttcagatgtgggtggatgttttccccaagagtttggggccaccaggccctcctttcaacatcacaccccggaaagccaagaaatactacctgcgtgtgatcatctggaacaccaaggacgttatcttggacgagaaaagcatcacaggagaggaaatgagtgacatctacgtcaaaggctggattcctggcaatgaagaaaacaaacagaaaacagatgtccattacagatctttggatggtgaagggaattttaactggcgatttgttttcccgtttgactaccttccagccgaacaactctgtatcgttgcgaaaaaagagcatttctggagtattgaccaaacggaatttcgaatcccacccaggctgatcattcagatatgggacaatgacaagttttctctggatgactacttgggtttcctagaacttgacttgcgtcacacgatcattcctgcaaaatcaccagagaaatgcaggttggacatgattccggacctcaaagccatgaacccccttaaagccaagacagcctccctctttgagcagaagtccatgaaaggatggtggccatgctacgcagagaaagatggcgcccgcgtaatggctgggaaagtggagatgacattggaaatcctcaacgagaaggaggccgacgagaggccagccgggaaggggcgggacgaacccaacatgaaccccaagctggacttaccaaatcgaccagaaacctccttcctctggttcaccaacccatgcaagaccatgaagttcatcgtgtggcgccgctttaagtgggtcatcatcggcttgctgttcctgcttatcctgctgctcttcgtggccgtgctcctctactctttgccgaactatttgtcaatgaagattgtaaagccaaatgtgtaacaaaggcaaaggcttcatttcaagagtcatccagcaatgagagaatcctgcctctgtagaccaacatccagtgtgattttgtgtctgagaccacaccccagtagcaggttacgccatgtcaccgagccccattgattcccagagggtcttagtcctggaaagtcaggccaacaagcaacgtttgcatcatgttatctcttaagtattaaaagttttattttctaaagtttaaatcatgtttttcaaaatatttttcaaggtggctggttccatttaaaaatcatctttttatatgtgtcttcggttctagacttcagcttttggaaattgctaaatagaattcaaaaatctctgcatcctgaggtgatatacttcatatttgtaatcaactgaaagagctgtgcattataaaatcagttagaatagttagaacaattcttatttatgcccacaaccattgctatattttgtatggatgtcataaaagtctatttaacctctgtaatgaaactaaataaaaatgtttcacctttaaaaaaaaaaaaaaaaaaaaaa

SEQ ID NO: 1673 - DNA, 6818 bp, Homo sapiens
atcctcccttcactgggagagaacttctctcccagggcggtgcgacccggagctccagcgcccgagtctccacttcgtttgctgaaacttgctttctaccagctaagaaccatgctgcgagtgattgtggaatctgccagcaatatccctaaaacgaaatttggcaagccggatcctattgtttctgtcatttttaaggatgagaaaaagaaaacaaagaaagttgataatgaattgaaccctgtctggaatgagattttggagtttgacttgaggggtataccactggacttttcatcttcccttgggattattgtgaaagattttgagacaattggacaaaataaattaattggcacggcgactgtagccctgaaggacctgactggtgaccagagcagatccctgccgtacaagctgatctccctgctaaatgaaaaagggcaagatactggggccaccattgacttggtgatcggctatgatccgccttctgctccacatccaaatgacctgagcgggcccagcgtgccaggcatgggaggagatggggaagaagatgaaggtgatgaagacaggttggacaatgcagtcaggggccctgggcccaaggggccagttgggacggtgtcggaagctcagcttgctcggaggctcaccaaagtaaagaacagccggcggatgctgtcaaataagccacaggacttccagatccgcgtccgagtgattgagggccgacagttaagtggtaacaacataaggcctgtggtcaaagttcacgtctgtggccagacacaccgaacaagaatcaagagaggaaacaaccctttttttgatgagttgtttttctacaatgtcaacatgaccccttctgaattgatggatgagatcatcagcatccgggtttataattctcactctctgcgggcagattgtctgatgggggaatttaagattgatgttggatttgtttatgatgaacctggccatgctgtcatgagaaagtggcttcttctcaatgacccggaagataccagttcaggttctaaaggttatatgaaagtcagcatgtttgtcctgggaaccggagatgagcctcctcctgagagacgagatcgtgataatgacagtgatgatgtggagagtaatttgttactccctgctggcattgccctccggtgggtgaccttcttgctgaaaatctaccgagctgaggacatcccccagatggatgatgccttctcacagacagtaaaggaaatatttggaggcaatgcagataagaaaaatctcgtggatccttttgtagaagtttcctttgctggaaaaaaggtttgtacaaacataattgagaaaaatgcaaacccagagtggaatcaggtcgtcaatcttcagatcaagtttccttcagtgtgtgaaaaaataaaactaacaatatatgactgggaccgtcttactaaaaatgatgtagttggaacaacatatctacacctctctaaaattgctgcctctggtggggaagtggaagatttctcatcttcgggaactggggctgcatcatatacagtaaacacaggagaaacagaggtaggctttgttccaacgtttggaccttgttacctgaatctttatggaagccccagagagtacacgggattcccagacccctatgatgagctgaatactggaaagggggaaggagttgcctacagaggcaggatcttggttgaattagccacttttcttgagaagacaccaccagataaaaagcttgagcccatttcaaatgatgacctgctggttgttgagaaataccagcgaaggcggaagtacagcctgtctgccgtgtttcattcagccaccatgttgcaagatgttggtgaggccattcagtttgaagtcagcattgggaactatggcaacaagtttgacaccacctgtaagcctttggcatcaacaactcagtacagccgtgctgtatttgatggcaactactattattacttgccttgggcccacaccaagccagttgttaccctgacttcatactgggaggatattagtcatcgcctggatgcggtgaacactctcctagctatggcagaacggctgcaaacaaatatagaagctctaaaatcagggatacaaggtaaaattcctgcaaaccagctggctgaattgtggctgaagctgatagatgaagttatagaagacacgagatacacgttgcctctcacagaaggaaaagccaacgtcacagttctcgatactcagatccgaaagctgcggtccaggtctctctcccaaatacatgaggcggctgtgaggatgaggtcggaagccacagatgtgaagtccacactggcagaaattgaggactggcttgataaattaatgcagctgactgaagagccacagaacagcatgcctgacatcatcatctggatgatccggggagagaagagactggcctatgcacgaattcccgcacatcaggtcttgtactccaccagtggtgagaatgcatctggaaaatactgtgggaaaacccaaaccatctttctgaagtatccacaggagaaaaacaacgggccaaaggtgcctgtggagttgcgagtgaacatctggctaggcttaagtgctgtggagaagaagtttaacagcttcgcagaaggaactttcaccgtctttgctgaaatgtatgaaaatcaagctctcatgtttggaaaatggggtacttctggattagtaggacgtcataagttttctgatgtcacaggaaaaataaaactcaagagggaattttttctgcctccaaaaggctgggaatgggaaggagagtggatagttgatcctgaaagaagcttgctgactgaggcagatgcaggtcacacggagttcactgatgaagtctatcagaacgagagccgctaccccgggggcgactggaagccggccgaggacacctacacggatgcgaacggcgataaagcagcatcacccagcgagttgacttgtcctccaggttgggaatgggaagatgatgcatggtcttatgacataaatcgagcggtggatgagaaaggctgggaatatggaatcaccattcctcctgatcataagcccaaatcctgggttgcagcagagaaaatgtaccacactcatagacggcgaaggctggtccgaaaacgcaagaaagatttaacacagactgcttcaagcaccgcaagggccatggaggaattgcaagaccaagagggctgggaatatgcttctctaattggctggaaatttcactggaaacaacgtagttcagataccttccgccgcagacgctggaggagaaaaatggctccttcagaaacacatggtgcagctgccatctttaaacttgaaggtgcccttggggcagacactaccgaagatggggatgagaagagcctggagaaacagaagcacagtgccaccactgtgttcggagcaaacacccccattgtttcctgcaattttgacagagtctacatctaccatctgcgctgctatgtctatcaagccagaaacctcttggctttagataaggatagcttttcagatccatatgctcatatctgtttcctccatcggagcaaaaccactgagatcatccattcaaccctgaatcccacgtgggaccaaacaattatattcgatgaagttgaaatctatggggaaccccaaacagttctacagaatccacccaaagttatcatggaactttttgacaatgaccaagtgggcaaagatgaatttttaggacgaagcattttctctcctgtggtgaaactgaactcagaaatggacatcacacccaaacttctctggcacccagtaatgaatggagacaaagcctgcggggatgttcttgtaactgcagagctgattctgaggggcaaggatggctccaaccttcccattcttccccctcaaagggcgccaaatctatacatggtcccccaggggatcaggcctgtggtccagctcactgccattgagattctagcttggggcttaagaaatatgaaaaacttccagatggcttctatcacatcccccagtcttgttgtggagtgtggaggagaaagggtggaatcggtggtgatcaaaaaccttaagaagacacccaactttccaagttctgttctcttcatgaaagtgttcttgcccaaggaggaattgtacatgcccccactggtgatcaaggtcatcgaccacaggcagtttgggcggaagcctgtcgtcggccagtgcaccatcgagcgcctggaccgctttcgctgtgacccttatgcagggaaagaggacatcgtcccacagctcaaagcctcccttctgtctgccccaccatgccgggacatcgttatcgaaatggaagacaccaaaccattactggcttctaaggaggaagaaatcgtggactggtggagtaaattttatgcttcctcaggggaacatgaaaaatgcggacagtatattcagaaaggctattccaagctcaagatatataattgtgaactagaaaatgtagcagaatttgagggcctgacagacttctcagatacgttcaagttgtaccgaggcaagtcggatgaaaatgaagatccttctgtggttggagagtttaagggctcctttcggatctaccctctgccggatgaccccagcgtgccagcccctcccagacagtttcgggaattacctgacagcgtcccacaggaatgcacggttaggatttacattgttcgaggcttagagctccagccccaggacaacaatggcctgtgtgacccttacataaaaataacactgggcaaaaaagtcattgaagaccgagatcactacattcccaacactctcaacccagtctttggcaggatgtacgaactgagctgctacttacctcaagaaaaagacctgaaaatttctgtctatgattatgacacctttacccgggatgaaaaagtaggagaaacaattattgatctggaaaaccgattcctttcccgctttgggtcccactgcggcataccagaggagtactgtgtttctggagtcaatacctggcgagatcaactgagaccaacacagctgcttcaaaatgtcgccagattcaaaggcttcccacaacccatcctttccgaagatgggagtagaatcagatatggaggacgagactacagcttggatgaatttgaagccaacaaaatcctgcaccagcacctcggggcccctgaagagcggcttgctcttcacatcctcaggactcaggggctggtccctgagcacgtggaaacaaggactttgcacagcaccttccagcccaacatttcccagggaaaacttcagatgtgggtggatgttttccccaagagtttggggccaccaggccctcctttcaacatcacaccccggaaagccaagaaatactacctgcgtgtgatcatctggaacaccaaggacgttatcttggacgagaaaagcatcacaggagaggaaatgagtgacatctacgtcaaaggctggattcctggcaatgaagaaaacaaacagaaaacagatgtccattacagatctttggatggtgaagggaattttaactggcgatttgttttcccgtttgactaccttccagccgaacaactctgtatcgttgcgaaaaaagagcatttctggagtattgaccaaacggaatttcgaatcccacccaggctgatcattcagatatgggacaatgacaagttttctctggatgactacttgggtttcctagaacttgacttgcgtcacacgatcattcctgcaaaatcaccagagaaatgcaggttggacatgattccggacctcaaagccatgaacccccttaaagccaagacagcctccctctttgagcagaagtccatgaaaggatggtggccatgctacgcagagaaagatggcgcccgcgtaatggctgggaaagtggagatgacattggaaatcctcaacgagaaggaggccgacgagaggccagccgggaaggggcgggacgaacccaacatgaaccccaagctggacttaccaaatcgaccagaaacctccttcctctggttcaccaacccatgcaagaccatgaagttcatcgtgtggcgccgctttaagtgggtcatcatcggcttgctgttcctgcttatcctgctgctcttcgtggccgtgctcctctactctttgccgaactatttgtcaatgaagattgtaaagccaaatgtgtaacaaaggcaaaggcttcatttcaagagtcatccagcaatgagagaatcctgcctctgtagaccaacatccagtgtgattttgtgtctgagaccacaccccagtagcaggttacgccatgtcaccgagccccattgattcccagagggtcttagtcctggaaagtcaggccaacaagcaacgtttgcatcatgttatctcttaagtattaaaagttttattttctaaagtttaaatcatgtttttcaaaatatttttcaaggtggctggttccatttaaaaatcatctttttatatgtgtcttcggttctagacttcagcttttggaaattgctaaatagaattcaaaaatctctgcatcctgaggtgatatacttcatatttgtaatcaactgaaagagctgtgcattataaaatcagttagaatagttagaacaattcttatttatgcccacaaccattgctatattttgtatggatgtcataaaagtctatttaacctctgtaatgaaactaaataaaaatgtttcaccttt

SEQ ID NO: 1674 - DNA, 6818 bp, Homo sapiens; identical to SEQ ID NO: 1673

SEQ ID NO: 1675 - DNA, 6837 bp, Homo sapiens
ggcacgagcttctctcccagggcggtgcgacccggagctccagcgcccgagtctccacttcgtttgctgaaacttgctttctaccagctaagaaccatgctgcgagtgattgtggaatctgccagcaatatccctaaaacgaaatttggcaagccggatcctattgtttctgtcatttttaaggatgagaaaaagaaaacaaagaaagttgataatgaattgaaccctgtctggaatgagattttggagtttgacttgaggggtataccactggacttttcatcttcccttgggattattgtgaaagattttgagacaattggacaaaataaattaattggcacggcgactgtagccctgaaggacctgactggtgaccagagcagatccctgccgtacaagctgatctccctgctaaatgaaaaagggcaagatactggggccaccattgacttggtgatcggctatgatccgccttctgctccacatccaaatgacctgagcgggcccagcgtgccaggcatgggaggagatggggaagaagatgaaggtgatgaagacaggttggacaatgcagtcaggggccctgggcccaaggggccagttgggacggtgtcggaagctcagcttgctcggaggctcaccaaagtaaagaacagccggcggatgctgtcaaataagccacaggacttccagatccgcgtccgagtgattgagggccgacagttaagtggtaacaacataaggcctgtggtcaaagttcacgtctgtggccagacacaccgaacaagaatcaagagaggaaacaaccctttttttgatgagttgtttttctacaatgtcaacatgaccccttctgaattgatggatgagatcatcagcatccgggtttataattctcactctctgcgggcagattgtctgatgggggaatttaagattgatgttggatttgtttatgatgaacctggccatgctgtcatgagaaagtggcttcttctcaatgacccggaagataccagttcaggttctaaaggttatatgaaagtcagcatgtttgtcctgggaaccggagatgagcctcctcctgagagacgagatcgtgataatgacagtgatgatgtggagagtaatttgttactccctgctggcattgccctccggtgggtgaccttcttgctgaaaatctaccgagctgaggacatcccccagatggatgatgccttctcacagacagtaaaggaaatatttggaggcaatgcagataagaaaaatctcgtggatccttttgtagaagtttcctttgctggaaaaaaggtttgtacaaacataattgagaaaaatgcaaacccagagtggaatcaggtcgtcaatcttcagatcaagtttccttcagtgtgtgaaaaaataaaactaacaatatatgactgggaccgtcttactaaaaatgatgtagttggaacaacatatctacacctctctaaaattgctgcctctggtggggaagtggaagatttctcatcttcgggaactggggctgcatcatatacagtaaacacaggagaaacagaggtaggctttgttccaacgtttggaccttgttacctgaatctttatggaagccccagggagtacacgggattcccagacccctatgatgagctgaatactggaaagggggaaggagttgcctacagaggcaggatcttggttgaattagccacttttcttgagaagacaccaccagataaaaagcttgagcccatttcaaatgatgacctgctggttgttgagaaataccagcgaaggcggaagtacagcctgtctgccgtgtttcattcagccaccatgttgcaagatgttggtgaggccattcagtttgaagtcagcattgggaactatggcaacaagtttgacaccacctgtaagcctttggcatcaacaactcagtacagccgtgctgtatttgatggcaactactattattacttgccttgggcccacaccaagccagttgttaccctgacttcatactgggaggatattagtcatcgcctggatgcggtgaacactctcctagctatggcagaacggctgcaaacaaatatagaagctctaaaatcagggatacaaggtaaaattcctgcaaaccagctggctgaattgtggctgaagctgatagatgaagttatagaagacacgagatacacgttgcctctcacagaaggaaaagccaacgtcacagttctcgatactcagatccgaaagctgcggtccaggtctctctcccaaatacatgaggcggctgtgaggatgaggtcggaagccacagatgtgaagtccacactggcagaaattgaggactggcttgataaattaatgcagctgactgaagagccacagaacagcatgcctgacatcatcatctggatgatccggggagagaagagactggcctatgcacgaattcccgcacatcaggtcttgtactccaccagtggtgagaatgcatctggaaaatactgtgggaaaacccaaaccatctttctgaagtatccacaggagaaaaacaacgggccaaaggtgcctgtggagttgcgagtgaacatctggctaggcttaagtgctgtggagaagaagtttaacagcttcgcagaaggaactttcaccgtctttgctgaaatgtatgaaaatcaagctctcatgtttggaaaatggggtacttctggattagtaggacgtcataagttttctgatgtcacaggaaaaataaaactcaagagggaattttttctgcctccaaaaggctgggaatgggaaggagagtggatagttgatcctgaaagaagcttgctgactgaggcagatgcaggtcacacggagttcactgatgaagtctatcagaacgagagccgctaccccgggggcgactggaagccggccgaggacacctacacggatgcgaacggcgataaagcagcatcacccagcgagttgacttgtcctccaggttgggaatgggaagatgatgcatggtcttatgacataaatcgagcggtggatgagaaaggctgggaatatggaatcaccattcctcctgatcataagcccaaatcctgggttgcagcagagaaaatgtaccacactcatagacggcgaaggctggtccgaaaacgcaagaaagatttaacacagactgcttcaagcaccgcaagggccatggaggaattgcaagaccaagagggctgggaatatgcttctctaattggctggaaatttcactggaaacaacgtagttcagataccttccgccgcagacgctggaggagaaaaatggctccttcagaaacacatggtgcagctgccatctttaaacttgaaggtgcccttggggcagacactaccgaagatggggatgagaagagcctggagaaacagaagcacagtgccaccactgtgttcggagcaaacacccccattgtttcctgcaattttgacagagtctacatctaccatctgcgctgctatgtctatcaagccagaaacctcttggctttagataaggatagcttttcagatccatatgctcatatctgtttcctccatcggagcaaaaccactgagatcatccattcaaccctgaatcccacgtgggaccaaacaattatattcgatgaagttgaaatctatggggaaccccaaacagttctacagaatccacccaaagttatcatggaactttttgacaatgaccaagtgggcaaagatgaatttttaggacgaagcattttctctcctgtggtgaaactgaactcagaaatggacatcacacccaaacttctctggcacccagtaatgaatggagacaaagcctgcggggatgttcttgtaactgcagagctgattctgaggggcaaggatggctccaaccttcccattcttccccctcaaagggcgccaaatctatacatggtcccccaggggatcaggcctgtggtccagctcactgccattgagattctagcttggggcttaagaaatatgaaaaacttccagatggcttctatcacatcccccagtcttgttgtggagtgtggaggagaaagggtggaatcggtggtgatcaaaaaccttaagaagacacccaactttccaagttctgttctcttcatgaaagtgttcttgcccaaggaggaattgtacatgcccccactggtgatcaaggtcatcgaccacaggcagtttgggcggaagcctgtcgtcggccagtgcaccatcgagcgcctggaccgctttcgctgtgacccttatgcagggaaagaggacatcgtcccacagctcaaagcctcccttctgtctgccccaccatgccgggacatcgttatcgaaatggaagacaccaaaccattactggcttctaagctgacagaaaaggaggaagaaatcgtggactggtggagtaaattttatgcttcctcaggggaacatgaaaaatgcggacagtatattcagaaaggctattccaagctcaagatatataattgtgaactagaaaatgtagcagaatttgagggcctgacagacttctcagatacgttcaagttgtaccgaggcaagtcggatgaaaatgaagatccttctgtggttggagagtttaagggctcctttcggatctaccctctgccggatgaccccagcgtgccagcccctcccagacagtttcgggaattacctgacagcgtcccacaggaatgcacggttaggatttacattgttcgaggcttagagctccagccccaggacaacaatggcctgtgtgacccttacataaaaataacactgggcaaaaaagtcattgaagaccgagatcactacattcccaacactctcaacccagtctttggcaggatgtacgaactgagctgctacttacctcaagaaaaagacctgaaaatttctgtctatgattatgacacctttacccgggatgaaaaagtaggagaaacaattattgatctggaaaaccgattcctttcccgctttgggtcccactgcggcataccagaggagtactgtgtttctggagtcaatacctggcgagatcaactgagaccaacacagctgcttcaaaatgtcgccagattcaaaggcttcccacaacccatcctttccgaagatgggagtagaatcagatatggaggacgagactacagcttggatgaatttgaagccaacaaaatcctgcaccagcacctcggggcccctgaagagcggcttgctcttcacatcctcaggactcaggggctggtccctgagcacgtggaaacaaggactttgcacagcaccttccagcccaacatttcccagggaaaacttcagatgtgggtggatgttttccccaagagtttggggccaccaggccctcctttcaacatcacaccccggaaagccaagaaatactacctgcgtgtgatcatctggaacaccaaggacgttatcttggacgagaaaagcatcacaggagaggaaatgagtgacatctacgtcaaaggctggattcctggcaatgaagaaaacaaacagaaaacagatgtccattacagatctttggatggtgaagggaattttaactggcgatttgttttcccgtttgactaccttccagccgaacaactctgtatcgttgcgaaaaaagagcatttctggagtattgaccaaacggaatttcgaatcccacccaggctgatcattcagatatgggacaatgacaagttttctctggatgactacttgggtttcctagaacttgacttgcgtcacacgatcattcctgcaaaatcaccagagaaatgcaggttggacatgattccggacctcaaagccatgaacccccttaaagccaagacagcctccctctttgagcagaagtccatgaaaggatggtggccatgctacgcagagaaagatggcgcccgcgtaatggctgggaaagtggagatgacattggaaatcctcaacgagaaggaggccgacgagaggccagccgggaaggggcgggacgaacccaacatgaaccccaagctggacttaccaaatcgaccagaaacctccttcctctggttcaccaacccatgcaagaccatgaagttcatcgtgtggcgccgctttaagtgggtcatcatcggcttgctgttcctgcttatcctgctgctcttcgtggccgtgctcctctactctttgccgaactatttgtcaatgaagattgtaaagccaaatgtgtaacaaaggcaaaggcttcatttcaagagtcatccagcaatgagagaatcctgcctctgtagaccaacatccagtgtgattttgtgtctgagaccacaccccagtagcaggttacgccatgtcaccgagccccattgattcccagagggtcttagtcctggaaagtcaggccaacaagcaacgtttgcatcatgttatctcttaagtattaaaagttttattttctaaagtttaaatcatgtttttcaaaatatttttcaaggtggctggttccatttaaaaatcatctttttatatgtgtcttcggttctagacttcagcttttggaaattgctaaatagaattcaaaaatctctgcatcctgaggtgatatacttcatatttgtaatcaactgaaagagctgtgcattataaaatcagttagaatagttagaacaattcttatttatgcccacaaccattgctatattttgtatggatgtcataaaagtctatttaacctctgtaatgaaactaaataaaaatgtttcacctttaaaaaaaaaaaaaaaaaaaaaa

SEQ ID NO: 1676 - DNA, 6936 bp, Homo sapiens
actgggagagaacttctctcccagggcggtgcgacccggagctccagcgcccgagtctccacttcgtttgctgaaacttgctttctaccagctaagaaccatgctgcgagtgattgtggaatctgccagcaatatccctaaaacgaaatttggcaagccggatcctattgtttctgtcatttttaagggttccatgagccagatccgaattgaggctggagtgagtgcctgtgagccaggggtggccattctgccctaagttccatgcggacagccaggctgtgaagctgaatctagctgagattagactacacagacctctgagaccaatttcaactctgagacttgatgattcttccaaacagtcctccaaacagaacagatgagaaaaagaaaacaaagaaagttgataatgaattgaaccctgtctggaatgagattttggagtttgacttgaggggtataccactggacttttcatcttcccttgggattattgtgaaagattttgagacaattggacaaaataaattaattggcacggcgactgtagccctgaaggacctgactggtgaccagagcagatccctgccgtacaagctgatctccctgctaaatgaaaaagggcaagatactggggccaccattgacttggtgatcggctatgatccgccttctgctccacatccaaatgacctgagcgggcccagcgtgccaggcatgggaggagatggggaagaagatgaaggtgatgaagacaggttggacaatgcagtcaggggccctgggcccaaggggccagttgggacggtgtcggaagctcagcttgctcggaggctcaccaaagtaaagaacagccggcggatgctgtcaaataagccacaggacttccagatccgcgtccgagtgattgagggccgacagttaagtggtaacaacataaggcctgtggtcaaagttcacgtctgtggccagacacaccgaacaagaatcaagagaggaaacaaccctttttttgatgagttgtttttctacaatgtcaacatgaccccttctgaattgatggatgagatcatcagcatccgggtttataattctcactctctgcgggcagattgtctgatgggggaatttaagattgatgttggatttgtttatgatgaacctggccatgctgtcatgagaaagtggcttcttctcaatgacccggaagataccagttcaggttctaaaggttatatgaaagtcagcatgtttgtcctgggaaccggagatgagcctcctcctgagagacgagatcgtgataatgacagtgatgatgtggagagtaatttgttactccctgctggcattgccctccggtgggtgaccttcttgctgaaaatctaccgagctgaggacatcccccagatggatgatgccttctcacagacagtaaaggaaatatttggaggcaatgcagataagaaaaatctcgtggatccttttgtagaagtttcctttgctggaaaaaaggtttgtacaaacataattgagaaaaatgcaaacccagagtggaatcaggtcgtcaatcttcagatcaagtttccttcagtgtgtgaaaaaataaaactaacaatatatgactgggaccgtcttactaaaaatgatgtagttggaacaacatatctacacctctctaaaattgctgcctctggtggggaagtggaagtaaacacaggagaaacagaggtaggctttgttccaacgtttggaccttgttacctgaatctttatggaagccccagagagtacacgggattcccagacccctatgatgagctgaatactggaaagggggaaggagttgcctacagaggcaggatcttggttgaattagccacttttcttgagaagacaccaccagataaaaagcttgagcccatttcaaatgatgacctgctggttgttgagaaataccagcgaaggcggaagtacagcctgtctgccgtgtttcattcagccaccatgttgcaagatgttggtgaggccattcagtttgaagtcagcattgggaactatggcaacaagtttgacaccacctgtaagcctttggcatcaacaactcagtacagccgtgctgtatttgatggcaactactattattacttgccttgggcccacaccaagccagttgttaccctgacttcatactgggaggatattagtcatcgcctggatgcggtgaacactctcctagctatggcagaacggctgcaaacaaatatagaagctctaaaatcagggatacaaggtaaaattcctgcaaaccagctggctgaattgtggctgaagctgatagatgaagttatagaagacacgagatacacgttgcctctcacagaaggaaaagccaacgtcacagttctcgatactcagatccgaaagctgcggtccaggtctctctcccaaatacatgaggcggctgtgaggatgaggtcggaagccacagatgtgaagtccacactggcagaaattgaggactggcttgataaattaatgcagctgactgaagagccacagaacagcatgcctgacatcatcatctggatgatccggggagagaagagactggcctatgcacgaattcccgcacatcaggtcttgtactccaccagtggtgagaatgcatctggaaaatactgtgggaaaacccaaaccatctttctgaagtatccacaggagaaaaacaacgggccaaaggtgcctgtggagttgcgagtgaacatctggctaggcttaagtgctgtggagaagaagtttaacagcttcgcagaaggaactttcaccgtctttgctgaaatgtatgaaaatcaagctctcatgtttggaaaatggggtacttctggattagtaggacgtcataagttttctgatgtcacaggaaaaataaaactcaagagggaattttttctgcctccaaaaggctgggaatgggaaggagagtggatagttgatcctgaaagaagcttgctgactgaggcagatgcaggtcacacggagttcactgatgaagtctatcagaacgagagccgctaccccgggggcgactggaagccggccgaggacacctacacggatgcgaacggcgataaagcagcatcacccagcgagttgacttgtcctccaggttgggaatgggaagatgatgcatggtcttatgacataaatcgagcggtggatgagaaaggctgggaatatggaatcaccattcctcctgatcataagcccaaatcctgggttgcagcagagaaaatgtaccacactcatagacggcgaaggctggtccgaaaacgcaagaaagatttaacacagactgcttcaagcaccgcaagggccatggaggaattgcaagaccaagagggctgggaatatgcttctctaattggctggaaatttcactggaaacaacgtagttcagataccttccgccgcagacgctggaggagaaaaatggctccttcagaaacacatggtgcagctgccatctttaaacttgaaggtgcccttggggcagacactaccgaagatggggatgagaagagcctggagaaacagaagcacagtgccaccactgtgttcggagcaaacacccccattgtttcctgcaattttgacagagtctacatctaccatctgcgctgctatgtctatcaagccagaaacctcttggctttagataaggatagcttttcagatccatatgctcatatctgtttcctccatcggagcaaaaccactgagatcatccattcaaccctgaatcccacgtgggaccaaacaattatattcgatgaagttgaaatctatggggaaccccaaacagttctacagaatccacccaaagttatcatggaactttttgacaatgaccaagtgggcaaagatgaatttttaggacgaagcattttctctcctgtggtgaaactgaactcagaaatggacatcacacccaaacttctctggcacccagtaatgaatggagacaaagcctgcggggatgttcttgtaactgcagagctgattctgaggggcaaggatggctccaaccttcccattcttccccctcaaagggcgccaaatctatacatggtcccccaggggatcaggcctgtggtccagctcactgccattgagattctagcttggggcttaagaaatatgaaaaacttccagatggcttctatcacatcccccagtcttgttgtggagtgtggaggagaaagggtggaatcggtggtgatcaaaaaccttaagaagacacccaactttccaagttctgttctcttcatgaaagtgttcttgcccaaggaggaattgtacatgcccccactggtgatcaaggtcatcgaccacaggcagtttgggcggaagcctgtcgtcggccagtgcaccatcgagcgcctggaccgctttcgctgtgacccttatgcagggaaagaggacatcgtcccacagctcaaagcctcccttctgtctgccccaccatgccgggacatcgttatcgaaatggaagacaccaaaccattactggcttctaagtgcttaagcagtatgtcaacagcactcagcaaaatggcttctccagcgacagtgcatctgacagaaaaggaggaagaaatcgtggactggtggagtaaattttatgcttcctcaggggaacatgaaaaatgcggacagtatattcagaaaggctattccaagctcaagatatataattgtgaactagaaaatgtagcagaatttgagggcctgacagacttctcagatacgttcaagttgtaccgaggcaagtcggatgaaaatgaagatccttctgtggttggagagtttaagggctcctttcggatctaccctctgccggatgaccccagcgtgccagcccctcccagacagtttcgggaattacctgacagcgtcccacaggaatgcacggttaggatttacattgttcgaggcttagagctccagccccaggacaacaatggcctgtgtgacccttacataaaaataacactgggcaaaaaagtcattgaagaccgagatcactacattcccaacactctcaacccagtctttggcaggatgtacgaactgagctgctacttacctcaagaaaaagacctgaaaatttctgtctatgattatgacacctttacccgggatgaaaaagtaggagaaacaattattgatctggaaaaccgattcctttcccgctttgggtcccactgcggcataccagaggagtactgtgtttctggagtcaatacctggcgagatcaactgagaccaacacagctgcttcaaaatgtcgccagattcaaaggcttcccacaacccatcctttccgaagatgggagtagaatcagatatggaggacgagactacagcttggatgaatttgaagccaacaaaatcctgcaccagcacctcggggcccctgaagagcggcttgctcttcacatcctcaggactcaggggctggtccctgagcacgtggaaacaaggactttgcacagcaccttccagcccaacattatactacctgcgtgtgatcatctggaacaccaaggacgttatcttggacgagaaaagcatcacaggagaggaaatgagtgacatctacgtcaaaggctggattcctggcaatgaagaaaacaaacagaaaacagatgtccattacagatctttggatggtgaagggaattttaactggcgatttgttttcccgtttgactaccttccagccgaacaactctgtatcgttgcgaaaaaagagcatttctggagtattgaccaaacggaatttcgaatcccacccaggctgatcattcagatatgggacaatgacaagttttctctggatgactacttgggtttcctagaacttgacttgcgtcacacgatcattcctgcaaaatcaccagagaaatgcaggttggacatgattccggacctcaaagccatgaacccccttaaagccaagacagcctccctctttgagcagaagtccatgaaaggatggtggccatgctacgcagagaaagatggcgcccgcgtaatggctgggaaagtggagatgacattggaaatcctcaacgagaaggaggccgacgagaggccagccgggaaggggcgggacgaacccaacatgaaccccaagctggacttaccaaatcgaccagaaacctccttcctctggttcaccaacccatgcaagaccatgaagttcatcgtgtggcgccgctttaagtgggtcatcatcggcttgctgttcctgcttatcctgctgctcttcgtggccgtgctcctctactctttgccgaactatttgtcaatgaagattgtaaagccaaatgtgtaacaaaggcaaaggcttcatttcaagagtcatccagcaatgagagaatcctgcctctgtagaccaacatccagtgtgattttgtgtctgagaccacaccccagtagcaggttacgccatgtcaccgagccccattgattcccagagggtcttagtcctggaaagtcaggccaacaagcaacgtttgcatcatgttatctcttaagtattaaaagttttattttctaaagtttaaatcatgtttttcaaaatatttttcaaggtggctggttccatttaaaaatcatctttttatatgtgtcttcggttctagacttcagcttttggaaattgctaaatagaattcaaaaatctctgcatcctgaggtgatatacttcatatttgtaatcaactgaaagagctgtgcattataaaatcagttagaatagttagaacaattcttatttatgcccacaaccattgctatattttgtatggatgtcataaaagtctatttaacctctgtaatgaaactaaataaaaatgtttcaccttt

SEQ ID NO: 1677 - DNA, 2223 bp, Homo sapiens
gctgagccttggccccggggctgttagaaggcagaggctctggggagaagtccccaaaccggatttacccgttcgtcgcacctgtccctaggagggcaggctggggtgtggaggcggtgccctgctgacccgcggggagagaagcccgggtctcccaggctgcaaaacgctcggcactgcggaagccgcgccaggctctcccagctcgatacgcagcggccggcgcgcctgctccgccgcggggccgagcggcagaggggcccggggctgcgtggaaggcccgggggcttcagcccgtgccggggaagccgacgctcagccaaccagaaagttagaggcggccgaggtctcgcggaggggaggcgcctggcggccacgggagaagtcgaagggctcaggcggggctccatccgcgacactgggagcccgggcgggcgcgcacgtgtgtatacgagtgcgtgggcccatccggcggcccggactacaagttccagggtgcccagcggcgctcccgggttttctggccgcgcctcccgctggctccgagcaggtcgccgctggctggcagtcgccacccggtcccagagtaaataagggagagacactcccgagcgccgtaaatagagtccaagtgggcggagagccgtcccgcgccgcccgctcatgtctctacagagccgactgtccggccgcctggcacagctgcgcgcggcggggcagctgctcgtccccccgcgcccccggcccggacacttggcgggtgccacgaggacccgcagcagcacgtgcggtcccccggcgttcctgggcgtgttcggccgccgtgcgcggacctcggcgggagttggggcgtggggggcggcggcggtggggcggacagccggggtgcgcacttgggcccccctggccatggcggcgaaggtggacctgagcacctccaccgactggaaggaggcgaaatcctttctgaagggcctgagtgacaagcagcgggaggaacattacttctgcaaggactttgtcaggctgaagaagatcccgacatggaaggagatggcgaaaggggtggctgtgaaggtggaggagcccaggtataaaaaggacaagcagctcaatgagaaaatctccctgctccgcagcgacatcaccaagctggaggtggacgccatcgtcaacgccgccaacagctccctgctcggaggcggtggcgtggacggctgcattcatcgggccgccggccccctgcttaccgacgagtgccggaccctgcagagctgtaagactggcaaggccaagatcaccggcggctatcggctcccggccaagtgtgagtccccgacgcgcccccagctgtggggcgcagacagggcgcccgtgtgtcactgggacatcaggggtgcggcccccacaggagtgctggggaactcctcagggggcccttcttaaccttaagggccaagacccggcccccaccccgcacaccccaggaagcacatgggggagaccgtgcgtggaggctgaggatggagctggggggcaacgccttcgcgcccacactcgcgctcgggtctcagccgggcccatacagatgtggggagggggcgcggggctctgtgcgcgtgcggattcgggctcgagggggcccacaggggtgggggccttcgcggaggaggctcagcgcttggggggaaaggtgtttcctgcccccttctgcccaggccggcagggggaagcgagggagctgaggaccgcgtagacccccgccggtctgaccccgtcgccccccgtagacgtcatccacacagtggggcccatcgcctacggggagcccagcgccagccaggctgccgagctccgcagctgctacctgagcagtctggacctgctgctggagcaccggctccgctcggtggtgagggacggcccgcgggggagggcgggaggcggggcgcagtgacaatgttccaaccccctctcacccctccccgcccaggcgttcccctgcatctccaccggcgtgtttggtgagtctggaagaaaggcaaggaccaggagtgggcggtggacccagacgccgggaggggccggggcggacaggggagtgggcggggccagagcctaggactcactcccgccccacccgcctcaggctacccctgtgaggcggccgccgagatcgtgctggccacgctgcgagagtggctggagcagcacaaggacaag

SEQ ID NO: 1678 - DNA, 1861 bp, Homo sapiens
gctgagccttggccccggggctgttagaaggcagaggctctggggagaagtccccaaaccggatttacccgttcgtcgcacctgtccctaggagggcaggctggggtgtggaggcggtgccctgctgacccgcggggagagaagcccgggtctcccaggctgcaaaacgctcggcactgcggaagccgcgccaggctctcccagctcgatacgcagcggccggcgcgcctgctccgccgcggggccgagcggcagaggggcccggggctgcgtggaaggcccgggggcttcagcccgtgccggggaagccgacgctcagccaaccagaaagttagaggcggccgaggtctcgcggaggggaggcgcctggcggccacgggagaagtcgaagggctcaggcggggctccatccgcgacactgggagcccgggcgggcgcgcacgtgtgtatacgagtgcgtgggcccatccggcggcccggactacaagttccagggtgcccagcggcgctcccgggttttctggccgcgcctcccgctggctccgagcaggtcgccgctggctggcagtcgccacccggtcccagagtaaataagggagagacactcccgagcgccgtaaatagagtccaagtgggcggagagccgtcccgcgccgcccgctcatgtctctacagagccgactgtccggccgcctggcacagctgcgcgcggcggggcagctgctcgtccccccgcgcccccggcccggacacttggcgggtgccacgaggacccgcagcagcacgtgcggtcccccggcgttcctgggcgtgttcggccgccgtgcgcggacctcggcgggagttggggcgtggggggcggcggcggtggggcggacagccggggtgcgcacttgggcccccctggccatggcggcgaaggtggacctgagcacctccaccgactggaaggaggcgaaatcctttctgaagggcctgagtgacaagcagcgggaggaacattacttctgcaaggactttgtcaggctgaagaagatcccgacatggaaggagatggcgaaaggggtggctgtgaaggtggaggagcccaggtataaaaaggacaagcagctcaatgagaaaatctccctgctccgcagcgacatcaccaagctggaggtggacgccatcgtcaacgccgccaacagctccctgctcggaggcggtggcgtggacggctgcattcatcgggccgccggccccctgcttaccgacgagtgccggaccctgcagagctgtaagactggcaaggccaagatcaccggcggctatcggctcccggccaagtacgtcatccacacagtggggcccatcgcctacggggagcccagcgccagccaggctgccgagctccgcagctgctacctgagcagtctggacctgctgctggagcaccggctccgctcggtggcgttcccctgcatctccaccggcgtgtttggctacccctgtgaggcggccgccgagatcgtgctggccacgctgcgagagtggctggagcagcacaaggacaaggtggaccggctgatcatctgcgtgttcctcgagaaggacgaggacatctaccggagccggctcccccactacttccccgtggcctgaggctcccgcagcccaccctgaccgggactgacccgccttcgggaccccgctcccagctctgagaggtcgccaaagcctgcagcctggcctgggcctggccaccccttctttccctccgcgccccgcccccgaggagcctaataaagatctcgttgtggcagctcctactgtctgagctctgactggggggaaggaaggcggcccaggtgttggatggagc

SEQ ID NO: 1679 - DNA, 1225 bp, Homo sapiens
gcgccgtaaatagagtccaagtgggcggagagccgtcccgcgccgcccgctcatgtctctacagagccgactgtccggccgcctggcacagctgcgcgcggcggggcagctgctcgtccccccgcgcccccggcccggacacttggcgggtgccacgaggacccgcagcagcacgtgcggtcccccggcgttcctgggcgtgttcggccgccgtgcgcggacctcggcgggagttggggcgtggggggcggcggcggtggggcggacagccggggtgcgcacttgggcccccctggccatggcggcgaaggtggacctgagcacctccaccgactggaaggaggcgaaatcctttctgaagggcctgagtgacaagcagcgggaggaacattacttctgcaaggactttgtcaggctgaagaagatcccgacatggaaggagatggcgaaaggggtggctgtgaaggtggaggagcccaggtataaaaaggacaagcagctcaatgagaaaatctccctgctccgcagcgacatcaccaagctggaggtggacgccatcgtcaacgccgccaacagctccctgctcggaggcggtggcgtggacggctgcattcatcgggccgccggccccctgcttaccgacgagtgccggaccctgcagagctgtaagactggcaaggccaagatcaccggcggctatcggctcccggccaagtacgtcatccacacagtggggcccatcgcctacggggagcccagcgccagccaggctgccgagctccgcagctgctacctgagcagtctggacctgctgctggagcaccggctccgctcggtggcgttcccctgcatctccaccggcgtgtttggctacccctgtgaggcggccgccgagatcgtgctggccacgctgcgagagtggctggagcagcacaaggacaaggtggaccggctgatcatctgcgtgttcctcgagaaggacgaggacatctaccggagccggctcccccactacttccccgtggcctgaggctcccgcagcccaccctgaccgggactgacccgccttcgggaccccgctcccagctctgagaggtcgccaaagcctgcagcctggcctgggcctggccaccccttctttccctccgcgccccgcccccgaggagcctaataaagatctcgttgtggcaaaaaaaaaaaaaaaaaaaaaaaaaaaaaaaaaaaa

SEQ ID NO: 1680 - DNA, 3410 bp, Homo sapiens
gaattcgaggatccgggtaccatgggcggcggcaggcctagcagcacgggaaccgtcccccgcgcgcatgcgcgcgcccctgaagcgcctgggggacgggtatgggcgggaggtaggggcgcggctccgcgtgccagttgggtgcccgcgcgtcacgtggtgaggaaggaggcggaggtctgagtttcgagggagggggggagagaagagggaacgagcaagggaaggaaagcggggaaaggaggaaggaaacgaacgagggggagggaggtccctgttttggaggagctaggagcgttgccggcccctgaagtggagcgagagggaggtgcttcgccgtttctcctgccaggggaggtcccggcttcccgtggaggctccggaccaagccccttcagcttctccctccggatcgatgtgctgctgttaacccgtgaggaggcggcggcggcggcagcggcagcggaagatggtgttgctgagagtgttaattctgctcctctcctgggcggcggggatgggaggtcagtatgggaatcctttaaataaatatatcagacattatgaaggattatcttacaatgtggattcattacaccaaaaacaccagcgtgccaaaagagcagtctcacatgaagaccaatttttacgtctagatttccatgcccatggaagacatttcaacctacgaatgaagagggacacttcccttttcagtgatgaatttaaagtagaaacatcaaataaagtacttgattatgatacctctcatatttacactggacatatttatggtgaagaaggaagttttagccatgggtctgttattgatggaagatttgaaggattcatccagactcgtggtggcacattttatgttgagccagcagagagatatattaaagaccgaactctgccatttcactctgtcatttatcatgaagatgatattaactatccccataaatacggtcctcaggggggctgtgcagatcattcagtatttgaaagaatgaggaaataccagatgactggtgtagaggaagtaacacagatacctcaagaagaacatgctgctaatggtccagaacttctgaggaaaaaacgtacaacttcagctgaaaaaaatacttgtcagctttatattcagactgatcatttgttctttaaatattacggaacacgagaagctgtgattgcccagatatccagtcatgttaaagcgattgatacaatttaccagaccacagacttctccggaatccgtaacatcagtttcatggtgaaacgcataagaatcaatacaactgctgatgagaaggaccctacaaatcctttccgtttcccaaatattggtgtggagaagtttctggaattgaattctgagcagaatcatgatgactactgtttggcctatgtcttcacagaccgagattttgatgatggcgtacttggtctggcttgggttggagcaccttcaggaagctctggaggaatatgtgaaaaaagtaaactctattcagatggtaagaagaagtccttaaacactggaattattactgttcagaactatgggtctcatgtacctcccaaagtctctcacattacttttgctcacgaagttggacataactttggatccccacatgattctggaacagagtgcacaccaggagaatctaagaatttgggtcaaaaagaaaatggcaattacatcatgtatgcaagagcaacatctggggacaaacttaacaacaataaattctcactctgtagtattagaaatataagccaagttcttgagaagaagagaaacaactgttttgttgaatctggccaacctatttgtggaaatggaatggtagaacaaggtgaagaatgtgattgtggctatagtgaccagtgtaaagatgaatgctgcttcgatgcaaatcaaccagagggaagaaaatgcaaactgaaacctgggaaacagtgcagtccaagtcaaggtccttgttgtacagcacagtgtgcattcaagtcaaagtctgagaagtgtcgggatgattcagactgtgcaagggaaggaatatgtaatggcttcacagctctctgcccagcatctgaccctaaaccaaacttcacagactgtaataggcatacacaagtgtgcattaatgggcaatgtgcaggttctatctgtgagaaatatggcttagaggagtgtacgtgtgccagttctgatggcaaagatgataaagaattatgccatgtatgctgtatgaagaaaatggacccatcaacttgtgccagtacagggtctgtgcagtggagtaggcacttcagtggtcgaaccatcaccctgcaacctggatccccttgcaacgattttagaggttactgtgatgttttcatgcggtgcagattagtagatgctgatggtcctctagctaggcttaaaaaagcaatttttagtccagagctctatgaaaacattgctgaatggattgtggctcattggtgggcagtattacttatgggaattgctctgatcatgctaatggctggatttattaagatatgcagtgttcatactccaagtagtaatccaaagttgcctcctcctaaaccacttccaggcactttaaagaggaggagacctccacagcccattcagcaaccccagcgtcagcggccccgagagagttatcaaatgggacacatgagacgctaactgcagcttttgccttggttcttcctagtgcctacaatgggaaaacttcactccaaagagaaacctattaagtcatcatctccaaactaaaccctcacaagtaacagttgaagaaaaaatggcaagagatcatatcctcagaccaggtggaattacttaaattttaaagcctgaaaattccaatttgggggtgggaggtggaaaaggaacccaattttcttatgaacagatatttttaacttaatggcacaaagtcttagaatattattatgtgccccgtgttccctgttcttcgttgctgcattttcttcacttgcaggcaaacttggctctcaataaacttttaccacaaattgaaataaatatatttttttcaactgccaatcaaggctaggaggctcgaccacctcaacattggagacatcacttgccaatgtacataccttgttatatgcagacatgtatttcttacgtacactgtacttctgtgtgcaattgtaaacagaaattgcaatatggatgtttctttgtattataaaatttttccgctcttaattaaaaattactgtttaattgacatactcaggataacagagaatggtggtattcagtggtccaggattctgtaatgctttacacaggcagttttgaaatgaaaatcaatttaccccatggtacccggatcctcgaattc

SEQ ID NO: 1681 - DNA, 3730 bp, Homo sapiens
caggaagcggcggcaggcctagcagcacgggaaccgtcccccgcgcgcatgcgcgcgcccctgaagcgcctgggggacgggtaggggcgggaggtaggggcgcggctccgcgtgccagttgggtgcccgcgcgtcacgtggtgaggaaggaggcggaggtctgagtttcgaaggagggggggagagaagagggaacgagcaagggaaggaaagcggggaaaggaggaaggaaacgaacgagggggagggaggtccctgttttggaggagctaggagcgttgccggcccctgaagtggagcgagagggaggtgcttcgccgtttctcctgccaggggaggtcccggcttcccgtggaggctccggaccaagccccttcagcttctccctccggatcgatgtgctgctgttaacccgtgaggaggcggcggcggcggcagcggcagcggaagatggtgttgctgagagtgttaattctgctcctctcctgggcggcggggatgggaggtcagtatgggaatcctttaaataaatatatcagacattatgaaggattatcttacaatgtggattcattacaccaaaaacaccagcgtgccaaaagagcagtctcacatgaagaccaatttttacgtctagatttccatgcccatggaagacatttcaacctacgaatgaagagggacacttcccttttcagtgatgaatttaaagtagaaacatcaaataaagtacttgattatgatacctctcatatttacactggacatatttatggtgaagaaggaagttttagccatgggtctgttattgatggaagatttgaaggattcatccagactcgtggtggcacattttatgttgagccagcagagagatatattaaagaccgaactctgccatttcactctgtcatttatcatgaagatgatattaactatccccataaatacggtcctcaggggggctgtgcagatcattcagtatttgaaagaatgaggaaataccagatgactggtgtagaggaagtaacacagatacctcaagaagaacatgctgctaatggtccagaacttctgaggaaaaaacgtacaacttcagctgaaaaaaatacttgtcagctttatattcagactgatcatttgttctttaaatattacggaacacgagaagctgtgattgcccagatatccagtcatgttaaagcgattgatacaatttaccagaccacagacttctccggaatccgtaacatcagtttcatggtgaaacgcataagaatcaatacaactgctgatgagaaggaccctacaaatcctttccgtttcccaaatattggtgtggagaagtttctggaattgaattctgagcagaatcatgatgactactgtttggcctatgtcttcacagaccgagattttgatgatggcgtacttggtctggcttgggttggagcaccttcaggaagctctggaggaatatgtgaaaaaagtaaactctattcagatggtaagaagaagtccttaaacactggaattattactgttcagaactatgggtctcatgtacctcccaaagtctctcacattacttttgctcacgaagttggacataactttggatccccacatgattctggaacagagtgcacaccaggagaatctaagaatttgggtcaaaaagaaaatggcaattacatcatgtatgcaagagcaacatctggggacaaacttaacaacaataaattctcactctgtagtattagaaatataagccaagttcttgagaagaagagaaacaactgttttgttgaatctggccaacctatttgtggaaatggaatggtagaacaaggtgaagaatgtgattgtggctatagtgaccagtgtaaagatgaatgctgcttcgatgcaaatcaaccagagggaagaaaatgcaaactgaaacctgggaaacagtgcagtccaagtcaaggtccttgttgtacagcacagtgtgcattcaagtcaaagtctgagaagtgtcgggatgattcagactgtgcaagggaaggaatatgtaatggcttcacagctctctgcccagcatctgaccctaaaccaaacttcacagactgtaataggcatacacaagtgtgcattaatgggcaatgtgcaggttctatctgtgagaaatatggcttagaggagtgtacgtgtgccagttctgatggcaaagatgataaagaattatgccatgtatgctgtatgaagaaaatggacccatcaacttgtgccagtacagggtctgtgcagtggagtaggcacttcagtggtcgaaccatcaccctgcaacctggatccccttgcaacgattttagaggttactgtgatgttttcatgcggtgcagattagtagatgctgatggtcctctagctaggcttaaaaaagcaatttttagtccagagctctatgaaaacattgctgaatggattgtggctcattggtgggcagtattacttatgggaattgctctgatcatgctaatggctggatttattaagatatgcagtgttcatactccaagtagtaatccaaagttgcctcctcctaaaccacttccaggcactttaaagaggaggagacctccacagcccattcagcaaccccagcgtcagcggccccgagagagttatcaaatgggacacatgagacgctaactgcagcttttgccttggttcttcctagtgcctacaatgggaaaacttcactccaaagagaaacctattaagtcatcatctccaaactaaaccctcacaagtaacagttgaagaaaaaatggcaagagttccaatttgggggtgggaggtggaaaaggaacccaattttcttatgaacagatatttttaacttaatggcacaaagtcttagaatattattatgtgccccgtgttccctgttcttcgttgctgcattttcttcacttgcaggcaaacttggctctcaataaacttttaccacaaattgaaataaatatatttttttcaactgccaatcaaggctaggaggctcgaccacctcaacattggagacatcacttgccaatgtacataccttgttatatgcagacatgtatttcttacgtacactgtacttctgtgtgcaattgtaaacagaaattgcaatatggatgtttctttgtattataaaatttttccgctcttaattaaaaattactgtttaattgacatactcaggataacagagaatggtggtattcagtggtccaggattctgtaatgctttacacaggcagttttgaaatgaaaatcaatttacctttctgttacgatggagttggttttgatactcattttttctttatcacatggctgctacgggcacaagtgactatactgaagaacacagttaagtgttgtgcaaactggacatagcagcacatactacttcagagttcatgatgtagatgtctggtttctgcttacgtcttttaaactttctaattcaattccatttttcaattaataggtgaaattttattcatgctttgatagaaattatgtcaatgaaatgattctttttatttgtagcctacttatttgtgtttttcatatatctgaaatatgctaattatgttttctgtctgatatggaaaagaaaagctgtgtctttatcaaaatatttaaacggttttttcagcatatcatcactgatcattggtaaccactaaag

SEQ ID NO: 1682 - DNA, 3730 bp, Homo sapiens; identical to SEQ ID NO: 1681

SEQ ID NO: 1683 - DNA, 3730 bp, Homo sapiens; identical to SEQ ID NO: 1681

SEQ ID NO: 1684 - DNA, 5144 bp, Homo sapiens
gagaagggaccttcaggtccaggcaaagggggaacttctgtcgtgggaacgaaaaagaaagaggatttacagggtggggggacagaggggcagcaggaaccagaagggagacagtggcggtcgcggcggggccgatccgagagttccccttagagaacggagctcacgggcggggaggcctcacctgctagtaggacgcagaaagacagaaggcgaaggagaccccctgccgtagccatcttgcctctctgctgagcggaagcccccgttcggctcctgtctgttagcggcctctctaggctaccactgacaccgtctctgtggcccggagcctaagagaccggaagttcgtgtttccaggcgcttccggaaaccgcgggagagggtcgctgacgtggaggcgtccgaagggcagcagggtgtgtcggggctcggattaagacatcggagtcggagacctgagagatgttaaccaaattcgagaccaagagcgcgcgggtcaaagggctcagctttcaccccaaaagaccttggatcctgactagtttacataatggggtcatccagttatgggactatcggatgtgcactctcattgacaagtttgatgaacatgatggtccagtgcgaggcattgacttccataagcagcagccactgttcgtctctggaggagatgactataagattaaggtttggaattacaagcttcggcgctgtcttttcacattgcttgggcacttagattatattcgcaccacgttttttcatcatgaatatccctggattctgagtgcctccgatgatcagaccatccgagtgtggaactggcaatctagaacctgtgtttgtgtgttaacagggcacaaccattatgtgatgtgtgctcagttccaccccacagaagacttggtagtatcagccagcctggaccagactgtgcgcgtttgggatatttctggtctgaggaaaaaaaacctgtcccctggtgcggtggaatcggatgtgagaggaataactggggttgatctatttggaactacagatgcagtggtgaagcatgtactagagggtcacgatcgtggagtaaactgggctgccttccaccccactatgccccttattgtatctggggcagatgatcgtcaagtgaagatctggcgcatgaatgaatcaaaggcatgggaggttgatacctgccggggccattacaacaatgtatcttgtgccgtcttccaccctcgccaagagttgatcctcagcaattctgaggacaagagtattcgagtctgggatatgtctaagcggactggggttcagactttccgcagagaccatgatcgtttctgggtcctagctgctcaccctaaccttaacctctttgcagcaggccatgatggtggtatgattgtgtttaagctggaacgggaacggccagcctatgctgttcatggcaatatgctacactatgtcaaggaccgattcttacgacagctggatttcaacagctccaaagatgtagctgtgatgcagttgcggagtggttccaagtttccagtattcaatatgtcatacaatccagcagaaaatgcagtcctgctttgtacaagagctagcaatctagagaatagtacctatgacctgtacaccatccctaaagatgctgactcccagaatcctgatgcgcctgaagggaaacgatcctcaggcctgacagccgtttgggtcgctcgaaatcggtttgctgtcctagatcggatgcattcgcttctgatcaagaatctgaagaatgagatcaccaaaaaggtacaggtgcccaactgtgatgagatcttctatgctggcacaggcaatctcctgcttcgagatgcggactctatcacactctttgacgtacagcagaagcggactctggcatctgtgaagatttctaaagtgaaatacgttatctggtcagcagacatgtcacatgtagcactactagccaaacacgccattgtgatctgtaaccgcaaactggatgctttatgtaacattcatgagaacattcgtgtcaagagtggggcctgggatgagagtggggtatttatctataccacaagcaaccacatcaaatatgctgtcaccactggggaccacgggatcattcgaactctggatttacccatctatgtcacacgggtgaagggcaacaatgtatactgcctagacagggagtgtcgtccccgggtactcaccattgatcccactgagttcaaattcaagctggccctgatcaacagaaaatatgatgaggtactgcacatggtgaggaatgccaaactagttggccagtctattattgcttatctccagaagaagggctatcctgaagtggcactgcattttgtcaaggatgagaaaactcgctttagtctggcactggagtgtggaaacattgagattgctctggaagcagccaaagcactggatgacaagaactgctgggaaaagctgggagaagtggccctgctgcaggggaaccaccagattgtggaaatgtgctatcagcgtaccaaaaactttgacaaactttccttcctgtatcttatcactggcaacttagaaaaacttcgcaagatgatgaagattgctgagatcagaaaggacatgagtggccactatcagaatgccctatacctgggtgatgtgtcagagcgtgtgcggatcctgaagaactgtggacagaagtccctggcctatctcacagctgctacccatggcttagatgaagaagctgagagcctaaaggagacatttgacccagagaaggagacaatcccagacattgaccctaatgccaagctgctccagccacctgcacctatcatgccattggataccaattggcctttattgactgtatccaaaggattttttgaaggcaccattgccagcaaagggaagggaggagcactggctgctgacattgacattgacactgttggtacagagggctggggagaggatgcagagctgcagttggatgaagatgggtttgtggaggctacagaaggtttgggggatgatgctcttggcaagggacaggaagaaggaggtggctgggatgtagaagaagatctggagctccctcctgagctggatatatcccctggggcagctggtggggctgaagatggtttctttgtgcccccaaccaagggaacaagtccaactcagatctggtgtaataactctcagcttccagttgatcacatcctggcaggctctttcgaaacagccatgcggctccttcatgaccaagtaggggtaatccagtttggcccctacaagcaactgttcctacagacatacgcccgaggccgcacaacctatcaggctctgccctgcctaccctccatgtatggctatcctaatcgcaactggaaggatgcagggctgaagaatggtgtaccagctgtgggcctgaagcttaatgacctcatccaacggttgcagctgtgctaccagctcaccacagttggcaaatttgaggaggctgtggaaaaattccgttccatccttctcagtgtgccacttcttgttgtggacaataaacaagagattgcagaggcccagcagctcatcaccatttgccgtgagtacattgtgggtttgtccgtggagacagaaaggaagaagctgcccaaagagactctagaacagcagaagcgcatctgtgagatggcagcctatttcacccactcaaacctgcagcctgtgcacatgatcctggtgctgcgtacagccctcaatctgttcttcaagctcaagaacttcaagacagctgccacctttgctcggcgcctactagaactcgggcccaagcctgaggtggcccaacagacccgaaaaatcctgtctgcctgtgagaagaatcccacagatgcctaccagctcaattatgacatgcacaacccctttgacatttgtgctgcatcatatcggcccatctaccgtggaaagccagtagaaaagtgtccactcagtggggcctgctattcccctgagttcaaaggtcaaatctgcagggtcaccacagtgacagagattggcaaagatgtgattggtttaaggatcagtcctctgcagtttcgctaaggccccctttgtgtgcatgggtcagtcaccatatgttccccccagagaatgtgtctatatcctccttctaacagcaccttccccctgcagctactcttcagatctggctctctgtaccctaaaacctagtatctttttctcttctatggaaaatccgaaggtctaaacttgacttttttgaggtcttctcaacttgactacagttgtgctcataattgtccttgcctttccagcttaattattttaaggaacaaatgaaaactctgggctgggtggagtggctcatacctgtaatcccagcactttgggaggctacggtgggcagatcatctgaggccaggagttcgagacctgcctggccaacatggcaacaccccgtctctaataaaaatataaaaattagcctggcatggtagcatgcgcctatagtcccagctgctcaggaggctgaggcatgagaatcgcttgaacctaggaggtggaggttgcattcaactgagatcataccacttcattccagcctgggtgacagagcaagactctgtctcaaaaaaaaaaaaaaggaaaactctgtgatggacatttgtttagtaaatcccttcagtatttatccctcctttccccacagcagctttctttcctgtcaactagaaaggagcaggatgtaataaatacattttggtgtgactaggccacaccaactcttaatcatctcccattttccttagacatttaaatttcaaggcaggtaccctctgtgtactcagaaatttgaagaagttatttggttttccaaaatgcacactgcgggttattgatttgttctttacaactattgttctcatatttctcacactaaataaatctctatgagagcttcttgacttggccatttatttcttggacactctcatgttcttgttcacccatgcaggcaccccaccaaagtacatatcttccttccagtaataatttttaattacaaaataaacatccactattgg

SEQ ID NO: 1685 - DNA, 4162 bp, Homo sapiens
cgcaggcgcggtccatcccgcccgcagagccgcagtgccgggcgccagagcagcggcgccagagcagctgcaccatcccggcgttcgcgtgtgccgccgctttcctcctccatctcttttcctccgcctccgccggcgcgatggcgaagccgctgacggacagcgagaagcggaagcagatcagcgtgcgcggcctggcggggctaggcgacgtggccgaggtgcggaagagcttcaaccggcacttgcacttcacgctggtcaaggaccgcaatgtggccacgccccgcgactacttcttcgcgctggcgcacacggtgcgcgaccacctcgtgggccgctggatccgcacgcagcagcactactacgagcgcgaccccaagcgcatttattatctttccctggaattctacatgggtcgcacgctgcagaacacgatggtgaacctgggccttcagaatgcctgcgatgaagccatctatcagttggggttagacttggaggaactcgaggagatagaagaagatgctggccttgggaatggaggcctggggaggctggcagcgtgtttccttgactcaatggctaccttgggcctggcagcatacggctatggaatccgctatgaatttgggatttttaaccagaagattgtcaatggctggcaggtagaggaggccgatgactggctgcgctacggcaacccctgggagaaagcgcggcctgagtatatgcttcccgtgcacttctacggacgcgtggagcacacccccgacggcgtgaagtggctggacacacaggtggtgctggccatgccctacgacaccccagtgcccggctacaagaacaacaccgtcaacaccatgcggctgtggtccgccaaggctcccaacgacttcaagctgcaggacttcaacgtgggagactacatcgaggcggtcctggaccggaacttggctgagaacatctccagggtcctgtatccaaatgataacttctttgaggggaaggagctgcggctgaagcaggagtacttcgtggtggccgccacgctccaggacatcatccgccgcttcaagtcgtccaagttcggctgccgggaccctgtgagaacctgtttcgagacgttcccagacaaggtggccatccagctgaacgacacccaccccgccctctccatccctgagctcatgcggatcctggtggacgtggagaaggtggactgggacaaggcctgggaaatcacgaagaagacctgtgcatacaccaaccacactgtgctgcctgaggccttggagcgctggcccgtgtccatgtttgagaagctgctgccgcggcacctggagataatctatgccatcaaccagcggcacctggaccacgtggccgcgctgtttcccggcgatgtggaccgcctgcgcaggatgtctgtgatcgaggagggggactgcaagcggatcaacatggcccacctgtgtgtgattgggtcccatgctgtcaatggtgtggcgaggatccactcggagatcgtgaaacagtcggtctttaaggatttttatgaactggagccagagaagttccagaataagaccaatggcatcaccccccgccggtggctgctgctgtgcaacccggggctggccgataccatcgtggagaaaattggggaggagttcctgactgacctgagccagctgaagaagctgctgccgctggtcagtgacgaggtgttcatcagggacgtggccaaggtcaaacaggagaacaagctcaagttctcggccttcctggagaaggagtacaaggtgaagatcaacccctcctccatgttcgacgtgcatgtgaagaggatccacgagtacaagcggcagctgctcaactgcctgcacgtcgtcaccctgtacaatcgaatcaagagagacccggccaaggcttttgtgcccaggactgttatgattgggggcaaggcagcgcccggttaccacatggccaagctgatcatcaagttggtcacctccatcggcgacgtcgtcaatcatgacccagttgtgggtgacaggttgaaagtgatcttcctggagaactaccgtgtgtccttggctgagaaagtgatcccggccgctgatctgtcgcagcagatctccactgcaggcaccgaggcctcaggcacaggcaacatgaagttcatgctcaacggggccctcaccatcggcaccatggacggcgccaacgtggagatggccgaggaggccggggccgagaacctcttcatcttcggcctgcgggtggaggatgtcgaggccttggaccggaaagggtacaatgccagggagtactacgaccacctgcccgagctgaagcaggccgtggaccagatcagcagtggctttttttctcccaaggagccagactgcttcaaggacatcgtgaacatgctgatgcaccatgacaggttcaaggtgtttgcagactatgaagcctacatgcagtgccaggcacaggtggaccagctgtaccggaaccccaaggagtggaccaagaaggtcatcaggaacatcgcctgctcgggcaagttctccagtgaccggaccatcacggagtatgcacgggagatctggggtgtggagccctccgacctgcagatcccgccccccaacatcccccgggactaggcacaccctgccttggcgggaccagcgggcatttgttttcttgctgactttgcacctccttttttccccaaacactttgccagccgctggtggtccctgcttttctgagtaccatgtttccaggaggggccatgggggtcagggtggttttgagagagcagggtaaggaaggaatgtgctagaagtgctcctagtttcttgtaaaggaagccagagttgacagtacaaagggtcgtggccagccctgcagcttcagcacctgccccacccagagtgggagtcaggtggagccacctgctgggctcccccagaactttgcacacatcttgctatgtattagccgatgtctttagtgttgagcctctggattctggggtctgggccagtggccatagtgaagcctgggaatgagtgttactgcagcatctgggctgccagccacagggaagggccaagccccatgtagccccagtcatcctgcccagccctgcctcctggccatgccgggaggggtcggatcctctaggcatcgccttcacagccccctgccccctgccctctgtcctggctctgcacctggtatatgggtcatggacccagatggggctttccctttgtagccatccaatgggcattgtgtgggtgcttggaacccgggatgactgagggggacactggagtgggtgcttgtgtctgctgtctcagaggccttggtcaggatgaagttggctgacacagcttagcttggttttgcttattcaaaagagaaaataactacacatggaaatgaaactagctgaagccttttcttgttttagcaactgaaaattgtacttggtcacttttgtgcttgaggaggcccattttctgcctggcagggggcaggtctgtgccctcccgctgactcctgctgtgtcctgaggtgcatttcctgttgtacacacaagggccaggctccattctccctccctttccaccagtgccacagcctcgtctggaaaaaggaccaggggtcccggaggaacccatttgtgctctgcttggacagcaggcctggcactgggaggtgggggtgagcccctcacagccttgcccctccccaaggctggcaacctgcctcccattgcccaagagagagggcagggaacaggctactgtccttccctgtggaattgccgagaaatctagcaccttgcatgctggatctgggctgcggggaggctctttttctccctggcctccagtgcccaccaggaggatctgcgcacggtgcacagcccaccagagcactacagccttttattgagtggggcaagtgctgggctgtggtcgtgccctgacagcatcttccccaggcagcggctctgtggaggaggccatactcccctagttggccactggggccaccaccctgaccaccactgtgcccctcattgttactaccttgtgagataaaaactgattaaacctttgtggctgtggttggctga

SEQ ID NO: 1686 - DNA, 3188 bp, Homo sapiens
cgcaggcgcggtccatcccgcccgcagagccgcagtgccgggcgccagagcagcggcgccagagcagctgcaccatcccggcgttcgcgtgtgccgccgctttcctcctccatctcttttcctccgcctccgccggcgcgatggcgaagccgctgacggacagcgagaagcggaagcagatcagcgtgcgcggcctggcggggctaggcgacgtggccgaggtgcggaagagcttcaaccggcacttgcacttcacgctggtcaaggaccgcaatgtggccacgccccgcgactacttcttcgcgctggcgcacacggtgcgcgaccacctcgtgggccgctggatccgcacgcagcagcactactacgagcgcgaccccaagcgcatttattatctttccctggaattctacatgggtcgcacgctgcagaacacgatggtgaacctgggccttcagaatgcctgcgatgaagccatctatcagttggggttagacttggaggaactcgaggagatagaagaagatgctggccttgggaatggaggcctggggaggctggcagcgtgtttccttgactcaatggctaccttgggcctggcagcatacggctatggaatccgctatgaatttgggatttttaaccagaagattgtcaatggctggcaggtggaggaggccgatgactggctgcgctacggcaacccctgggagaaagcgcggcctgagtatatgcttcccgtgcacttctacggacgcgtggagcacacccccgacggcgtgaagtggctggacacacaggtggtgctggccatgccctacgacaccccagtgcccggctacaagaacaacaccgtcaacaccatgcggctgtggtccgccaaggctcccaacgacttcaagctgcaggacttcaacgtgggagactacatcgaggcggtcctggaccggaacttggctgagaacatctccagggtcctgtatccaaatgataacttctttgaggggaaggagctgcggctgaagcaggagtacttcgtggtggccgccacgctccaggacatcatccgccgcttcaagtcgtccaagttcggctgccgggaccctgtgagaacctgtttcgagacgttcccagacaaggtggccatccagctgaacgacacccaccccgccctctccatccctgagctcatgcggatcctggtggacgtggagaaggtggactgggacaaggcctgggaaatcacgaagaagacctgtgcatacaccaaccacactgtgctgcctgaggccttggagcgctggcccgtgtccatgtttgagaagctgctgccgcggcacctggagataatctatgccatcaaccagcggcacctggaccacgtggccgcgctgtttcccggcgatgtggaccgcctgcgcaggatgtctgtgatcgaggagggggactgcaagcggatcaacatggcccacctgtgtgtgattgggtcccatgctgtcaatggtgtggcgaggatccactcggagatcgtgaaacagtcggtctttaaggatttttatgaactggagccagagaagttccagaataagaccaatggcatcaccccccgccggtggctgctgctgtgcaacccggggctggccgataccatcgtggagaaaattggggaggagttcctgactgacctgagccagctgaagaagctgctgccgctggtcagtgacgaggtgttcatcagggacgtggccaaggtcaaacaggagaacaagctcaagttctcggccttcctggagaaggagtacaaggtgaagatcaacccctcctccatgttcgacgtgcatgtgaagaggatccacgagtacaagcggcagctgctcaactgcctgcacgtcgtcaccctgtacaatcgaatcaagagagacccggccaaggcttttgtgcccaggactgttatgattgggggcaaggcagcgcccggttaccacatggccaagctgatcatcaagttggtcacctccatcggcgacgtcgtcaatcatgacccagttgtgggtgacaggttgaaagtgatcttcctggagaactaccgtgtgtccttggctgagaaagtgatcccggccgctgatctgtcgcagcagatctccactgcaggcaccgaggcctcaggcacaggcaacatgaagttcatgctcaacggggccctcaccatcggcaccatggacggcgccaacgtggagatggccgaggaggccggggccgagaacctcttcatcttcggcctgcgggtggaggatgtcgaggccttggaccggaaagggtacaatgccagggagtactacgaccacctgcccgagctgaagcaggccgtggaccagatcagcagtggctttttttctcccaaggagccagactgcttcaaggacatcgtgaacatgctgatgcaccatgacaggttcaaggtgtttgcagactatgaagcctacatgcagtgccaggcacaggtggaccagctgtaccggaaccccaaggagtggaccaagaaggtcatcaggaacatcgcctgctcgggcaagttctccagtgaccggaccatcacggagtatgcacgggagatctgggggtcgtggccagccctgcagcttcagcacctgccccacccagagtgggagtcaggtggagccacctgctgggctcccccagaactttgcacacatcttgctatgtattagccgatgtctttagtgttgagcctctggattctggggtctgggccagtggccatagtgaagcctgggaatgagtgctggcaacctgcctcccattgcccaagagagagggcagggaacaggctactgtccttccctgtggaattgccgagaaatctagcaccttgcatgctggatctgggctgcggggaggctctttttctccctggcctccagtgcccaccaggaggatctgcgcacggtgcacagcccaccagagcactacagccttttattgagtggggcaagtgctgggctgtggtcgtgccctgacagcatcttccccaggcagcggctctgtggaggaggccatactcccctagttggccactggggccaccaccctgaccaccactgtgcccctcattgttactaccttgtgagataaaaactgattaaacctttgtggctgtggttggctga

SEQ ID NO: 1687 - DNA, 4154 bp, Homo sapiens
cgccagagcagctgcaccatcccggcgttcgcgtgtgccgccgctttcctcctccatctcttttcctccgcctccgccggcgcgatggcgaagccgctgacggacagcgagaagcggaagcagatcagcgtgcgcggcctggcggggctaggcgacgtggccgaggtgcggaagagcttcaaccggcacttgcacttcacgctggtcaaggaccgcaatgtggccacgccccgcgactacttcttcgcgctggcgcacacggtgcgcgaccacctcgtgggccgctggatccgcacgcagcagcactactacgagcgcgaccccaagcgcatttattatctttccctggaattctacatgggtcgcacgctgcagaacacgatggtgaacctgggccttcagaatgcctgcgatgaagccatctatcagttggggttagacttggaggaactcgaggagatagaagaagatgctggccttgggaatggaggcctggggaggctggcagcgtgtttccttgactcaatggctaccttgggcctggcagcatacggctatggaatccgctatgaatttgggatttttaaccagaagattgtcaatggctggcaggtagaggaggccgatgactggctgcgctacggcaacccctgggagaaagcgcggcctgagtatatgcttcccgtgcacttctacggacgcgtggagcacacccccgacggcgtgaagtggctggacacacaggtggtgctggccatgccctacgacaccccagtgcccggctacaagaacaacaccgtcaacaccatgcggctgtggtccgccaaggctcccaacgacttcaagctgcaggacttcaacgtgggagactacatcgaggcggtcctggaccggaacttggctgagaacatctccagggtcctgtatccaaatgataacttctttgaggggaaggagctgcggctgaagcaggagtacttcgtggtggccgccacgctccaggacatcatccgccgcttcaagtcgtccaagttcggctgccgggaccctgtgagaacctgtttcgagacgttcccagacaaggtggccatccagctgaacgacacccaccccgccctctccatccctgagctcatgcggatcctggtggacgtggagaaggtggactgggacaaggcctgggaaatcacgaagaagacctgtgcatacaccaaccacactgtgctgcctgaggccttggagcgctggcccgtgtccatgtttgagaagctgctgccgcggcacctggagataatctatgccatcaaccagcggcacctggaccacgtggccgcgctgtttcccggcgatgtggaccgcctgcgcaggatgtctgtgatcgaggagggggactgcaagcggatcaacatggcccacctgtgtgtgattgggtcccatgctgtcaatggtgtggcgaggatccactcggagatcgtgaaacagtcggtctttaaggatttttatgaactggagccagagaagttccagaataagaccaatggcatcaccccccgccggtggctgctgctgtgcaacccggggctggccgataccatcgtggagaaaattggggaggagttcctgactgacctgagccagctgaagaagctgctgccgctggtcagtgacgaggtgttcatcagggacgtggccaaggtcaaacaggagaacaagctcaagttctcggccttcctggagaaggagtacaaggtgaagatcaacccctcctccatgttcgatgtgcatgtgaagaggatccacgagtacaagcggcagctgctcaactgcctgcacgtcgtcaccctgtacaatcgaatcaagagagacccggccaaggcttttgtgcccaggactgttatgattgggggcaaggcagcgcccggttaccacatggccaagctgatcatcaagttggtcacctccatcggcgacgtcgtcaatcatgacccagttgtgggtgacaggttgaaagtgatcttcctggagaactaccgtgtgtccttggctgagaaagtgatcccggccgctgatctgtcgcagcagatctccactgcaggcaccgaggcctcaggcacaggcaacatgaagttcatgctcaacggggccctcaccatcggcaccatggacggcgccaacgtggagatggccgaggaggccggggccgagaacctcttcatcttcggcctgcgggtggaggatgtcgaggccttggaccggaaagggtacaatgccagggagtactacgaccacctgcccgagctgaagcaggccgtggaccagatcagcagtggctttttttctcccaaggagccagactgcttcaaggacatcgtgaacatgctgatgcaccatgacaggttcaaggtgtttgcagactatgaagcctacatgcagtgccaggcacaggtggaccagctgtaccggaaccccaaggagtggaccaagaaggtcatcaggaacatcgcctgctcgggcaagttctccagtgaccggaccatcacggagtatgcacgggagatctggggtgtggagccctccgacctgcagatcccgccccccaacatcccccgggactaggcacaccctgccttggcgggaccagcgggcatttgttttcttgctgactttgcacctccttttttccccaaacactttgccagccactggtggtccctgcttttctgagtaccatgtttccaggaggggccatgggggtcagggtggttttgagagagcagggtaaggaaggaatgtgctagaagtgctcctagtttcttgtaaaggaagccagagttgacagtacaaagggtcgtggccagccctgcagcttcagcacctgccccacccagagtgggagtcaggtggagccacctgctgggctcccccagaactttgcacacatcttgctatgtattagccgatgtctttagtgttgagcctctggattctggggtctgggccagtggccatagtgaagcctgggaatgagtgttactgcagcatctgggctgccagccacagggaagggccaagccccatgtagccccagtcatcctgcccagccctgcctcctggccatgccgggaggggtcggatcctctaggcatcgccttcacagccccctgccccctgccctctgtcctggctctgcacctggtatatgggtcatggacccagatggggctttccctttgtagccatccaatgggcattgtgtgggtgcttggaacccgggatgactgagggggacactggagtgggtgcttgtgtctgctgtctcagaggccttggtcaggatgaagttggctgacacagcttagcttggttttgcttattcaaaagagaaaataactacacatggaaatgaaactagctgaagccttttcttgttttagcaactgaaaattgtacttggtcacttttgtgcttgaggaggcccattttctgcctggcagggggcaggtctgtgccctcccgctgactcctgctgtgtcctgaggtgcatttcctgttgtacacacaagggccaggctccattctccctccctttccaccagtgccacagcctcgtctggaaaaaggaccaggggtcccggaggaacccatttgtgctctgcttggacagcaggcctggcactgggaggtgggggtgagcccctcacagccttgcccctccccaaggctggcaacctgcctcccattgcccaagagagagggcagggaacaggctactgtccttccctgtggaattgccgagaaatctagcaccttgcatgctggatctgggctgcggggaggctctttttctccctggcctccagtgcccaccaggaggatctgcgcacggtgcacagcccaccagagcactacagccttttattgagtggggcaagtgctgggctgtggtcgtgccctgacagcatcttccccaggcagcggctctgtggaggaggccatactcccctagttggccactggggccaccaccctgaccaccactgtgcccctcattgttactgccttgtgagataaaaactgattaaacctttgtggctgtggttggcaaaaaaaaaaaaaaaaaaaaaaaaaaaaaaaaaaaaaaaaaaaaaaaaaaa

SEQ ID NO: 1688 - DNA, 4162 bp, Homo sapiens; identical to SEQ ID NO: 1685

SEQ ID NO: 1689 - DNA, 1098 bp, Homo sapiens
atggccgtcatggcgccccgaaccctcctcctgctactcttgggggccctggccctgacccagacctgggcgggctcccactccatgaggtatttcaccacatccgtgtcccggcccggccgcggggagccccgcttcatcgccgtgggctacgtggacgacacgcagttcgtgcggttcgacagcgacgccgcgagccagaggatggagccgcgggcgccgtggatagagcaggaggggccggagtattgggaccggaacacacggaatgtgaaggcccactcacagattgaccgagtggacctggggaccctgcgcggctactacaaccagagcgaggccggttctcacaccatccagatgatgtatggctgcgacgtggggtcggacgggcgcttcctccgcgggtaccagcaggacgcctacgacggcaaggattacatcgccttgaacgaggacctgcgctcttggaccgcggcggacatggcggctcagatcacccagcgcaagtgggaggcggcccgtgtggcggagcagttgagagcctacctggagggcacgtgcgtggagtggctccgcagacacctggagaacgggaaggagacgctgcagcgcacggacccccccaagacgcatatgactcaccacgctgtctctgaccatgaggccaccctgaggtgctgggccctgagcttctaccctgcggagatcacactgacctggcagcgggatggggaggaccagacccaggacacggagctcgtggagaccaggcctgcaggggatggaaccttccagaagtgggcgtctgtggtggtgccttctggacaggagcagagatacacctgccatgtgcagcatgagggtctccccaagcccctcaccctgagatgggagccgtcttcccagcccaccatccccatcgtgggcatcattgctggcctagttctctttggagctgtgttcgctggagctgtggtcgctgctgtgaggtggaggaggaagagctcagatagaaaaggagggagctactctcaggctgcaagcagtgacagtgcccagggctctgatatgtctctcacagcttgtaaagtgtga

SEQ ID NO: 1690 - DNA, 1591 bp, Homo sapiens
gtcgccggggtcccagttctaaagtccccacgcacccacccggactcagagtctcctcagacgccgagatgctggtcatggcgccccgaaccgtcctcctgctgctctcggcggccctggccctgaccgagacctgggccggctcccactccatgaggtatttctacaccgccatgtcccggcccggccgcggggagccccgcttcatctcagtgggctacgtggacgacacccagttcgtgaggttcgacagcgacgccgcgagtccgagagaggagccgcgggcgccgtggatagagcaggaggggccggagtattgggaccggaacacacagatcttcaagaccaacacacagactgaccgagagagcctgcggaacctgcgcggctactacaaccagagcgaggccgggtctcacaccctccagagcatgtacggctgcgacgtggggccggacgggcgcctcctccgcgggcataaccagtacgcctacgacggcaaggattacatcgccctgaacgaggacctgcgctcctggaccgcggcggacaccgcggctcagatcacccagcgcaagtgggaggcggcccgtgtggcggagcaggagagagcctacctggagggcacgtgcgtggagtggctccgcagatacctggagaacgggaaggacacgctggagcgcgcggaccccccaaagacacacgtgacccaccaccccatctctgaccatgaggccaccctgaggtgctgggccctgggcttctaccctgcggagatcacactgacctggcagcgggatggcgaggaccaaactcaggacactgagcttgtggagaccagaccagcaggagatagaaccttccagaagtgggcagctgtggtggtgccttctggagaagagcagagatacacatgccatgtacagcatgaggggctgccgaagcccctcaccctgagatgggagccgtcttcccagtccaccgtccccatcgtgggcattgttgctggcctggctgtcctagcagttgtggtcatcggagctgtggtcgctgctgtgatgtgtaggaggaagagctcaggtggaaaaggagggagctactctcaggctgcgtgcagcgacagtgcccagggctctgatgtgtctctcacagcttgaaaagcctgagacagctgtcttgtgagggactgagatgcaggatttcttcacgcctcccctttgtgacttcaagagcctctggcatctctttctgcaaaggcacctgaatgtgtctgcgtccctgttagcataatgtgaggaggtggagagacagcccacccttgtgtccactgtgacccctgttcccatgctgacctgtgtttcctccccagtcatctttcttgttccagagaggtggggctggatgtctccatctctgtctcaactttatgtgcactgagctgcaacttcttacttccctactgaaaataagaatctgaatataaatttgttttctcaaatatttgctatgagaggttgatggattaattaaataagtcaattcctggaatttgagagagcaaataaagacctgagaaccttccagaatctgc

SEQ ID NO: 1691 - DNA, 1089 bp, Homo sapiens
atgcgggtcacggcaccccgaaccctcctcctgctgctctggggggccctggccctgaccgagacctgggccggctcccactccatgaggtatttctacaccgccatgtcccggcccggccgcggggagccccgcttcatcgcagtgggctacgtggacgacacgcagttcgtgaggttcgacagcgacgccgcgagtccgagagaggagccgcgggcgccgtggatagagcaggaggggccggagtattgggaccggaacacacagatcttcaagaccaacacacagacttaccgagagaacctgcggatcgcgctccgctactacaaccagagcgaggccgggtctcacacttggcagacgatgtatggctgcgacctggggccggacgggcgcctcctccgcgggcataaccagttagcctacgacggcaaggattacatcgccctgaacgaggacctgagctcctggaccgcggcggacaccgcggctcagatcacccagcgcaagtgggaggcggcccgtgtggcggagcagctgagagcctacctggagggcacgtgcgtggagtggctccgcagatacctggagaacgggaaggagacgctgcagcgcgcggaccccccaaagacacacgtgacccaccaccccatctctgaccatgaggccaccctgaggtgctgggccctgggcttctaccctgcggagatcacactgacctggcagcgggatggcgaggaccaaactcaggacactgagcttgtggagaccagaccagcaggagatagaaccttccagaagtgggcagctgtggtggtgccttctggagaagagcagagatacacatgccatgtacagcatgaggggctgccgaagcccctcaccctgagatgggagccatcttcccagtccaccatccccatcgtgggcattgttgctggcctggctgtcctagcagttgtggtcatcggagctgtggtcgctactgtgatgtgtaggaggaagagctcaggtggaaaaggagggagctactctcaggctgcgtccagcgacagtgcccagggctctgatgtgtctctcacagcttga

SEQ ID NO: 1692 - DNA, 20 bp, Homo sapiens
ccgagctcctctttgatcgt

SEQ ID NO: 1693 - DNA, 1591 bp, Homo sapiens; identical to SEQ ID NO: 1690

SEQ ID NO: 1694 - DNA, 1578 bp, Homo sapiens
ggttctaaagtccccagtcacccacccggactcacattctccccagaggccgagatgcgggtcatggcgccccgagccctcctcctgctgctctcgggaggcctggccctgaccgagacctgggcctgctcccactccatgaggtatttcgacaccgccgtgtcccggcccggccgcggagagccccgcttcatctcagtgggctacgtggacgacacgcagttcgtgcggttcgacagcgacgccgcgagtccgagaggggagccgcgggcgccgtgggtggagcaggaggggccggagtattgggaccgggagacacagaagtacaagcgccaggcacaggctgaccgagtgagcctgcggaacctgcgcggctactacaaccagagcgaggacgggtctcacaccctccagaggatgtatggctgcgacctggggcccgacgggcgcctcctccgcgggtatgaccagtccgcctacgacggcaaggattacatcgccctgaacgaggacctgcgctcctggaccgccgcggacacggcggctcagatcacccagcgcaagtgggaggcggcccgtgaggcggagcagtggagagcctacctggagggcacgtgcgtggagtggctccgcagatacctggagaacgggaaggagacgctgcagcgcgcggaacacccaaagacacacgtgacccaccatcccgtctctgaccatgaggccaccctgaggtgctgggccctgggcttctaccctgcggagatcacactgacctggcagcgggatggcgaggaccaaactcaggacaccgagcttgtggagaccaggccagcaggagatggaaccttccagaagtgggcagctgtggtggtgccttctggagaagagcagagatacacgtgccatatgcagcacgaggggctgccagagcccctcaccctgagctgggagccatcttcccagcccaccatccccatcatgggcatcgttgctggcctggctgtcctggctgtcctagctgtcctaggagctgtgatggctgttgtgatgtgtaggaggaagagctcaggtggaaaaggagggagctgctctcaggctgcgtgcagcaacagtgcccagggctctgatgagtctctcatcacttgtaaagcctgagacagctgcctgtgtgggactgagatgcaggatttcttcacacctctcctttgtgacttcaagagcctctggcatctctttctgcaaaggcatctgaatgtgtctgcgttcctgttagcataatgtgaggaggtggagagacagcccacccccgtgtccaccgtgacccctgtccccacactgacctgtgttccctccccgatcatctttcctgttccagagaagtgggctggatgtctccatctctgtctcaactttacgtgtactgagctgcaacttcttacttccctactgaaaataagaatctgaatataaatttgttttctcaaatatttgctatgagaggttgatggattaattaaataagtcaattcctggaagttgagagagcaaataaagacctgagaaccttccagaatccgc

SEQ ID NO: 1695 - DNA, 1089 bp, Homo sapiens
atgcgggtcacggcaccccgaaccctcctcctgctgctctggggggccctggccctgaccgagacctgggccggctcccactccatgaggtatttctacaccgccatgtcccggcccggccgcggggagccccgcttcatcgcagtgggctacgtggacgacacgcagttcgtgaggttcgacagcgacgccgcgagtccgagagaggagccgcgggcgccgtggatagagcaggaggggccggagtattgggaccggaacacacagatctacaaggcccaggcacagactgaccgagagagcctgcggaacctgcgcggctactacaaccagagcgaggccgggtctcacacttggcagacgatgtatggctgcgacctggggccggacgggcgcctcctccgcgggcataaccagttagcctacgacggcaaggattacatcgccctgaacgaggacctgagctcctggaccgcggcggacaccgcggctcagatcacccagcgcaagtgggaggcggcccgtgtggcggagcagctgagagcctacctggagggcacgtgcgtggagtggctccgcagatacctggagaacgggaaggagacgctgcagcgcgcggaccccccaaagacacacgtgacccaccaccccatctctgaccatgaggccaccctgaggtgctgggccctgggcttctaccctgcggagatcacactgacctggcagcgggatggcgaggaccaaactcaggacactgagcttgtggagaccagaccagcaggagatagaaccttccagaagtgggcagctgtggtggtgccttctggagaagagcagagatacacatgccatgtacagcatgaggggctgccgaagcccctcaccctgagatgggagccatcttcccagtccaccatccccatcgtgggcattgttgctggcctggctgtcctagcagttgtggtcatcggagctgtggtcgctactgtgatgtgtaggaggaagagctcaggtggaaaaggagggagctactctcaggctgcgtccagcgacagtgcccagggctctgatgtgtctctcacagcttga

SEQ ID NO: 1696 - DNA, 1578 bp, Homo sapiens; identical to SEQ ID NO: 1694

SEQ ID NO: 1697 - DNA, 1567 bp, Homo sapiens
cgcttggcacagaagcagaggggtcagggcgaagtcccagggccccaggcgtggctctcagggtctcaggccccgaaggcggtgtatggattggggagtcccagccttggggattccccaactccgcagtttcttttctccctctcccaacctatgtagggtccttcttcctggatactcacgacgcggacccagttctcactcccattgggtgtcgggtttccagagaagccaatcagtgtcgtcgcggtcgcggttctaaagtccgcacgcacccaccgggactcagattctccccagacgccgaggatggccgtcatggcgccccgaaccctcctcctgctactcttgggggccctggccctgacccagacctgggcgggctcccactccatgaggtatttcaccacatccgtgtcccggcccggccgcggggagccccgcttcatcgccgtgggctacgtggacgacacgcagttcgtgcggtttgacagcgacgccgcgagccagaggatggagccgcgggcaccgtggatagagcaggaggggccggagtattgggacctgcagacacggaatgtgaaggcccagtcacagactgaccgagcgaacctggggaccctgcgcggctactacaaccagagcgaggccggttctcacaccatccagatgatgtatggctgcgacgtggggtcggacgggcgcttcctccgcgggtaccggcaggacgcctacgacggcaaggattacatcgccttgaacgaggacctgcgctcttggaccgcggcggacatggcggctcagatcacccagcgcaagtgggaggcggcccgtgtggcggagcagttgagagcctacctggagggcacgtgcgtggagtggctccgcagatacctggagaacgggaaggagacgctgcagcgcacggacgcccccaaaacgcatatgactcaccacgctgtctctgaccatgaagccaccctgaggtgctgggccctgagcttctaccctgcggagatcacactgacctggcagcgggatggggaggaccagacccaggacacggagctcgtggagaccaggcctgcaggggatggaaccttccagaagtgggcggctgtggtggtgccttctggacaggagcagagatacacctgccatgtgcagcatgagggtttgcccaagcccctcaccctgagatgggagccgtcttcccagcccaccatccccatcgtgggcatcattgctggcctggttctctttggagctgtgatcactggagctgtggtcgctgctgtgaggtggaggaggaagagctcagatagaaaaggagggagctactctcaggctgcaagcagtgacagtgcccagggctctgatgtgtctctcacagcttgtaaagtgtgagacagctgccttgtgtgggactgagaggcaagagttgttcctgcccttccctttgtgacttgaagaaccctgactttgtttctgcaaaggcaccttccaccatgaccctcttcccacgctgacctgtgctccctccccaatcatctttcctgttccagag

SEQ ID NO: 1698 - DNA, 1541 bp, Homo sapiens
attcggattctccccagacgccgaggatgcgggtcatggcgccccgaaccctcatcctgctgctctcgggagccctggccctgaccgagacctgggcctgctcccactccatgaggtatttctacaccgccgtgtcccggcccggccgcggagagccccgcttcatcgcagtgggctacgtggacgacacgcagttcgtgcggttcgacagcgacgccgcgagtccaagaggggagccgcgggcgccgtgggtggagcaggaggggccggagtattgggaccgggagacacagaagtacaagcgccaggcacagactgaccgagtgagcctgcggaacctgcgcggctactacaaccagagcgaggccgggtctcacaccctccagtggatgtatggctgcgacctggggcccgacgggcgcctcctccgcgggtatgaccagtccgcctacgacggcaaggattacatcgccctgaacgagcacctgcgctcctgcaccgccgccgacacggcggctcagatcacccagcgcaagtgggaggcggcccgtgcggcggagcagcagagagcctacctggagggcacgtgcgtggagtggctccgcagatacctggagaacgggaaggagacgctgcagcgcgcggaacacccaaagacacacgtgacccaccatctcgtctctgaccatgaggccaccctgaggtgctgggccctgggcttctaccctgcggagatcacactgacctggcagcgggatggcgaggaccaaactcaggacaccgagcttgtggagaccaggccagcaggagatggaaccttccagaagtgggcagctgtggtggtgccttctggagaagagcagagatacacgtgccatgtgcagcacgaggggctgccggagcccctcaccctgagatgggagccatcttcccagcccaccatccccatcgtgggcatcgttgctggcctggctgtcctggctgtcctagctgtcctaggagctgtggtggctgttgttatgtgtaggaggaagagctcaggtggaaaaggagggagctgctctcaggctgcgtccagcaacagtgcccagggctctgatgagtctctcatcgcttgtaaagcctgagacagctgcctgtgtgggactgagatgcaggatttcttcacacctctcctttgtgacttcaagagcctctggcatctctttctgcaaaggcatctgaatgcgtctgcgttcctgttagcataatgtgaggaggtggagagacagcccacccccgtgtccaccgtgacccctgtccccacactgacctgtgttccctccccgatcatctttcctgttccagagaagtgggctggatgtctccatctctgtctcaactttacgtgtactgagctgcaacttcttacttccctactgaaaataagaatctgaatataaatttgttttctcaaatatttgctatgagaggttgatggattaattaaataagtcaatccctggaagttgagagagcaaataaagacctgagaaccttcc

SEQ ID NO: 1699 - DNA, 1101 bp, Homo sapiens
atgcgggtcatggcgccccgaaccctcatcctgctgctctcgggagccctggccctgaccgagacctgggcctgctcccactccatgaggtatttctacaccgccgtgtcccggcccggccgcggagagccccgcttcatcgcagtgggctacgtggacgacacgcagttcgtgcagttcgacagcgacgccgcgagtccaagaggggagccgcgggcgccgtgggtggagcaggaggggccggagtattgggaccgggagacacagaagtacaagcgccaggcacagactgaccgagtgaacctgcggaaactgcgcggctactacaaccagagcgaggccgggtctcacaccctccagaggatgtatggctgcgacctggggcccgacgggcgcctcctccgcgggtataaccagttcgcctacgacggcaaggattacatcgccctgaatgaggacctgcgctcctggaccgccgcggacaaggcggctcagatcacccagcgcaagtgggaggcggcccgtgaggcggagcagcggagagcctacctggagggcacgtgcgtggagtggctccgcagatacctggagaacgggaagaagacgctgcagcgcgcggaacacccaaagacacacgtgacccaccatcccgtctctgaccatgaggccaccctgaggtgctgggccctgggcttctaccctgcggagatcacactgacctggcagcgggatggcgaggaccaaactcaggacaccgagcttgtggagaccaggccagcaggagatggaaccttccagaagtgggcagctgtggtggtgccttctggagaagagcagagatacacgtgccatgtgcagcacgaggggctgccagagcccctcaccctgagatgggggccatcttcccagcccaccatccccatcgtgggcatcgttgctggcctggctgtcctggctgtcctagctgtcctaggagctgtgatggctgttgtgatgtgtaggaggaagagctcaggtggaaaaggagggagctgctctcaggctgcgtccagcaacagtgcccagggctctgatgagtctctcatcgcttgtaaagcctga

SEQ ID NO: 1700 - DNA, 1567 bp, Homo sapiens; identical to SEQ ID NO: 1697

SEQ ID NO: 1701 - DNA, 1591 bp, Homo sapiens; identical to SEQ ID NO: 1690

SEQ ID NO: 1702 - DNA, 1109 bp, Homo sapiens
cggcgaggatggccgtcatggcgccccgaaccctcctcctgctactcttgggggccctggccctgacccagacctgggcgggctcccactccatgaggtatttcaccacatccgtgtcccggcccggccgcggggagccccgcttcatcgccgtgggctacgtggacgacacgcagttcgtgcggtttgacagcgacgccgcgagccagaggatggagccgcgggcaccgtggatagagcaggaggggccggagtattgggacctgcagacacggaatgtgaaggcccagtcacagactgaccgagcgaacctggggaccctgcgcggctactacaaccagagcgaggccggttctcacaccatccagatgatgtatggctgccacgtggggtcggacgggcgcttcctccgcgggtaccggcaggacgcctacgacggcaaggattacatcgccttgaacgaggacctgcgctcttggaccgcggcggacatggcggctcagatcacccagcgcaagtgggaggcggcccgtgtggcggagcagttgagagcctacctggagggcacgtgcgtggagtggctccgcagatacctggagaacgggaaggagacgctgcagcgcacggacgcccccaagacgcatatgactcaccacgctgtctctgaccatgaggccaccctgaggtgctgggccctgagcttctaccctgcggagatcacactgacctggcagcgggatggggaggaccagacccaggacacggagcttgtggagaccaggcctgcaggggatggaaccttccagaagtgggcgtctgtggtggtgccttctggacaggagcagagatacacctgccatgtgcagcatgagggtctgcccaagcccctcaccctgagatgggagccgtcttcccagcccaccatccccatcgtgggcatcattgctggcctagttctctttggagctgtgttcgctggagctgtggtcgctgctgtgaggtggaggaggaagagctcagatagaaaaggagggagctactctcaggctgcaagcagtgacagtgcccagggctctgatatgtctctcacagcttgtaaagtgtgagac

SEQ ID NO: 1703 - DNA, 1567 bp, Homo sapiens; identical to SEQ ID NO: 1697

SEQ ID NO: 1704 - DNA, 1591 bp, Homo sapiens; identical to SEQ ID NO: 1690

SEQ ID NO: 1705 - DNA, 2543 bp, Homo sapiens
acgccgagatgcgggtcacggcgccccgaaccctcctcctgctgctctggggggcagtggccctgaccgagacctgggccggtgagtgcgggatcgggagggaaatggcctctgtggggaggagcgaggggaccgcaggcgggggcgcaggacccggggagccgcgccgggaggagggtctggcgggtctcagcccctcctggcccccaggctcccactccatgaggtatttctacaccgccatgtcccggcccggccgcggggagccccgcttcatcaccgtgggctacgtggacgacacccagttcgtgaggttcgacagcgacgccacgagtccgaggatggcgccccgggcgccatggatagagcaggaggggccggagtattgggaccgggagacacagatctccaagaccaacacacagacttaccgagagaacctgcgcaccgcgctccgctactacaaccagagcgaggccgggtctcacatcatccagaggatgtacggctgcgacgtggggccggacgggcgcctcctccgcgggtatgaccaggacgcctacgacggcaaggattacatcgccctgaacgaggacctgagctcctggaccgcggcggacaccgcggctcagatcacccagcgcaagtgggaggcggcccgtgtggcggagcagctgagagcctacctggagggcctgtgcgtggagtggctccgcagatacctggagaacgggaaggagacgctgcagcgcgcgggtaccaggggcagtggggagccttccccatctcctatagacgccgagatgctggtcatggcgccccgaaccgtcctcctgctgctctcggcggccctggccctgaccgagacctgggccgaccccccaaagacacacgtgacccaccaccccatctctgaccatgaggccaccctgaggtgctgggccctgggcttctaccctgcggagatcacactgacctggcagcgggatggcgaggaccaaactcaggacactgagcttatgcgggtcatggcgccccgagccctcctcctgctgctctcgggaggcctggccctgaccgagacctgggcctgctcccactccatgaggtatttcgacaccgccgtgtcccggcccggccgcggagagccccgcttcatctcagtgggctacgtggacgacacgcagttcgtgcggttcgacagcgacgccgcgagtccgagaggggagccgcgggcgccgtgggtggagcaggaggggccggagtattgggaccgggagacacagaagtacaagcgccaggcacaggctgaccgagtgagcctgcggaacctgcgcggctactacaaccagagcgaggacgggtctcacaccctccagaggatgtatggctgcgacctggggcccgacgggcgcctcctccgcgggtatgaccagtccgcctacgacggcaaggattacatcgccctgaacgaggacctgcgctcctggaccgccgcggacacggcggctcagatcacccagcgcaagtgggaggcggcccgtgaggcggagcagtggagagcctacctggagggcacgtgcgtggagtggctccgcagatacctggagaacgggaaggagacgctgcagcgcgcggaacacccaaagacacacgtgacccaccatcccgtctctgaccatgaggccaccctgaggtgctgggccctgggcttctaccctgcggagatcacactgacctggcagcgggatggcgaggaccaaactcaggacaccgagcttgtggagaccaggccagcaggagatggaaccttccagaagtgggcagctgtggtggtgccttctggagaagagcagagatacacgtgccatatgcagcacgaggggctgccagagcccctcaccctgagctgggagccatcttcccagcccaccatccccatcatgggcatcgttgctggcctggctgtcctggctgtcctagctgtcctaggagctgtgatggctgttgtgatgtgtaggaggaagagctcaggtggaaaaggagggagctgctctcaggctgcgtgcagcaacagtgcccagggctctgatgagtctctcatcacttgtaaagcctgagacagctgcctgtgtgggactgagatgcaggatttcttcacacctctcctttgtgacttcaagagcctctggcatctctttctgcaaaggcatctgaatgtgtctgcgttcctgttagcataatgtgaggaggtggagagacagcccacccccgtgtccaccgtgacccctgtccccacactgacctgtgttccctccccgatcatctttcctgttccagagaagtgggctggatgtctccatctctgtctcaactttacgtgtactgagctgcaacttcttacttccctactgaaaataagaatctgaatataaatttgttttctcaaatatttgctatgagaggttgatggattaattaaataagtcaattcctggaagttgagagagcaaataaagacctgagaaccttccagaatccgc

SEQ ID NO: 1706 - DNA, 789 bp, Homo sapiens
atgaaatcaatttatgctttattatttctatttattaatttatctttgttggctaacaacatttcaaaaaaagatttagaagtactgctaaagattgcccaagcaatgaataaggaatgcaaaaattttattgaaaaaaatcctattcagttcttaaaagaaataaaacccttagtagatgcagaaaaaaataacctcttaactctaataaataaaaaaataccaattcctgaaaattataaaatacctgatctggtaaatattgatgattttgaagatcttaaaaatcttggagcaaagactattaaagtaagaaaaatattaatcgaagatttaattcgactaataaaagatgcaaaaaaatttgggattgaaattaaaatcaaatctgcttacagaacgcaagaatatcaaaaatttttatttgattacaatgtcaaaacttatggcagaaaagttgcagaaacccaatcagcaattccaggccattctcaacatcatatgggaacagcaatagattttataaatatagatgataatttactaaacacaaaagaaggaaaatggctttatgaaaactctctaaaatacggattttccgtttcatacccaaaaggatatgaaacggacactggatataaagcagagccttggcactacttatacataggacctaagccatgctttattcagaaaaaatattttaataatttacaacataagcttcttgaattttggaaccagaacaaaacaaatcttattaacctaattgaaaaatatgcaaactaa

SEQ ID NO: 1707 - DNA, 19 bp, Homo sapiens
  misc_feature (12)..(12): n is a, c, g, or t
cgccaccgagangaaaaac

SEQ ID NO: 1708 - DNA, 1703 bp, Homo sapiens
cgagtttcacttcttctcccaacctatgtcgggtccttcttccaggatactcgtgacgcgtccccatttcccactcccattgggtgtcgggtgtctagagaagccaatcagtgtcgccggggtcccagttctaaagtccccacgcacccacccggactcagaatctcctcagacgccgagatgcgggtcacggcgccccgaaccctcctcctgctgctctggggggcagtggccctgaccgagacctgggccggctcccactccatgaggtatttctacaccgccatgtcccggcccggccgcggggagccccgcttcatcaccgtgggctacgtggacgacacccagttcgtgaggttcgacagcgacgccacgagtccgaggatggcgccccgggcgccatggatagagcaggaggggccggagtattgggaccgggagacacagatctccaagaccaacacacagacttaccgagagaacctgcgcaccgcgctccgctactacaaccagagcgaggccgggtctcacatcatccagaggatgtacggctgcgacgtggggccggacgggcgcctcctccgcgggtatgaccaggacgcctacgacggcaaggattacatcgccctgaacgaggacctgagctcctggaccgcggcggacaccgcggctcagatcacccagcgcaagtgggaggcggcccgtgtggcggagcagctgagagcctacctggagggcctgtgcgtggagtggctccgcagatacctggagaacgggaaggagacgctgcagcgcgcggaccccccaaagacacacgtgacccaccaccccatctctgaccatgaggccaccctgaggtgctgggccctgggcttctaccctgcggagatcacactgacctggcagcgggatggcgaggaccaaactcaggacactgagcttgtggagaccagaccagcaggagatagaaccttccagaagtgggcagctgtggtggtgccttctggagaagagcagagatacacatgccatgtacagcatgaggggctgccgaagcccctcaccctgagatgggagccgtcttcccagtccaccgtccccatcgtgggcattgttgctggcctggctgtcctagcagttgtggtcatcggagctgtggtcgctgctgtgatgtgtaggaggaagagctcaggtggaaaaggagggagctactctcaggctgcgtgcagcgacagtgcccagggctctgatgtgtctctcacagcttgaaaagcctgagacagctgtcttgtgagggactgagatgcaggatttcttcacgcctcccctttgtgacttcaagagcctctggcatctctttctgcaaaggcacctgaatgtgtctgcgtccctgttagcataatgtgaggaggtggagagacagcccacccttgtgtccactgtgacccctgttcccatgctgacctgtgtttcctccccagtcatctttcttgttccagagaggtggggctggatgtctccatctctgtctcaactttatgtgcactgagctgcaacttcttacttccctactgaaaataagaatctgaatataaatttgttttctcaaatatttgctatgagaggttgatggattaattaaataagtcaattcctggaatttgagagagcaaataaagacctgagaaccttccagaatctgc

SEQ ID NO: 1709 - DNA, 1101 bp, Homo sapiens
atgcgggtcatggcgccccgaaccctcatcctgctgctctcgggagccctggccctgaccgagacctgggcctgctcccactccatgaggtatttctacaccgccgtgtcccggcccggccgcggagagccccgcttcatcgcagtgggctacgtggacgacacgcagttcgtgcagttcgacagcgacgccgcgagtccaagaggggagccgcgggcgccgtgggtggagcaggaggggccggagtattgggaccgggagacacagaagtacaagcgccaggcacagactgaccgagtgagcctgcggaacctgcgcggctactacaaccagagcgaggccgggtctcacaccctccagaggatgtatggctgcgacctggggcccgacgggcgcctcctccgcgggtataaccagttcgcctacgacggcaaggattacatcgccctgaatgaggacctgcgctcctggaccgccgcggacacggcggctcagatcacccagcgcaagtgggaggcggcccgtacggcggagcagctgagagcctacctggagggcacgtgcgtggagtggctccgcagatacctggagaacgggaagaagacgctgcagcgcgcggaacacccaaagacacacgtgacccaccatcccgtctctgaccatgaggccaccctgaggtgctgggccctgggcttctaccctgcggagatcacactgacctggcagcgggatggcgaggaccaaactcaggacaccgagcttgtggagaccaggccagcaggagatggaaccttccagaagtgggcagctgtggtggtgccttctggagaagagcagagatacacgtgccatgtgcagcacgaggggctgccagagcccctcaccctgagatgggggccatcttcccagcccaccatccccatcgtgggcatcgttgctggcctggctgtcctggctgtcctagctgtcctaggagctgtgatggctgttgtgatgtgtaggaggaagagctcaggtggaaaaggagggagctgctctcaggctgcgtccagcaacagtgcccagggctctgatgagtctctcatcgcttgtaaagcctga

SEQ ID NO: 1710 - DNA, 1101 bp, Homo sapiens
atgcgggtcatggcgccccgaaccctcatcctgctgctctcgggagccctggccctgaccgagacctgggcctgctcccactccatgaggtatttctacaccgccgtgtcccggcccggccgcggagagccccgcttcatcgcagtgggctacgtggacgacacgcagttcgtgcagttcgacagcgacgccgcgagtccaagaggggagccgcgggcgccgtgggtggagcaggaggggccggagtattgggaccgggagacacagaagtacaagcgccaggcacagactgaccgagtgagcctgcggaacctgcgcggctactacaaccagagcgaggccgggtctcacaccctccagaggatgtatggctgcgacctggggcccgacgggcgcctcctccgcgggtataaccagttcgcctacgacggcaaggattacatcgccctgaatgaggacctgcgctcctggaccgccgcggacaaggcggctcagatcacccagcgcaagtgggaggcggcccgtgaggcggagcagcggagagcctacctggagggcacgtgcgtggagtggctccgcagatacctggagaacgggaagaagacgctgcagcgcgcggaacacccaaagacacacgtgacccaccatcccgtctctgaccatgaggccaccctgaggtgctgggccctgggcttctaccctgcggagatcacactgacctggcagcgggatggcgaggaccaaactcaggacaccgagcttgtggagaccaggccagcaggagatggaaccttccagaagtgggcagctgtggtggtgccttctggagaagagcagagatacacgtgccatgtgcagcacgaggggctgccagagcccctcaccctgagatgggggccatcttcccagcccaccatccccatcgtgggcatcgttgctggcctggctgtcctggctgtcctagctgtcctaggagctgtgatggctgttgtgatgtgtaggaggaagagctcaggtggaaaaggagggagctgctctcaggctgcgtccagcaacagtgcccagggctctgatgagtctctcatcgcttgtaaagcctga

SEQ ID NO: 1711 - DNA, 1128 bp, Homo sapiens
gtgaaggcccagtcacagactcaccgagtggacctggggaccctgcgcggctactacaaccagagcgaggccgtgtctcacaccgtccagaggatgtatggctgcgacgtggggtcggacgggcgcttcctccgcgggtaccaccaggtagcctacgacggcaaggattacatcgccctgaaagaggacctgcgctcttggaccgcggcggacatggcagctcagaccaccaagcacaagtgggaggcggcccatgtggcggagcagttgagagcctacctggagggcacgtgcgtggagtggctccgcagatacctggagaacgggaaggagacgctgcagcgcacggacgcccccaaaacgcatatgacccaccacgctgtctctgaccatgaagccaccctgaggtgctgggccctgagcttctaccctgcggagatcacactgacctggcagcgggatggggaggaccagacccaggacacggagctcgtggagaccaggcctgcaggagatggaaccttccagaagtgggcggctgtggtggtgccttctggagaggagcagagatacacctgccatgtgcagcatgagggtctgcccaagcccctcaccctgagatgggagccgtcttcccagcccaccatccccatcgtgggcatcattgctggcctggttctccttggagctgtgatcactggagctgtggtcgctgctgtgatgtggaggaggaagagctcagatagaaaaggagggagctactctcaggctgcaagcagtgacagtgcccagggctctgatgtgtctctcacagcttgtaaagtgtgagacagctgccttgtgtgggactgagaggcaagagttgttcctgcccttccctttgtgacttgaagaaccctgactttgtttctgcaaaggcacctgcatgtgtctgtgttcgtgtaggcataatgtgaggaggtggggagaccaccccacccccatgtccaccatgaccctcttcccacgctgacctgtgctccctccccaatcatctttcctgttccagagaggtggggctgaggtgtctccatctctgtctcaacttcatggtgcactgagctgtaacttcttccttccctattaaaa

SEQ ID NO: 1712 - DNA, 1089 bp, Homo sapiens
atgcgggtcacggcaccccgaaccctcctcctgctgctctggggggccctggccctgaccgagacctgggccggctcccactccatgaggtatttctacaccgccatgtcccggcccggccgcggggagccccgcttcatcgcagtgggctacgtggacgacacgcagttcgtgcggttcgacagcgacgccgcgagtccgagaggggagccgcgggcgccgtgggtggagcaggaggggccggagtattgggaccggaacacacagatctacaaggcccaggcacagactgaccgagagagcctgcggaacctgcgcggctactacaaccagagcgaggccgggtctcacacttggcagacgatgtatggctgcgacctggggccggacgggcgcctcctccgcgggcataaccagttagcctacgacggcaaggattacatcgccctgaacgaggacctgagctcctggaccgcggcggacaccgcggctcagatcacccagcgcaagtgggaggcggcccgtgtggcggagcagctgagagcctacctggagggcacgtgcgtggagtggctccgcagatacctggagaacgggaaggagacgctgcagcgcgcggaccccccaaagacacacgtgacccaccaccccatctctgaccatgaggccaccctgaggtgctgggccctgggcttctaccctgcggagatcacactgacctggcagcgggatggcgaggaccaaactcaggacactgagcttgtggagaccagaccagcaggagatagaaccttccagaagtgggcagctgtggtggtgccttctggagaagagcagagatacacatgccatgtacagcatgaggggctgccgaagcccctcaccctgagatgggagccatcttcccagtccaccatccccatcgtgggcattgttgctggcctggctgtcctagcagttgtggtcatcggagctgtggtcgctactgtgatgtgtaggaggaagagctcaggtggaaaaggagggagctactctcaggctgcgtccagcgacagtgcccagggctctgatgtgtctctcacagcttga

SEQ ID NO: 1713 - DNA, 2543 bp, Homo sapiens; identical to SEQ ID NO: 1705

SEQ ID NO: 1714 - DNA, 1101 bp, Homo sapiens
atgcgggtcatggcgccccgagccctcctcctgctgctctcgggaggcctggccctgaccgagacctgggcctgctcccactccatgaggtatttcgacaccgccgtgtcccggcccggccgcggagagccccgcttcatctcagtgggctacgtggacgacacgcagttcgtgcggttcgacagcgacgccgcgagtccgagaggggagccccgggcgccgtgggtggagcaggaggggccggagtattgggaccgggagacacagaagtacaagcgccaggcacaggctgaccgagtgagcctgcggaacctgcgcggctactacaaccagagcgaggacgggtctcacaccttccagaggatgtatggctgcgacctggggcccgacgggcgcctcctccgcgggtatgaccagttcgcctacgacggcaaggattacatcgccctgaacgaggacctgcgctcctggaccgccgcggacaccgcggctcagatcacccagcgcaagttggaggcggcccgtgcggcggagcaggacagagcctacctggagggcacgtgcgtggagtggctccgcagatacctggagaacgggaagaagacgctgcagcgcgcggaacccccaaagacacacgtgacccaccaccccctctctgaccatgaggccaccctgaggtgctgggccctgggcttctaccctgcggagatcacactgacctggcagcgggatggggaggaccagacccaggacaccgagcttgtggagaccaggccagcaggagatggaaccttccagaagtgggcagctgtggtggtgccttctggacaagagcagagatacacgtgccatatgcagcacgaggggctgcaagagcccctcaccctgagctgggagccatcttcccagcccaccatccccatcatgggcatcgttgctggcctggctgtcctggttgtcctagctgtccttggagctgtggtcaccgctatgatgtgtaggaggaagagctcaggtggaaaaggagggagctgctctcaggctgcgtgcagcaacagtgcccagggctctgatgagtctctcatcacttgtaaagcctga

SEQ ID NO: 1715 - DNA, 1628 bp, Homo sapiens
gcgcgcctccgccctcgggtggcggggccgcctggcgtcacttccgtccagaccggaacccaagatggctgcgctcttgcagacacgttggtcgtcattgcctccgagcccactttagccctcagctctgtatcagaaatgctgttcctttgggaaccacggccaaagaagagatggagcggttctggaataagaatataggttcaaaccgtcctctgtctccccacattactatctacagttggtctcttcccatggcgatgtccatctgccaccgtggcactggtattgctttgagtgcaggggtctctctttttggcatgtcggccctgttactccctgggaactttgagtcttatttggaacttgtgaagtccctgtgtctggggccagcactgatccacacagctaagtttgcacttgtcttccctctcatgtatcatacctggaatgggatccgacacttgatgtgggacctaggaaaaggcctgaagattccccagctataccagtctggagtggttgtcctggttcttactgtgttgtcctctatggggctggcagccatgtgaagaaaggaggctcccagcatcatcttcctacacattattacattcacccatctttctgtttgtcattcttatctccagcctgggaaaagttctccttatttgtttagatccttttgtattttcagatctccttggagcagtagagtacctggtagaccataatagtggaaaagggtctagttttccccttgtttctaaagatgaggtggctttattctctctccatattgggctttgatttgtgctgagggtcagcttttggctccttcttcctgagacagtggaaacaatgccagctctgtggcttctgccctggggatgggccgggttggggggtgggttggtgaggctttgggtgccactgcctgtgggttgctggcttaaaggacaattctcttcattggtgagagcccaggccattaacacctacacagtgttattgaaagaagagaggtgggggtggaggggaattagtctgtcccagctagagggagataaagagggctagttagttcttggagcagctgcttttgaggagaaaatatatagctttggacacgaggaagatctagaaaattatcattgaacatattaatggttatttctttttcttggatttccagaaaagcctcttaattttatgctttctcatcgaagtaatgtaccctttttttctgaaactgaattaaatactcattttatctttgactctccttgaaatctagagaaaccaagaaaatggctgttgggaaggaaccaatttcctcctcttccctcgggtctcaggcatttacatcctccctctccccgcaatctgacctttaccaggagggaaacagttctcctacatctcatcattggaaaagttttcagggaatcagatagaacttagccagagatttaaatatcacagaaaagcctcagagaaggaaggagaaaaagaaaagaagtgacgcatgtagagtgcttttgggttataggcaccaaaatcccattaaggactgattataagcttcatggtacagttcagcaaattatgattcattgaggggcaca

SEQ ID NO: 1716 - DNA, 1544 bp, Homo sapiens
tcacttccgtccagaccggaacccaagatggctgcgctgttgctgagacacgttggtcgtcattgcctccgagcccactttagccctcagctctgtatcagaaattggtctcttcccatggcgatgtccatctgccaccgtggcactggtattgctttgagtgcaggggtctctctttttggcatgtcggccctgttactccctgggaactttgagtcttatttggaacttgtgaagtccctgtgtctggggccagcactgatccacacagctaagtttgcacttgtcttccctctcatgtatcatacctggaatgggatccgacacttgatgtgggacctaggaaaaggcctgaagattccccagctataccagtctggagtggttgtcctggttcttactgtgttgtcctctatggggctggcagccatgtgaagaaaggaggctcccagcatcatcttcctacacattattacattcacccatctttctgtttgtcattcttatctccagcctgggaaaagttctccttatttgtttagatccttttgtattttcagatctccttggagcagtagagtacctggtagaccataatagtggaaaagggtctagttttccccttgtttctaaagatgaggtggctgcaaaaactccccttttttgcccacagcttgcctactctcggcctagaagcagttattctctctccatattgggctttgatttgtgctgagggtcagcttttggctccttcttcctgagacagtggaaacaatgccagctctgtggcttctgccctggggatgggccgggttggggggtgggttggtgaggctttgggtgccactgcctgtgggttgctggcttaaaggacaattctcttcattggtgagagcccaggccattaacacctacacagtgttattgaaagaagagaggtgggggtggaggggaattagtctgtcccagctagagggagataaagagggctagttagttcttggagcagctgcttttgaggagaaaatatatagctttggacacgaggaagatctagaaaattatcattgaacatattaatggttatttctttttcttggatttccagaaaagcctcttaattttatgctttctcatcgaagtaatgtaccctttttttctgaaactgaattaaatactcattttatctttgactctccttgaaatctagagaaaccaagaaaatggctgttgggaaggaaccaatttcctcctcttccctcgggtctcaggcatttacatcctccctctccccgcaatctgacctttaccaggagggaaacagttctcctacatctcatcattggaaaagttttcagggaatcagatagaacttagccagagatttaaatatcacagaaaagcctcagagaaggaaggagaaaaagaaaagaagtgacgcatgtagagtgcttttgggttataggcaccaaaatcccattaaggactgattataagcttcatggtacagttcagcaaattatgattcattgaggggcaca

SEQ ID NO: 1717 - DNA, 684 bp, Homo sapiens
atggctgcactcttgctgagacatgttggtcgacattgcctccgagcccactttagccctcagctctgtatcagaaatgctgttcctttgggaaccacaggcaaacaagagatggagcggttctggaataagaacacaggtttaaaccgtcctgtatctccccacgtcactatctacagttggtctcttcccatggcaatggccatctgccaccatgacactggtactgctttgagggcaggggcctctctttttggcatgtcagccctgttactccctgggaactttgagtcttatttggagctggtgaagtccctgtgtctggggccagcactgatccacacagctaagtttgcactcgtcttccctctcatgtatcatacctggaatggggtctgacacttgatgtgagacctaggaaaaggcctgaagattccccagctataccagtctggagtggctgtcctggttcttactgtgttgtcctctgtagggccggcagccatatgaagaacggaggttcccagcatcatattcctacacattattacattcacccatctttctgtttgtcactcttatctccagcctgggaaaagttctccttatttgtttagatccttttgcactttcagatccccttggagcagtagagtaccttgtagaacataagagtggaaaagg

SEQ ID NO: 1718 - DNA, 1646 bp, Homo sapiens
tcacttccgtccagaccggaacccaagatggctgcgctgttgctgagacacgttggtcgtcattgcctccgagcccactttagccctcagctctgtatcagaaatgctgttcctttgggaaccacggccaaagaagagatggagcggttctggaataagaatataggttcaaaccgtcctctgtctccccacattactatctacagttggtctcttcccatggcgatgtccatctgccaccgtggcactggtattgctttgagtgcaggggtctctctttttggcatgtcggccctgttactccctgggaactttgagtcttatttggaacttgtgaagtccctgtgtctggggccagcactgatccacacagctaagtttgcacttgtcttccctctcatgtatcatacctggaatgggatccgacacttgatgtgggacctaggaaaaggcctgaagattccccagctataccagtctggagtggttgtcctggttcttactgtgttgtcctctatggggctggcagccatgtgaagaaaggaggctcccagcatcatcttcctacacattattacattcacccatctttctgtttgtcattcttatctccagcctgggaaaagttctccttatttgtttagatccttttgtattttcagatctccttggagcagtagagtacctggtagaccataatagtggaaaagggtctagttttccccttgtttctaaagatgaggtggctgcaaaaactccccttttttgcccacagcttgcctactctcggcctagaagcagttattctctctccatattgggctttgatttgtgctgagggtcagcttttggctccttcttcctgagacagtggaaacaatgccagctctgtggcttctgccctggggatgggccgggttggggggtgggttggtgaggctttgggtgccactgcctgtgggttgctggcttaaaggacaattctcttcattggtgagagcccaggccattaacacctacacagtgttattgaaagaagagaggtgggggtggaggggaattagtctgtcccagctagagggagataaagagggctagttagttcttggagcagctgcttttgaggagaaaatatatagctttggacacgaggaagatctagaaaattatcattgaacatattaatggttatttctttttcttggatttccagaaaagcctcttaattttatgctttctcatcgaagtaatgtaccctttttttctgaaactgaattaaatactcattttatctttgactctccttgaaatctagagaaaccaagaaaatggctgttgggaaggaaccaatttcctcctcttccctcgggtctcaggcatttacatcctccctctccccgcaatctgacctttaccaggagggaaacagttctcctacatctcatcattggaaaagttttcagggaatcagatagaacttagccagagatttaaatatcacagaaaagcctcagagaaggaaggagaaaaagaaaagaagtgacgcatgtagagtgcttttgggttataggcaccaaaatcccattaaggactgattataagcttcatggtacagttcagcaaattatgattcattgaggggcaca

SEQ ID NO: 1719 - DNA, 1628 bp, Homo sapiens; identical to SEQ ID NO: 1715

SEQ ID NO: 1720 - DNA, 879 bp, Homo sapiens
gtcacttccgtccagaccggaacccaagatggctgcgctgttgctgagacacgttggtcgtcattgcctccgagcccactttagccctcagctctgtatcagaaaagtctcgttctgtcgaccaggctggagtgtagtggcgtgatctgggctcactgcaacctccacgtcctgagttcaagtgattatcctgcctcagcctcctaagtagccggaattacagtgctgttcctttgggaaccacggccaaagaagagatggagcggttctggaataagaatataggttcaaaccgtcctctgtctccccacattactatctacagttggtctcttcccatggcgatgtccatctgccaccgtggcactggtattgctttgagtgcaggggtctctctttttggcatgtcggccctgttactccctgggaactttgagtcttatttggaacttgtgaagtccctgtgtctggggccagcactgatccacacagctaagtttgcacttgtcttccctctcatgtatcatacctggaatgggatccgacacttgatgtgggacctaggaaaaggcctgaagattccccagctataccagtctggagtggttgtcctggttcttactgtgttgtcctctatggggctggcagccatgtgaagaaaggaggctcccagcatcatcttcctacacattattacattcacccatctttctgtttgtcattcttatctccagcctgggaaaagttctccttatttgtttagatccttttgtattttcagatctccttggagcagtagagtacctggtagaccataatagtggaaaagggtctagttttccccttgtttctaaagatgaggtggctgcaaaaactccc

SEQ ID NO: 1721 - DNA, 1293 bp, Homo sapiens
cccggaacccaagatggctgcgctgttgctgagacacgttggtcgtcattgcctccgagcccactttagccctcagctctgtatcagaaatgctgttcctttgggaaccacggccaaagaagagatggagcggttctggaataagaatataggttcaaaccgtcctctgtctccccacattactatctacagttggtctcttcccatggcgatgtccatctgccaccgtggcactggtattgctttgagtgcaggggtctctctttttggcatgtcggccctgttactccctgggaactttgagtcttatttggaacttgtgaagtccctgtgtctggggccagcactgatccacacagctaagtttgcacttgtcttccctctcatgtatcatacctggaatgggatccgacacttgatgtgggacctaggaaaaggcctgaagattccccagctataccagtctggagtggttgtcctggttcttactgtgttgtcctctatggggctggcagccatgtgaagaaaggaggctcccagcatcatcttcctacacattattacattcacccatctttctgtttgtcattcttatctccagcctgggaaaagttctccttatttgtttagatccttttgtattttcagatctccttggagcagtagagtacctggtagaccataatagtggaaaagggtctagttttccccttgtttctaaagatgaggtggctgcaaaaactccccttttttgcccacagcttgcctactctcggcctagaagcagttattctctctccatattgggctttgatttgtgctgagggtcagcttttggctccttcttcctgagacagtggaaacaatgccagctctgtggcttctgccctggggatgggccgggttggggggtgggttggtgaggctttgggtgccactgcctgtgggttgctggcttaaaggacaattctcttcattggtgagagcccaggccattaacacctacacagtgttattgaaagaagagaggtgggggtggaggggaattagtctgtcccagctagagggagataaagagggctagttagttcttggagcagctgcttttgaggagaaaatatatagctttggacacgaggaagatctagaaaattatcattgaacatattaatggttatttctttttcttggatttccagaaaagcctcttaattttatgctttctcatcgaagtaatgtaccctttttttctgaaactgaattaaatactcattttatctttgactctccttg

SEQ ID NO: 1722 - DNA, 879 bp, Homo sapiens; identical to SEQ ID NO: 1720

SEQ ID NO: 1723 - DNA, 1196 bp, Homo sapiens
agaccagaacccaagatggctgcgctgttgctgagacacgttggtcgtcattgcctccgagcccactttagccctcagctctgtatcagaaattggtctcttcccatggcgatgtccatctgccaccgtggcactggtattgctttgagtgcaggggtctctctttttggcatgtcggccgtgttactccctgggaactttgagtcttatttggaacttgtgaagtccctgtgtctggggccagcactgatccacacagctaagtttgcactcgtcttccctctcatgtatcatacctggaatgggatccgacacttgatgtgggacctaggaaaaggcctgaagattccccagctataccagtctggagtggttgtcctggttcttactgtgttgtcctctatggggctggcagccatgtgaagaaaggaggctcccagcatcatcttcctacacattattacattcacccatctttctgtttgtcattcttatctccagcctgggaaaagttctccttatttgtttagatccttttgtattttcagatctccttggagcagtagagtacctggtagaccttaatagtggaaaagggtctagttttccccttgtttctaaagatgaggtggctgcaaaaactccccttttttgcccacagcttgcctactctcggcctagaagcagttattctctctccatattgggctttgatttgtgctgagggtcagcttttggctccttcttcctgagacagtggaaacaatgccagctctgtggcttctgccctggggacgggccgggtggggggtgggttggtgaggctttgggtgccactacctgtgggttgctggcttaaaggacaattctcttcattggtgagagcccaggccattaacacctacacagtgttattgaaagaagagaggtgggggtggaggggaattagtctgtcccagctagagggagataaagagggctagttagttcttggagcagctgcttttgaggagaaaatatatagctttggacacgaggaagatccagaaaattatcattgaacatattaatggttatttctttttcttggatttccagaaaagcctcttaattttatgctttctcatcgaagtaatgtaccctttttttctgaaactgaattaaatactcattttatctttgaaaaaaaaaaaaag

SEQ ID NO: 1724 - DNA, 1628 bp, Homo sapiens; identical to SEQ ID NO: 1715

SEQ ID NO: 1725 - DNA, 1628 bp, Homo sapiens; identical to SEQ ID NO: 1715

SEQ ID NO: 1726 - DNA, 5289 bp, Homo sapiens; identical to SEQ ID NO: 1626

SEQ ID NO: 1727 - DNA, 1109 bp, Homo sapiens
atgtccgccttttctttggctttggctttggtgagctccccgcagccaccgccacccattggaatggccaacaggggacctgcatatggcctgagccgggaggtgcagcagaagattgagaaacaatatgatgcagatctggagcagatcctgatccagtggatcaccacccagtgccgaaaggatgtgggccggccccagcctggacgcgagaacttccagaactggctcaaggatggcacggtgctatgtgagctcattaatgcactgtaccccgaggggcaggccccagtaaagaagatccaggcctccaccatggccttcaagcagatggagcagatctctcagttcctgcaagcagctgagcgctatggcattaacaccactgacatcttccaaactgtggacctctgggaaggaaagaacatggcctgtgtgcagcggacgctgatgaatctgggtgggctggcagtagcccgagatgatgggctcttctctggggatcccaactggttccctaagaaatccaaggagaatcctcggaacttctcggataaccagctgcaagagggcaagaacgtgatcgggttacagatgggcaccaaccgcggggcgtctcaggcaggcatgactggctacgggatgccacgccagatcctctgatcccaccccaggccttgcccctgccctcccacgaatggttaatatatatgtagatatatattttagcagtgacattcccagagagccccagagctctcaagctcctttctgtcagggctcccccatgcttactaatacattcccttccccatagccatcaaaactggaccaactggcctcttcctttcccctgggaccaaaatttaggggcctcagtccctcaccgccatgccctggcctattctgtctctccttcttccccctggcctgttctgtctctgagctctccttccctggcaggggccctcgtggcttctcattttccattcccttcactgtggctaaggggtggggtgaggggatggagagggagggctgcctaccatggtctggggcttgaggaagatgagtttgttgatttaaataaagaatttgtcatttttgaa

SEQ ID NO: 1728 - DNA, 1354 bp, Homo sapiens
ctctccagcccgcttgaacgctccccgcagccaccgccacccattggaatggccaacaggggacctgcatatggcctgagccgggaggtgcagcagaagattgagaaacaatatgatgcagatctggagcagatcctgatccagtggatcaccacccagtgccgaaaggatgtgggccggccccagcctggacgcgagaacttccagaactggctcaaggatggcacggtgctatgtgagctcattaatgcactgtaccccgaggggcaggccccagtaaagaagatccaggcctccaccatggccttcaagcagatggagcagatctctcagttcctgcaagcagctgagcgctatggcattaacaccactgacatcttccaaactgtggacctctgggaaggaaagaacatggcctgtgtgcagcggacgctgatgaatctgggtgggctggcagtagcccgagatgatgggctcttctctggggatcccaactggttccctaagaaatccaaggagaatcctcggaacttctcggataaccagctgcaagagggcaagaacgtgatcgggttacagatgggcaccaaccgcggggcgtctcaggcaggcatgactggctacgggatgccacgccagatcctctgatcccaccccaggccttgcccctgccctcccacgaatggttaatatatatgtagatatatattttagcagtgacattcccagagagccccagagctctcaagctcctttctgtcagggtggggggttcagcctgtcctgtcacctctgaggtgcctgctggcatcctctcccccatgcttactaatacattcccttccccatagccatcaaaactggaccaactggcctcttcctttcccctgggaccaaaatttaggggcctcagtccctcaccgccatgccctggcctattctgtctctccttcttccccctggcctgttctgtctctgagctctgtgtcctccgttcattccatggctgggagtcactgatgctgcctctgccttctgatgctggactggccttgcttctacaagtatgcttctcccacagctgtggctgcaggaacttaatttatagggaggagcctgtggcagctgctgccccagccacagctgcactgactgtgctcaccacacatctggggcagccttccctggcaggggccctcgtggcttctcattttccattcccttcactgtggctaaggggtggggtgaggggatggagagggagggctgcctaccatggtctggggcttgaggaagatgagtttgttgatttaaataaagaatttgtcatttttgaaaaaaaaaaaaaaaaaaa

SEQ ID NO: 1729 - DNA, 1677 bp, Homo sapiens
ggctgggcagggcgcaccacttgcagctgcagcccttgccttgagtcagtgcgccgctctccagcccgcttgaacgctccccgcagccaccgccacccattggaatggccaacaggggacctgcatatggcctgagccgggaggtgcagcagaagattgagaaacaatatgatgcagatctggagcagatcctgatccagtggatcaccacccagtgccgaaaggatgtgggccggccccagcctggacgcgagaacttccagaactggctcaaggatggcacggtgctatgtgagctcattaatgcactgtaccccgaggggcaggccccagtaaagaagatccaggcctccaccatggccttcaagcagatggagcagatctctcagttcctgcaagcagctgagcgctatggcattaacaccactgacatcttccaaactgtggacctctgggaaggtgggacagggcgaggggctgggtcctgtcatccaggaggccagagattgggctgggccctcttgaccaggcagaaggggctgttttctggctccctgcagagaaagaggggtgtgtttgtgttccatggagcacttggtcatattggaggctggaatggagaagggtatggaaatgaacagtagaaataattaggaagccaggcctgctgacttagcgatagaggcggaaccctggtatctaggacactgcggaggctgacacattcccattctccttcccaggaaagaacatggcctgtgtgcagcggacgctgatgaatctgggtgggctggcagtagcccgagatgatgggctcttctctggggatcccaactggttccctaagaaatccaaggagaatcctcggaacttctcggataaccagctgcaagagggcaagaacgtgatcgggttacagatgggcaccaaccgcggggcgtctcaggcaggcatgactggctacgggatgccacgccagatcctctgatcccaccccaggccttgcccctgccctcccacgaatggttaatatatatgtagatatatattttagcagtgacattcccagagagccccagagctctcaagctcctttctgtcagggtggggggttcagcctgtcctgtcacctctgaggtgcctgctggcatcctctcccccatgcttactaatacattcccttccccatagccatcaaaactggaccaactggcctcttcctttcccctgggaccaaaatttaggggcctcagtccctcaccgccatgccctggcctattctgtctctccttcttccccctggcctgttctgtctctgagctctgtgtcctccgttcattccatggctgggagtcactgatgctgcctctgccttctgatgctggactggccttgcttctacaagtatgcttctcccacagctgtggctgcaggaacttaatttatagggaggagcctgtggcagctgctgccccagccacagctgcactgactgtgctcaccacacatctggggcagccttccctggcaggggccctcgtggcttctcattttccattcccttcactgtggctaaggggtggggtgaggggatggagagggagggctgcctaccatggtctggggcttgaggaagatgagtttgttgatttaaataaagaatttgtcatttttgaa

SEQ ID NO: 1730 - DNA, 1109 bp, Homo sapiens; identical to SEQ ID NO: 1727

SEQ ID NO: 1731 - DNA, 1109 bp, Homo sapiens; identical to SEQ ID NO: 1727

SEQ ID NO: 1732 - DNA, 1008 bp, Homo sapiens
gggaggagctggtctcgcgaggccgcgccccggttcgcgcgggcgtcgtgcacgcggttgtagctgcccggcggcggcagaagcggcgctcgcgccaagggacgtgtttctgcgctcgcgtggtcatggaggcgctgccgctgctagccgcgacaactccggaccacggccgccaccgaaggctgcttctgctgccgctactgctgttcctgctgccggctggagctgtgcagggctgggagacagaggagaggccccggactcgcgaagaggagtgccacttctacgcgggtggacaagtgtacccgggagaggcatcccgggtatcggtcgccgaccactccctgcacctaagcaaagcgaagatttccaagccagcgccctactgggaaggaacagctgtgatcgatggagaatttaaggagctgaagttaactgattatcgtgggaaatacttggttttcttcttctacccacttgatttcacatttgtgtgtccaactgaaattatcgcttttggcgacagacttgaagaattcagatctataaatactgaagtggtagcatgctctgttgattcacagtttacccatttggcctggattaatacccctcgaagacaaggaggacttgggccaataaggattccacttctttcagatttgacccatcagatctcaaaggactatggtgtatacctagaggactcaggccacactcttagaggtctcttcattattgatgacaaaggaatcctaagacaaattactctgaatgatcttcctgtgggtagatcagtggatgagacactacgtttggttcaagcattccagtacactgacaaacacggagaagtctgccctgctggctggaaacctggtagtgaaacaataatcccagatccagctggaaagctgaagtatttcgataaactgaattgagaaatacttcttcaagttatgatgcttgaaagttctcaataaagttcacggtttcattaccacattg

SEQ ID NO: 1733 - DNA, 813 bp, Homo sapiens
atggaggcgctgccgctgctagccgcgacaactccggaccacggccgccaccgaaggctgcttctgctgccgctactgctgttcctgctgccggctggagctgtgcagggctgggagacagaggagaggccccggactcgcgaagaggagtgccacttctacgcgggtggacaagtgtacccgggagaggcatcccgggtatcggtcgccgaccactccctgcacctaagcaaagcgaagatttccaagccagcgccctactgggaaggaacagctgtgatcgatggagaatttaaggagctgaagttaactgattatcgtgggaaatacttggttttcttcttctacccacttgatttcacatttgtgtgtccaactgaaattatcgcttttggcgacagacttgaagaattcagatctataaatactgaagtggtagcatgctctgttgattcacagtttacccatttggcctggattaatacccctcgaagacaaggaggacttgggccaataaggattccacttctttcagatttgacccatcagatctcaaaggactatggtgtatacctagaggactcaggccacactcttagaggtctcttcattattgatgacaaaggaatcctaagacaaattactctgaatgatcttcctgtgggtagatcagtggatgagacactacgtttggttcaagcattccagtacactgacaaacacggagaagtctgccctgctggctggaaacctggtagtgaaacaataatcccagatccagctggaaagctgaagtatttcgataaactgaat

SEQ ID NO: 1734 - DNA, 2106 bp, Homo sapiens
ccacacgcctttggcacaatgaagtgggtaacctttatttcccttctttttctctttagctcggcttattccaggggtgtgtttcgtcgagatgcacacaagagtgaggttgctcatcggtttaaagatttgggagaagaaaatttcaaagccttggtgttgattgcctttgctcagtatcttcagcagtgtccatttgaagatcatgtaaaattagtgaatgaagtaactgaatttgcaaaaacatgtgttgctgatgagtcagctgaaaattgtgacaaatcacttcataccctttttggagacaaattatgcacagttgcaactcttcgtgaaacctatggtgaaatggctgactgctgtgcaaaacaagaacctgagagaaatgaatgcttcttgcaacacaaagatgacaacccaaacctcccccgattggtgagaccagaggttgatgtgatgtgcactgcttttcatgacaatgaagagacatttttgaaaaaatacttatatgaaattgccagaagacatccttacttttatgccccggaactccttttctttgctaaaaggtataaagctgcttttacagaatgttgccaagctgctgataaagctgcctgcctgttgccaaagctcgatgaacttcgggatgaagggaaggcttcgtctgccaaacagagactcaagtgtgccaggcagtagctcgcctgagccagagatttcccaaagctgagtttgcagaagtttccaagttagtgacagatcttaccaaagtccacacggaatgctgccatggagatctgcttgaatgtgctgatgacagggcggaccttgccaagtatatctgtgaaaatcaagattcgatctccagtaaactgaaggaatgctgtgaaaaacctctgttggaaaaatcccactgcattgccgaattgaaagtaaggatgtttgcaaaaactatgctgaggcaaaggatgtcttcctgggcatgtttttgtatgaatatgcaagaaggcatcctgattactctgtcgtgctgctgctgagacttgccaagacatatgaaaccactctagagaagtgctgtgccgctgcagatcctcatgaatgctatgccaaagtgttcgatgaatttaaacctcttgtggaagagcctcagaatttaatcaaacaaaattgtgagctttttgagcagcttggagagtacaaattccagaatgcgctattagttcgttacaccaagaaagtaccccaagtgtcaactccaactcttgtagaggtctcaagaaacctaggaaaagtgggcagcaaatgttgtaaacatcctgaagcaaaaagaatgccctgtgcagaagactatctatccgtggtcctgaaccagttatgtgtgttgcatgagaaaacgccagtaagtgacagagtcaccaaatgctgcacagaatccttggtgaacaggcgaccatgcttttcagctctggaagtcgatgaaacatacgttcccaaagagtttaatgctgaaacattcaccttccatgcagatatatgcacactttctgagaaggagagacaaatcaagaaacaaactgcacttgttgagctcgtgaaacacaagcccaaggcaacaaaagagcaactgaaagctgttatggatgatttcgcagcttttgtagagaagtgctgcaaggctgacgataaggagacctgctttgccgaggagggtaaaaaacttgttgctgcaagtcaagctgccttaggcttataacatcacatttaaaagcatctcagcctaccatgagaataagagaaagaaaatgaagatcaaaagcttattcatctgtttttctttttcgttggtgtaaagccaacaccctgtctaaaaaacataaatttctttaatcattttgcctcttttctctgtgcttcaattaataaaaaatggaaagaatctaatagagtggtacagcactgttatttttcaaagatgtgttgctatcctgaaaattctgtaggttctgtggaagttccagtgttctctcttattccacttcggtagaggatttctagtttcttgtgggctaattaaataaatcattaatactcttctaagtt

SEQ ID NO: 1735 - DNA, 852 bp, Homo sapiens
atgtgtattcctccatcatatgctgaccttggcaaagctgccagagatattttcaacaaaggatttggttttgggttggtgaaactggatgtgaaaacaaagtcttgcagtggcgtggaattttcaacgtccggttcatctaatacagacactggtaaagttactgggaccttggagaccaaatacaagtggtgtgagtatggtctgactttcacagaaaagtggaacactgataacactctgggaacagaaatcgcaattgaagaccagatttgtcaaggtttgaaactgacatttgatactaccttctcaccaaacacaggaaagaaaagtggtaaaatcaagtcttcttacaagagggagtgtataaaccttggttgtgatgttgactttgattttgctggacctgcaatccatggttcagctgtctttggttatgagggctggcttgctggctaccagatgacctttgacagtgccaaatcaaagctgacaaggaataactttgcagtgggctacaggactggggacttccagctacacactaatgtcaatgatgggacagaatttggaggatcaatttatcagaaagtttgtgaagatcttgacacttcagtaaaccttgcttggacatcaggtaccaactgcactcgttttggcattgcagctaaatatcagttggatcccactgcttccatttctgcaaaagtcaacaactctagcttaattggagtaggctatactcagactctgaggcctggtgtgaagcttacactctctgctctggtagatgggaagagcattaatgctggaggccacaaggttgggctcgccctggagttggaggcttaa

SEQ ID NO: 1736 - DNA, 1464 bp, Homo sapiens
gctgctggagctgcagcccgaccgcgagcgtgccaagcggcttcagcagctagcggacgtggcggcggcccccctcaggacaccaccagattcccctcttcccgcggcctcgccatggcgacccacggacagacttgcgcgcgtcgatcggatcaatcacttttctagaggaagtagcagtccctcttgtgagagcgcaaggtcattacttgtgctcctaagggcgtggacgtgctttgtggaatgaatgagctggtgtaatgagctcagattgcctgcccttaagcagcacagcattggccgaggacttgagagtcacattacaatgtgtattcctccatcatatgctgaccttggcaaagctgccagagatattttcaacaaaggatttggttttgggttggtgaaactggatgtgaaaacaaagtcttgcagtggcgtggaattttcaacgtccggttcatctaatacagacactggtaaagttactgggaccttggagaccaaatacaagtggtgtgagtatggtctgactttcacagaaaagtggaacactgataacactctgggaacagaaatcgcaattgaagaccagatttgtcaaggtttgaaactgacatttgatactaccttctcaccaaacacaggaaagaaaagtggtaaaatcaagtcttcttacaagagggagtgtataaaccttggttgtgatgttgactttgattttgctggacctgcaatccatggttcagctgtctttggttatgagggctggcttgctggctaccagatgacctttgacagtgccaaatcaaagctgacaaggaataactttgcagtgggctacaggactggggacttccagctacacactaatgtcaatgatgggacagaatttggaggatcaatttatcagaaagtttgtgaagatcttgacacttcagtaaaccttgcttggacatcaggtaccaactgcactcgttttggcattgcagctaaatatcagttggatcccactgcttccatttctgcaaaagtcaacaactctagcttaattggagtaggctatactcagactctgaggcctggtgtgaagcttacactctctgctctggtagatgggaagagcattaatgctggaggccacaaggttggctcgccctggagttggaggcttaatccagctgaaagaaacctttgggaatggatatcagaagatttggccttaatatatttccattgtgaccagcagcaggcttttttccccccagaagatgatcaaaacaaaggatgatctcaacaagagctgtattttaagtatttagacagttctttgttagctggtttctagttggttatctagttaccaatgctgcagtcctgcagtcacctatacattatttaaatgtatttaactgttaaatgcgctacccaccaataatgaaatagacctttatgaaaactgtg

SEQ ID NO: 1737 - DNA, 4507 bp, Homo sapiens
agcgcgttgcatcacctccgtgcgcccggttgcagcgtggacgccggatgagttgcttttaggcttgctggcccgcggggctgtccaggcacgcgaggcccctcagcaacaaaatgcttcaacaagttccagaaaacataaattttcctgctgaagaagagaaaatcttggagttttggactgaatttaattgttttcaggaatgcttaaagcaatcaaaacataaaccaaaatttaccttctatgatggtcctccttttgcaactggactgcctcactatggacatatacttgcgggtacaattaaagatatagttacaagatatgctcaccagagtgggtttcatgttgacagaagatttggatgggattgccatggcttacctgtggaatatgaaattgataagacactgggaatcagaggaccagaggatgtggccaaaatggggattacagagtataacaatcagtgccgagcaattgtgatgagatattctgctgagtggaagtctactgttagcagacttggccgatggattgactttgacaatgactataaaactctgtatccacaattcatggaatcagtctggtgggtcttcaaacaactctatgataaaggccttgtttatagaggtgtgaaagtcatgcccttctctacggcatgtaacactccactttccaacttcgagtcacaccagaattataaggatgttcaagatccttcagtatttgtaactttccctttggaagaagatgaaactgtatctttagttgcttggacaaccactccctggactctacctagtaaccttgctgtgtgtgttaatccagaaatgcaatatgtgaaaattaaagatgttgccagaggacgattactcattttaatggaagccagattgtcagccctctataaattggagagtgactatgagatccttgaaagatttcctggtgcctatcttaaaggcaagaagtacaggcccctgtttgactatttcctgaagtgtaaagagaatggcgctttcactgtgcttgttgacaactatgtgaaggaagaagaaggcacaggggttgtccaccaagctccttacttcggtgctgaggactatcgggtctgtatggactttaacattattcggaaagactcactccctgtttgccctgtggatgcttcaggctgcttcacaacggaggtgacagatttcgcaggacagtatgtgaaggatgctgacaaaagtatcatcaggactttgaaggaacaaggccgacttctggttgccaccaccttcactcacagctaccctttttgctggagatcagacactcctctaatttacaaagcagtgcccagctggtttgtgcgagtggagaacatggtggaccagctcctaaggaacaatgacctgtgctactgggtcccagagttggtacgagaaaaacgatttggaaattggctgaaagatgcacgtgactggacaatttccagaaacagatactggggcacccccatcccactgtgggtcagcgatgactttgaggaggtggtatgcattgggtcagtggcggaacttgaagaactgtcaggagcaaagatctcagatctccacagagagagtgttgaccacctgaccattccttcacgctgtgggaagggatccttgcaccgcatctctgaagtgtttgactgttggtttgagagtggcagcatgccctatgctcaggttcattacccgtttgaaaacaagagggagtttgaggatgcttttcctgcagatttcattgccgagggcatcgaccaaaccagaggatggttttataccctgctggtgctggccacggccctctttggacaaccgcctttcaagaacgtaattgtgaatgggcttgtcctggcaagtgatggccaaaaaatgagcaaacggaaaaagaattatccagatccagtttccatcatccagaagtatggtgctgatgccctcagattatatctgattaactcccctgtggtgagagcagaaaacctccgctttaaagaagagggtgtgcgggacgtccttaaggatgtactgctcccatggtacaatgcctatcgcttcttaatccagaacgttctgaggctccagaaggaggaagaaatagaatttctctacaatgagaacacggttagagaaagccccaacattacagaccggtggatcctgtccttcatgcagtctctcattggcttctttgagactgaaatggcagcttataggctttatactgtggtgcctcgcctggtcaagtttgtagatattctgaccaattggtatgttagaatgaaccgcagaagattaaagggtgaaaatgggatggaggattgtgtcatggccctagaaaccttgtttagtgttctgctttctctttgcagacttatggctccctacacaccttttctcactgaattgatgtaccagaatctaaaggtgctgattgaccctgtttctgttcaggacaaggacacactcagcattcactacctcatgctgccccgtgttcgagaagaattgattgacaagaaaacagagagtgcagtatctcagatgcagtctgtgattgaacttggaagagtgatcagagaccgaaaaactattcccataaagtatcctttgaaagaaattgtggttatccatcaagatccagaagctcttaaagatatcaagtctttggagaagtatatcattgaggaactcaatgttcgaaaagttacactgtctacagataaaaacaagtatggcattcggctaagggcagaaccagatcacatggtcctggggaagcgtctgaagggagcctttaaggcagtgatgacgtccatcaagcagttgagcagtgaggagctggagcagttccagaagactgggaccattgttgtggaaggccatgaattgcacgatgaagacatccgcctcatgtacacctttgatcaggccacaggtgggactgcgcaatttgaagcacactcagatgctcaggctttggtcctcttagatgtcactcctgaccagtcaatggtagatgaaggaatggctcgggaagtcatcaatcgcatacagaaacttcgcaaaaagtgcaatctggttccaactgatgaaatcacagtgtactataaagcaaagtctgaaggaacatatctgaatagtgttattgaaagccacacagagttcatatttaccaccataaaggctcccttgaaaccatatccagtttctccatcggataaagtccttattcaagaaaaaacacagttgaagggatctgaactggaaattacactcaccagaggatcttcccttcctggtcctgcttgtgcatatgtcaatcttaacatttgtgcaaatggcagtgaacaaggtggagtattgctcctggaaaatccaaaaggtgacaataggttggaccttttaaagctgaagagtgttgtcactagcatttttggtgtgaaaaatacagagctggctgtcttccatgatgaaacagaaatacaaaaccaaactgacttactgagtcttagtggaaaaacactttgtgtgactgcaggatcggctccctctctgatcaacagttctagtactcttctttgtcagtatatcaacctacagctcctgaatgcaaagccacaagagtgtttaatggggacagtgggcactctcctgcttgaaaacccacttgggcagaatggactcacccaccaaggtcttctgtatgaagcagccaaggtgtttggccttcggagcaggaagctaaagctgtttctgaatgagacccaaacgcaggaaattacagaagacatccccgtgaagactttgaatatgaagactgtgtatgtttctgtgttaccaacaacagcagacttctagcatgtacttatcaatgttgttcggtcagcccttccctaattacacctatcccctacacatacatgcacatagacacacacatgaacacactgaagatatttccttcaggtgtgtgtaaaatatgctgcttggattgaaattcaaatgggattgattagtcaagtaacttgagacctcacagtaatcttcacacttaaccttagacacctatgcagtcatgttgggagcaggttacaatgttacttcagcccacagtttatttctatacttgagttcttaagtacagaagatagaagtgatttaaatggcatagtatatatatcattttctggccttttaaaatttatttgagacctcttgatgaaatggacatattatatatttctgccacctggattttcctggataatttgatggaatattttaagtttcagtaaatcagaacaataaacaaactcagatataaatgtgttgaaagtaattcattctcccatagataaatgaaacttgaaatgtgtaaactttgaagaacataaaaacttcatggtggtttcttattaagacagtggactagacatctaataaaacttctttccaaaatccca

SEQ ID NO: 1738 - DNA, 4507 bp, Homo sapiens; identical to SEQ ID NO: 1737

SEQ ID NO: 1739 - DNA, 2231 bp, Homo sapiens
ggcgccaggacgtgggcgtgcaggacgccagagctgggtcagagctcgagccagcggcgcccggagagattcggagatgcaggcggctcggatggccgcgagcttggggcggcagctgctgaggctcgggggcggaagctcgcggctcacggcgctcctggggcagccccggcccggccctgcccggcggccctatgccgggggtgccgctcagctggctctggacaagtcagattcccacccctctgacgctctgaccaggaaaaaaccggccaaggcggaatctaagtcctttgctgtgggaatgttcaaaggccagctcaccacagatcaggtgttcccatacccgtccgtgctcaacgaagagcagacacagtttcttaaagagctggtggagcctgtgtcccgtttcttcgaggaagtgaacgatcccgccaagaatgacgctctggagatggtggaggagaccacttggcagggcctcaaggagctgggggcctttggtctgcaagtgcccagtgagctgggtggtgtgggcctttgcaacacccagtacgcccgtttggtggagatcgtgggcatgcatgaccttggcgtgggcattaccctgggggcccatcagagcatcggtttcaaaggcatcctgctctttggcacaaaggcccagaaagaaaaatacctccccaagctggcatctggggagactgtggccgctttctgtctaaccgagccctcaagcgggtcagatgcagcctccatccgaacctctgctgtgcccagcccctgtggaaaatactataccctcaatggaagcaagctttggatcagtaatgggggcctagcagacatcttcacggtctttgccaagacaccagttacagatccagccacaggagccgtgaaggagaagatcacagcttttgtggtggagaggggcttcgggggcattacccatgggccccctgagaagaagatgggcatcaaggcttcaaacacagcagaggtgttctttgatggagtacgggtgccatcggagaacgtgctgggtgaggttgggagtggcttcaaggttgccatgcacatcctcaacaatggaaggtttggcatggctgcggccctggcaggtaccatgagaggcatcattgctaaggcggtagatcatgccactaatcgtacccagtttggggagaaaattcacaactttgggctgatccaggagaagctggcacggatggttatgctgcagtatgtaactgagtccatggcttacatggtgagtgctaacatggaccagggagccacggacttccagatagaggccgccatcagcaaaatctttggctcggaggcagcctggaaggtgacagatgaatgcatccaaatcatggggggtatgggcttcatgaaggaacctggagtagagcgtgtgctccgagatcttcgcatcttccggatctttgaggggacaaatgacattcttcggctgtttgtggctctgcagggctgtatggacaaaggaaaggagctctctgggcttggcagtgctctaaagaatccctttgggaatgctggcctcctgctaggagaggcaggcaaacagctgaggcggcgggcagggctgggcagcggcctgagtctcagcggacttgtccacccggagttgagtcggagtggcgagctggcagtacgggctctggagcagtttgccactgtggtggaggccaagctgataaaacacaagaaggggattgtcaatgaacagtttctgctgcagcggctggcagacggggccatcgacctctatgccatggtggtggttctctcgagggcctcaagatccctgagtgagggccaccccacggcccagcatgagaaaatgctctgtgacacctggtgtatcgaggctgcagctcggatccgagagggcatggccgccctgcagtctgacccctggcagcaagagctctaccgcaacttcaaaagcatctccaaggccttggtggagcggggtggtgtggtcaccagcaacccacttggcttctgaatactcccggccagggcctgtcccagttatgtgccttccctcaagccaaagccgaagcccctttccttaaggccctggtttgtcccgaaggggcctagtgttcccagcactgtgcctgctctcaagagcacttactgcctcgcaaataataaaaatttctagccagtcaaacaaaaaaaaaaaaaaa

SEQ ID NO: 1740 - DNA, 2238 bp, Homo sapiens
gggctccagggaactacagctcccagcatgccccggggcccgcaaccgtccgccgcccggtgcactgtggacgatgagtcagggttaggggcgccaggacgtgggcgtgcaggacgccagagctgggtcagagctcgagccagcggcgcccggagagattcggagatgcaggcggctcggatggccgcgagcttggggcggcagctgctgaggctcgggggcggaagctcgcggctcacggcgctcctggggcagccccggcccggccctgcccggcggccctatgccgggggtgccgctcaggaatctaagtcctttgctgtgggaatgttcaaaggccagctcaccacagatcaggtgttcccatacccgtccgtgctcaacgaagagcagacacagtttcttaaagagctggtggagcctgtgtcccgtttcttcgaggaagtgaacgatcccgccaagaatgacgctctggagatggtggaggagaccacttggcagggcctcaaggagctgggggcctttggtctgcaagtgcccagtgagctgggtggtgtgggcctttgcaacacccagtacgcccgtttggtggagatcgtgggcatgcatgaccttggcgtgggcattaccctgggggcccatcagagcatcggtttcaaaggcatcctgctctttggcacaaaggcccagaaagaaaaatacctccccaagctggcatctggggagactgtggccgctttctgtctaaccgagccctcaagcgggtcagatgcagcctccatccgaacctctgctgtgcccagcccctgtggaaaatactataccctcaatggaagcaagctttggatcagtaatgggggcctagcagacatcttcacggtctttgccaagacaccagttacagatccagccacaggagccgtgaaggagaagatcacagcttttgtggtggagaggggcttcgggggcattacccatgggccccctgagaagaagatgggcatcaaggcttcaaacacagcagaggtgttctttgatggagtacgggtgccatcggagaacgtgctgggtgaggttgggagtggcttcaaggttgccatgcacatcctcaacaatggaaggtttggcatggctgcggccctggcaggtaccatgagaggcatcattgctaaggcggtagatcatgccactaatcgtacccagtttggggagaaaattcacaactttgggctgatccaggagaagctggcacggatggttatgctgcagtatgtaactgagtccatggcttacatggtgagtgctaacatggaccagggagccacggacttccagatagaggccgccatcagcaaaatctttggctcggaggcagcctggaaggtgacagatgaatgcatccaaatcatggggggtatgggcttcatgaaggaacctggagtagagcgtgtgctccgagatcttcgcatcttccggatctttgaggggacaaatgacattcttcggctgtttgtggctctgcagggctgtatggacaaaggaaaggagctctctgggcttggcagtgctctaaagaatccctttgggaatgctggcctcctgctaggagaggcaggcaaacagctgaggcggcgggcagggctgggcagcggcctgagtctcagcggacttgtccacccggagttgagtcggagtggcgagctggcagtacgggctctggagcagtttgccactgtggtggaggccaagctgataaaacacaagaaggggattgtcaatgaacagtttctgctgcagcggctggcagacggggccatcgacctctatgccatggtggtggttctctcgagggcctcaagatccctgagtgagggccaccccacggcccagcatgagaaaatgctctgtgacacctggtgtatcgaggctgcagctcggatccgagagggcatggccgccctgcagtctgacccctggcagcaagagctctaccgcaacttcaaaagcatctccaaggccttggtggagcggggtggtgtggtcaccagcaacccacttggcttctgaatactcccggccagggcctgtcccagttatgtgccttccctcaagccaaagccgaagcccctttccttaaggccctggtttgtcccgaaggggcctagtgttcccagcactgtgcctgctctcaagagcacttactgcctcgcaaataataaaaatttctagccagtcatg

SEQ ID NO: 1741 - DNA, 2984 bp, Homo sapiens
gcgccccagtcgacgctgagctcctctgctactcagagttgcaacctcagcctcgctatggctcccagcagcccccggcccgcgctgcccgcactcctggtcctgctcggggctctgttcccaggacctggcaatgcccagacatctgtgtccccctcaaaagtcatcctgccccggggaggctccgtgctggtgacatgcagcacctcctgtgaccagcccaagttgttgggcatagagaccccgttgcctaaaaaggagttgctcctgcctgggaacaaccggaaggtgtatgaactgagcaatgtgcaagaagatagccaaccaatgtgctattcaaactgccctgatgggcagtcaacagctaaaaccttcctcaccgtgtactggactccagaacgggtggaactggcacccctcccctcttggcagccagtgggcaagaaccttaccctacgctgccaggtggagggtggggcaccccgggccaacctcaccgtggtgctgctccgtggggagaaggagctgaaacgggagccagctgtgggggagcccgctgaggtcacgaccacggtgctggtgaggagagatcaccatggagccaatttctcgtgccgcactgaactggacctgcggccccaagggctggagctgtttgagaacacctcggccccctaccagctccagacctttgtcctgccagcgactcccccacaacttgtcagcccccgggtcctagaggtggacacgcaggggaccgtggtctgttccctggacgggctgttcccagtctcggaggcccaggtccacctggcactgggggaccagaggttgaaccccacagtcacctatggcaacgactccttctcggccaaggcctcagtcagtgtgaccgcagaggacgagggcacccagcggctgacgtgtgcagtaatactggggaaccagagccaggagacactgcagacagtgaccatctacagctttccggcgcccaacgtgattctgacgaagccagaggtctcagaagggaccgaggtgacagtgaagtgtgaggcccaccctagagccaaggtgacgctgaatggggttccagcccagccactgggcccgagggcccagctcctgctgaaggccaccccagaggacaacgggcgcagcttctcctgctctgcaaccctggaggtggccggccagcttatacacaagaaccagacccgggagcttcgtgtcctgtatggcccccgactggacgagagggattgtccgggaaactggacgtggccagaaaattcccagcagactccaatgtgccaggcttgggggaacccattgcccgagctcaagtgtctaaaggatggcactttcccactgcccatcggggaatcagtgactgtcactcgagatcttgagggcacctacctctgtcgggccaggagcactcaaggggaggtcacccgcaaggtgaccgtgaatgtgctctccccccggtatgagattgtcatcatcactgtggtagcagccgcagtcataatgggcactgcaggcctcagcacgtacctctataaccgccagcggaagatcaagaaatacagactacaacaggcccaaaaagggacccccatgaaaccgaacacacaagccacgcctccctgaacctatcccgggacagggcctcttcctcggccttcccatattggtggcagtggtgccacactgaacagagtggaagacatatgccatgcagctacacctaccggccctgggacgccggaggacagggcattgtcctcagtcagatacaacagcatttggggccatggtacctgcacacctaaaacactaggccacgcatctgatctgtagtcacatgactaagccaagaggaaggagcaagactcaagacatgattgatggatgttaaagtctagcctgatgagaggggaagtggtgggggagacatagccccaccatgaggacatacaactgggaaatactgaaacttgctgcctattgggtatgctgaggccccacagacttacagaagaagtggccctccatagacatgtgtagcatcaaaacacaaaggcccacacttcctgacggatgccagcttgggcactgctgtctactgaccccaacccttgatgatatgtatttattcatttgttattttaccagctatttattgagtgtcttttatgtaggctaaatgaacataggtctctggcctcacggagctcccagtcctaatcacattcaaggtcaccaggtacagttgtacaggttgtacactgcaggagagtgcctggcaaaaagatcaaatggggctgggacttctcattggccaacctgcctttccccagaaggagtgatttttctatcggcacaaaagcactatatggactggtaatggttacaggttcagagattacccagtgaggccttattcctcccttccccccaaaactgacacctttgttagccacctccccacccacatacatttctgccagtgttcacaatgacactcagcggtcatgtctggacatgagtgcccagggaatatgcccaagctatgccttgtcctcttgtcctgtttgcatttcactgggagcttgcactatgcagctccagtttcctgcagtgatcagggtcctgcaagcagtggggaagggggccaaggtattggaggactccctcccagctttggaagcctcatccgcgtgtgtgtgtgtgtgtatgtgtagacaagctctcgctctgtcacccaggctggagtgcagtggtgcaatcatggttcactgcagtcttgaccttttgggctcaagtgatcctcccacctcagcctcctgagtagctgggaccataggctcacaacaccacacctggcaaatttgatttttttttttttttcagagacggggtctcgcaacattgcccagacttcctttgtgttagttaataaagctttctcaactgcc

SEQ ID NO: 1742 - DNA, 2613 bp, Homo sapiens
acatcgggaagccggaattacttgcagggctaacctagtgcctatagctaaggcaggtacctgcatccttgtttttgtttagtggatcctctatccttcagagactctggaacccctgtggtcttctcttcatctaatgaccctgaggggatggagttttcaagtccttccagagaggaatgtcccaagcctttgagtagggtaagcatcatggctggcagcctcacaggattgcttctacttcaggcagtgtcgtgggcatcaggtgcccgcccctgcatccctaaaagcttcggctacagctcggtggtgtgtgtctgcaatgccacatactgtgactcctttgaccccccgacctttcctgcccttggtaccttcagccgctatgagagtacacgcagtgggcgacggatggagctgagtatggggcccatccaggctaatcacacgggcacaggcctgctactgaccctgcagccagaacagaagttccagaaagtgaagggatttggaggggccatgacagatgctgctgctctcaacatccttgccctgtcaccccctgcccaaaatttgctacttaaatcgtacttctctgaagaaggaatcggatataacatcatccgggtacccatggccagctgtgacttctccatccgcacctacacctatgcagacacccctgatgatttccagttgcacaacttcagcctcccagaggaagataccaagctcaagatacccctgattcaccgagccctgcagttggcccagcgtcccgtttcactccttgccagcccctggacatcacccacttggctcaagaccaatggagcggtgaatgggaaggggtcactcaagggacagcccggagacatctaccaccagacctgggccagatactttgtgaagttcctggatgcctatgctgagcacaagttacagttctgggcagtgacagctgaaaatgagccttctgctgggctgttgagtggataccccttccagtgcctgggcttcacccctgaacatcagcgagacttcattgcccgtgacctaggtcctaccctcgccaacagtactcaccacaatgtccgcctactcatgctggatgaccaacgcttgctgctgccccactgggcaaaggtggtactgacagacccagaagcagctaaatatgttcatggcattgctgtacattggtacctggactttctggctccagccaaagccaccctaggggagacacaccgcctgttccccaacaccatgctctttgcctcagaggcctgtgtgggctccaagttctgggagcagagtgtgcggctaggctcctgggatcgagggatgcagtacagccacagcatcatcacgaacctcctgtaccatgtggtcggctggaccgactggaaccttgccctgaaccccgaaggaggacccaattgggtgcgtaactttgtcgacagtcccatcattgtagacatcaccaaggacacgttttacaaacagcccatgttctaccaccttggccacttcagcaagttcattcctgagggctcccagagagtggggctggttgccagtcagaagaacgacccggacgcagtggcactgatgcatcccgatggctctcctgttgtggtcgtcctaaaccgctcctctaaggatgtgcctcttaccatcaaggatcctgctgtgggcttcctggagacaatctcacctggctactccattcacacctacctgtggcgtcgccagtgatggagcagatactcaaggaggcactgggctcagcctgggcattaaagggacagagtcagctcacacgctgtctgtgactaaagagggcacaacagggccagtgtgagcttacagcgacgtaagcccaggggcaatggtttgggtgactcactttcccctctaggtggtgccaggggctggaggcccctagaaaaagatcagtaagccccagtgtccccccagcccccatgcttatgtgaacatgcgctgtgtgctgcttgctttggaaactgggcctgggtccaggcctagggtgagctcactgtccgtacaaacacaagatcagggctgagggtaaggaaaagaagagactaggaaagctgggcccaaaactggagactgtttgtctttcctggagatgcagaactgggcccgtggagcagcagtgtcagcatcagggcggaagccttaaagcagcagcgggtgtgcccaggcacccagatgattcctatggcaccagccaggaaaaatggcagctcttaaaggagaaaatgtttgagcccagtcagtgtgagtggctttattctgggtggcagcaccccgtgtccggctgtaccaacaacgaggaggcacgggggcctctggaatgcatgagagtagaaaaaccagtcttgggagcgtgaggacaaatcattcctcttcatcctcctcagccatgcccagggtccgggtgcctggggcccgagcaggcgttgcccgctggatggagacaatgccgctgagcaaggcgtagcccaccatggctgccagtcctgccagcacagataggatctggttccggcgccggtatggctcctcctcagtctctgggcc

SEQ ID NO: 1743 - DNA, 2413 bp, Homo sapiens
cttttccaatccaggtcccgccccgactccccagggctgcttttctcgcggctgcgggtggtcgggctgcatcctgccttcagagtcttactgcgcggggccccagtctccagtcccgcccaggcgcctttgcaggctgcggtgggatttcgttttgcctccggttggggctgctgtttctcttcgccgacgagactctggaacccctgtggtcttctcttcatctaatgaccctgaggggatggagttttcaagtccttccagagaggaatgtcccaagcctttgagtagggtaagcatcatggctggcagcctcacaggattgcttctacttcaggcagtgtcgtgggcatcaggtgcccgcccctgcatccctaaaagcttcggctacagctcggtggtgtgtgtctgcaatgccacatactgtgactcctttgaccccccgacctttcctgcccttggtaccttcagccgctatgagagtacacgcagtgggcgacggatggagctgagtatggggcccatccaggctaatcacacgggcacaggcctgctactgaccctgcagccagaacagaagttccagaaagtgaagggatttggaggggccatgacagatgctgctgctctcaacatccttgccctgtcaccccctgcccaaaatttgctacttaaatcgtacttctctgaagaaggaatcggatataacatcatccgggtacccatggccagctgtgacttctccatccgcacctacacctatgcagacacccctgatgatttccagttgcacaacttcagcctcccagaggaagataccaagctcaagatacccctgattcaccgagccctgcagttggcccagcgtcccgtttcactccttgccagcccctggacatcacccacttggctcaagaccaatggagcggtgaatgggaaggggtcactcaagggacagcccggagacatctaccaccagacctgggccagatactttgtgaagttcctggatgcctatgctgagcacaagttacagttctgggcagtgacagctgaaaatgagccttctgctgggctgttgagtggataccccttccagtgcctgggcttcacccctgaacatcagcgagacttcattgcccgtgacctaggtcctaccctcgccaacagtactcaccacaatgtccgcctactcatgctggatgaccaacgcttgctgctgccccactgggcaaaggtggtactgacagacccagaagcagctaaatatgttcatggcattgctgtacattggtacctggactttctggctccagccaaagccaccctaggggagacacaccgcctgttccccaacaccatgctctttgcctcagaggcctgtgtgggctccaagttctgggagcagagtgtgcggctaggctcctgggatcgagggatgcagtacagccacagcatcatcacgaacctcctgtaccatgtggtcggctggaccgactggaaccttgccctgaaccccgaaggaggacccaattgggtgcgtaactttgtcgacagtcccatcattgtagacatcaccaaggacacgttttacaaacagcccatgttctaccaccttggccacttcagcaagttcattcctgagggctcccagagagtggggctggttgccagtcagaagaacgacctggacgcagtggcactgatgcatcccgatggctctgctgttgtggtcgtgctaaaccgctcctctaaggatgtgcctcttaccatcaaggatcctgctgtgggcttcctggagacaatctcacctggctactccattcacacctacctgtggcgtcgccagtgatggagcagatactcaaggaggcactgggctcagcctgggcattaaagggacagagtcagctcacacgctgtctgtgactaaagagggcacagcagggccagtgtgagcttacagcgacgtaagcccaggggcaatggtttgggtgactcactttcccctctaggtggtgccaggggctggaggcccctagaaaaagatcagtaagccccagtgtccccccagcccccatgcttatgtgaacatgcgctgtgtgctgcttgctttggaaactgggcctgggtccaggcctagggtgagctcactgtccgtacaaacacaagatcagggctgagggtaaggaaaagaagagactaggaaagctgggcccaaaactggagactgtttgtctttcctggagatgcagaactgggcccgtggagcagcagtgtcagcatcagggcggaagccttaaagcagcagcgggtgtgcccaggcacccagatgattcctatggcaccagccaggaaaaatggcagctcttaaaggagaaaatgtttgagcccaaaaaaaaaaaaaaaaaaa

SEQ ID NO: 1744 - DNA, 2613 bp, Homo sapiens; identical to SEQ ID NO: 1742

SEQ ID NO: 1745 - DNA, 2613 bp, Homo sapiens; identical to SEQ ID NO: 1742

SEQ ID NO: 1746 - DNA, 2613 bp, Homo sapiens; identical to SEQ ID NO: 1742

SEQ ID NO: 1747 - DNA, 2728 bp, Homo sapiens
accgagacctggcggaccccgttgctagagcggcagattgcggctcaagcgtctgagaaaatctaggctggggtcgagagtccgcaacagtggcacctggagccagacccaccgctttctggtgtcgcgcctttcaacccgggggggtaggaagctttctgttgctccgcataactgtggtcagctaatagctgctgcctttccgagacagttgtcttatggagttgcttggagaacgtaaaataagaggcctaagcaatgcgtctgatgtacacctgtcgtggaataactgttcccgctcattcggccgctgtacctctgctccctcattcggagcgtagctgggtatgaatgaaattccgggcttgtagcacagagaaaacttctctcccacaattggttggtgctggggaggaagctcctgattggtggaaagtccgaggaagtgggcaagccggagggatttcgtgtacctcaggtgccctcactctgaccggccccctatcattacgtaattttctacgactcgcggtagctcaggcagagcgggttcctgcagcggcgcgaccctctgacgtctccgcttctaattggtcaagagctgcgactgcagttctgaagcctaactggttgcccgtgccgcctcggaggtgaagtgtactgcgctgattggcttccaggcgccggccgcgtgtgatgtcccgggcaacgattggctctcgcctaccgggggcttctctcaccgggactcgggactcccgggaagtggaccggcagaagagggggctagctagctgtctctgcggaccaaggagacccccgcgcccccccggtgtgaggcggcctcacagggccgggtgggctggcgagccgacgcggcggcggaggaggctgtgaggagtgtgtggaacaggacccgggacagaggaaccatggctccgcagaacctgagcaccttttgcctgttgctgctatacctcatcggggcggtgattgccggacgagatttctataagatcttgggggtgcctcgaagtgcctctataaaggatattaaaaaggcctataggaaactagccctgcagcttcatcccgaccggaaccctgatgatccacaagcccaggagaaattccaggatctgggtgctgcttatgaggttctgtcagatagtgagaaacggaaacagtacgatacttatggtgaagaaggattaaaagatggtcatcagagctcccatggagacattttttcacacttctttggggattttggtttcatgtttggaggaacccctcgtcagcaagacagaaatattccaagaggaagtgatattattgtagatctagaagtcactttggaagaagtatatgcaggaaattttgtggaagtagttagaaacaaacctgtggcaaggcaggctcctggcaaacggaagtgcaattgtcggcaagagatgcggaccacccagctgggccctgggcgcttccaaatgacccaggaggtggtctgcgacgaatgccctaatgtcaaactagtgaatgaagaacgaacgctggaagtagaaatagagcctggggtgagagacggcatggagtacccctttattggagaaggtgagcctcacgtggatggggagcctggagatttacggttccgaatcaaagttgtcaagcacccaatatttgaaaggagaggagatgatttgtacacaaatgtgacaatctcattagttgagtcactggttggctttgagatggatattactcacttggatggtcacaaggtacatatttcccgggataagatcaccaggccaggagcgaagctatggaagaaaggggaagggctccccaactttgacaacaacaatatcaagggctctttgataatcacttttgatgtggattttccaaaagaacagttaacagaggaagcgagagaaggtatcaaacagctactgaaacaagggtcagtgcagaaggtatacaatggactgcaaggatattgagagtgaataaaattggactttgtttaaaataagtgaataagcgatatttattatctgcaaggtttttttgtgtgtgtttttgtttttattttcaatatgcaagttaggcttaatttttttatctaatgatcatcatgaaatgaataagagggcttaagaatttgtccatttgcattcggaaaagaatgaccagcaaaaggtttactaatacctctccctttggggatttaatgtctggtgctgccgcctgagtttcaagaattaaagctgcaagaggactccaggagcaaaagaaacacaatatagagggttggagttgttagcaatttcattcaaaatgccaactggagaagtctgtttttaaatacattttgttgttatttttttcatgactcctgtttcttctgtgagctatttgggttgtcctcccatcaagcaagatggatgcacacgcatgcaaaagagtgatatagatccagtccccatgcccaattacacatacggcatctgctagaaaggagcttggaagaaactgaatggttgattggggtccatgaatgaaggttacacaaagatctaattgtccttgaagtatattttctctcatttaatttgggaataataatctgatatggacactttactgtttagaaagcacctttcatgtatataatttcagttgacctcatggttagaaagcctttggtttgtttaggaac

SEQ ID NO: 1748 - DNA, 1017 bp, Homo sapiens
ggctcccactccatgaggtatttccacacctccgtgtcccggcccggccgcggggagccccgcttcatcaccgtgggctacgtggacgacacgctgttcgtgaggttcgacagcgacgccgcgagtccgagagaggagccgcgggcgccgtggatagagcaggaggggccggagtattgggaccgggagacacagatctgcaaggccaaggcacagactgaccgagaggacctgcggaccctgctccgctactacaaccagagcgaggccgggtctcacaccctccagagcatgtacggctgcgacgtggggccggacgggcgcctcctccgcgggcataaccagtacgcctacgacggcaaggattacatcgccctgaacgaggacctgcgctcctggaccgccgcggacacggcggctcagatcacccagcgcaagtgggaggcggcccgtgtggcggagcagctgagagcctacctggagggcgagtgcgtggagtggctccgcagatacctggagaacgggaaggagacgctgcagcgcgcggaccccccaaagacacacgtgacccaccaccccatctctgaccatgaggccaccctgaggtgctgggccctgggcttctaccctgcggagatcacactgacctggcagcgggatggcgaggaccaaactcaggacactgagcttgtggagaccagaccagcaggagatagaaccttccagaagtgggcagctgtggtggtgccttctggagaagagcagagatacacatgccatgtacagcatgaggggctgccgaagcccctcaccctgagatgggagccgtcttcccagtccaccgtccccatcgtgggcattgttgctggcctggctgtcctagcagttgtggtcatcggagctgtggtcgctgctgtgatgtgtaggaggaagagctcaggtggaaaaggagggagctactctcaggctgcgtgcagcgacagtgcccagggctctgatgtgtctctcacagcttga

SEQ ID NO: 1749 - DNA, 1500 bp, Homo sapiens
acggcgccccgaaccctcctcctgctgctctggggggcagtggccctgaccgagacctgggccggctcccactccatgaggtatttctacaccgccatgtcccggcccggccgcggggagccccgcttcatcaccgtgggctacgtggacgacacgctgttcgtgaggttcgacagcgacgccacgagtccgaggaaggagccgcgggcgccatggatagagcaggaggggccggagtattgggaccgggagacacagatctccaagaccaacacacagacttaccgagagaacctgcgcaccgctgcccgctactacaaccagagcgaggccgggtctcacatcatccagaggatgtacggctgcgacgtggggccggacgggcgcctcctccgcgggtatgaccaggacgcctacgacggcaaggattacatcgccctgaacgaggacctgagctcctggaccgcggcggacaccgccgctcagatcacccagcgcaagtgggaggcggcccgtgtggcggagcaggacagagcctacctggagggcctgtgcgtggagtcgctccgcagatacctggagaacgggaaggagacgctgcagcgcgcggaccccccaaagacacatgtgacccaccaccccatctctgaccatgaggccaccctgaggtgctggtccctgggcttctaccctgcggagatcacactgacctggcagcgggatggcgaggaccaaactcaggacaccgagcttgtggagaccagaccagcaggagatagaaccttccagaagtgggcagctgtggtggtgccttctggagaagagcagagatacacatgccatgtacagcatgaggggctgccgaagcccctcaccctgagatgggagccgtcttcccagtccaccgtccccatcgtgggcattgttgctggcctggctgtcctagcagttgtggtcatcggagctgtggtcgctgctgtgatgtgtaggaggaagagctcaggtggaaaaggagggagctactctcaggctgcgtgcagcgacagtgcccagggctctgatgtgtctctcacagcttgaaaagcctgagacagctgtcttgtgagggactgagatgcaggatttcttcacgcctcccctttgtgacttcaagagcctctggctctctttctgcaaaggcacctgaatgtgtctgcgtccctgttagcataatgtgaggaggtggagagacagcccacccccgtgtccaccgtgacccctgttcccatgctgacttgtgtttcctccccagtcatctttcctgttccagagaggtggggctggatgtctccatctctgtctcaattttatgtgcactgagctgcaacttcttacttccctactgaaataagaatctgaatataaatttgttttctcaaatatttgctatgagaggttgatggattaattaaataagtcaattcctggaatttgagagagcaaataaagacctgagaacct

SEQ ID NO: 1750 - DNA, 1089 bp, Homo sapiens
atgcgggtcacggcgccccgaaccgtcctcctgctgctctggggggcagtggccctgaccgagacctgggccggctcccactccatgaggtatttctacaccgccatgtcccggcccggccgcggggagccccgcttcatcgcagtgggctacgtggacgacacccagttcgtgaggttcgacagcgacgccgcgagtccgaggacggagccccgggcgccatggatagagcaggaggggccggagtattgggaccggaacacacagatcttcaagaccaacacacagacttaccgagagaacctgcggatcgcgctccgctactacaaccagagcgaggccgggtctcacatcatccagaggatgtatggctgcgacctggggcccgacgggcgcctcctccgcgggcatgaccagtccgcctacgacggcaaggattacatcgccctgaacgaggacctgagctcctggaccgcggcggacaccgcggctcagatcacccagcgcaagtgggaggcggcccgtgtggcggagcagctgagagcctacctggagggcctgtgcgtggagtggctccgcagatacctggagaacgggaaggagacgctgcagcgcgcggaccccccaaagacacacgtgacccaccaccccgtctctgaccatgaggccaccctgaggtgctgggccctgggcttctaccctgcggagatcacactgacctggcagcgggatggcgaggaccaaactcaggacactgagcttgtggagaccagaccagcaggagatagaaccttccagaagtgggcagctgtggtggtgccttctggagaagagcagagatacacatgccatgtacagcatgaggggctgccgaagcccctcaccctgagatgggagccatcttcccagtccaccatccccatcgtgggcattgttgctggcctggctgtcctagcagttgtggtcatcggagctgtggtcgctactgtgatgtgtaggaggaagagctcaggtggaaaaggagggagctactctcaggctgcgtccagcgacagtgcccagggctctgatgtgtctctcacagcttga

SEQ ID NO: 1751 - DNA, 1089 bp, Homo sapiens
atgcgggtcacggcaccccgaaccctcctcctgctgctctggggggccctggccctgaccgagacctgggccggctcccactccatgaggtatttctacaccgccatgtcccggcccggccgcggggagccccgcttcatcgcagtgggctacgtggacgacacgcagttcgtgaggttcgacagcgacgccgcgagtccgagagaggagccgcgggcgccgtggatagagcaggaggggccggagtattgggaccggaacacacagatctacaaggcccaggcacagactgaccgagagagcctgcggaacctgcgcggctactacaaccagagcgaggccgggtctcacacttggcagacgatgtatggctgcgacctggggccggacgggcgcctcctccgcgggcataaccagttagcctacgacggcaaggattacatcgccctgaacgaggacctgagctcctggaccgcggcggacaccgcggctcagatcacccagcgcaagtgggaggcggcccgtgtggcggagcagctgagagcctacctggagggcctgtgcgtggagtggctccgcagatacctggagaacgggaaggagacgctgcagcgcgcggaccccccaaagacacacgtgacccaccaccccatctctgaccatgaggccaccctgaggtgctgggccctgggcttctaccctgcggagatcacactgacctggcagcgggatggcgaggaccaaactcaggacactgagcttgtggagaccagaccagcaggagatagaaccttccagaagtgggcagctgtggtggtgccttctggagaagagcagagatacacatgccatgtacagcatgaggggctgccgaagcccctcaccctgagatgggagccatcttcccagtccaccatccccatcgtgggcattgttgctggcctggctgtcctagcagttgtggtcatcggagctgtggtcgctactgtgatgtgtaggaggaagagctcaggtggaaaaggagggagctactctcaggctgcgtccagcgacagtgcccagggctctgatgtgtctctcacagcttga

SEQ ID NO: 1752 - DNA, 1089 bp, Homo sapiens
atgcgggtcacggcaccccgaaccctcctcctgctgctctggggggccctggccctgaccgagacctgggccggctcccactccatgaggtatttctacaccgccatgtcccggcccggccgcggggagccccgcttcatcgcagtgggctacgtggacgacacgcagttcgtgaggttcgacagcgacgccgcgagtccgagagaggagccgcgggcgccgtggatagagcaggaggggccggagtattgggaccggaacacacagatctacaaggcccaggcacagactgaccgagagagcctgcggaacctgcgcggctactacaaccagagcgaggccgggtctcacaccctccagaggatgtacggctgcgacctggggccggacgggcgcctcctccgcgggcataaccagttagcctacgacggcaaggattacatcgccctgaacgaggacctgagctcctggaccgcggcggacaccgcggctcagatcacccagcgcaagtgggaggcggcccgtgtggcggagcagctgagagcctacctggagggcctgtgcgtggagtggctccgcagatacctggagaacgggaaggagacgctgcagcgcgcggaccccccaaagacacacgtgacccaccaccccatctctgaccatgaggccaccctgaggtgctgggccctgggcttctaccctgcggagatcacactgacctggcagcgggatggcgaggaccaaactcaggacactgagcttgtggagaccagaccagcaggagatagaaccttccagaagtgggcagctgtggtggtgccttctggagaagagcagagatacacatgccatgtacagcatgaggggctgccgaagcccctcaccctgagatgggagccatcttcccagtccaccatccccatcgtgggcattgttgctggcctggctgtcctagcagttgtggtcatcggagctgtggtcgctactgtgatgtgtaggaggaagagctcaggtggaaaaggagggagctactctcaggctgcgtccagcgacagtgcccagggctctgatgtgtctctcacagcttga

SEQ ID NO: 1753 - DNA, 1098 bp, Homo sapiens
atgcgggtcacggcgccccgaaccctcctcctgctgctctggggggcagtggccctgaccgagacctgggctggctcccactccatgaggtatttccacacctccgtgtcccggcccggccgcggggagccccgcttcatcaccgtgggctacgtggacgacacgctgttcgtgaggttcgacagcgacgccacgagtccgaggaaggagccgcgggcgccatggatagagcaggaggggccggagtattgggaccgggagacacagatctccaagaccaacacacagacttaccgagagagcctgcggaacctgcgcggctactacaaccagagcgaggccgggtctcacaccctccagagcatgtacggctgcgacgtggggccggacgggcgcctcctccgcgggcatgaccagtccgcctacgacggcaaggattacatcgccctgaacgaggacctgcgctcctggaccgccgcggacacggcggctcagatcacccagcgcaagtgggaggcggcccgtgtggcggagcagctgagagcctacctggagggcgagtgcgtggagtggctccgcagatacctggagaacgggaaggagacgctgcagcgcgcggaccccccaaagacacacgtgacccaccaccccatctctgaccatgaggccaccctgaggtgctgggccctgggcttctaccctgcggagatcacactgacctggcagcgggatggcgaggaccaaactcaggacactgagcttgtggagaccagaccagcaggagatagaaccttccagaagtgggcagctgtggtggtgccttctggagaagagcagagatacacatgccatgtacagcatgaggggctgccgaagcccctcaccctgagatgggagccgtcttcccagtccaccgtccccatcgtgggcattgttgctggcctggctgtcctagcagttgtggtcatcggagctgtggtcgctgctgtgatgtgtaggaggaagagctcaggtggaaaaggagggagctactctcaggctgcgtgcagcgacagtgcccagggctctgatgtgtctctcacagcttgaaagcctgag

SEQ ID NO: 1754 - DNA, 1703 bp, Homo sapiens; identical to SEQ ID NO: 1708

SEQ ID NO: 1755 - DNA, 1089 bp, Homo sapiens
atgcgggtcacggcgccccgaaccctcctcctgctgctctggggggcagtggccctgaccgagacctgggccggctcccactccatgaggtatttctacaccgccatgtcccggcccggccgcggggagccccgcttcatcaccgtgggctacgtggacgacacgctgttcgtgaggttcgacagcgacgccacgagtccgaggaaggagccgcgggcgccatggatagagcaggaggggccggagtattgggaccgggagacacagatctccaagaccaacacacagacttaccgagagaacctgcgcaccgcgctccgctactacaaccagagcgaggccgggtctcacatcatccagaggatgtacggctgcgacgtggggccggacgggcgcctcctccgcgggtatgaccaggacgcctacgacggcaaggattacatcgccctgaacgaggacctgagctcctggaccgcggcggacaccgcggctcagatcacccagcgcaagtgggaggcggcccgtgtggcggagcagctgagagcctacctggagggcctgtgcgtggagtcgctccgcagatacctggagaacgggaaggagacgctgcagcgcgcggaccccccaaagacacatgtgacccaccaccccatctctgaccatgaggtcaccctgaggtgctgggccctgggcttctaccctgcggagatcacactgacctggcagcgggatggcgaggaccaaactcaggacaccgagcttgtggagaccagaccagcaggagatagaaccttccagaagtgggcagctgtggtggtgccttctggagaagagcagagatacacatgccatgtacagcatgaggggctgccgaagcccctcaccctgagatgggagccgtcttcccagtccaccgtccccatcgtgggcattgttgctggcctggctgtcctagcagttgtggtcatcggagctgtggtcgctgctgtgatgtgtaggaggaagagctcaggtggaaaaggagggagctactctcaggctgcgtgcagcgacagtgcccagggctctgatgtgtctctcacagcttga

SEQ ID NO: 1756 - DNA, 1089 bp, Homo sapiens
atgctggtcatggcgccccgaaccgtcctcctgctgctctggggggcagtggccctgaccgagacctgggccggctcccactccatgaggtatttctacacctccgtgtcccggcccggccgcggggagccccgcttcatctcagtgggctacgtggacgacacccagttcgtgaggttcgacagcgacgccgcgagtccgagagaggagccgcgggcgccgtggatagagcaggaggggccggagtattgggaccggaacacacagatctacaaggcccaggcacagactgaccgagagagcctgcggaacctgcgcggctactacaaccagagcgaggccgggtctcacaccctccagagcatgtacggctgcgacgtggggccggacgggcgcctcctccgcgggcataaccagtacgcctacgacggcaaggattacatcgccctgaacgaggacctgcgctcctggaccgccgcggacacggcggctcagatctcccagcgcaagttggaggcggcccgtgtggcggagcagctgagagcctacctggagggcgagtgcgtggagtggctccgcagatacctggagaacgggaaggacaagctggagcgcgctgaccccccaaagacacacgtgacccaccaccccatctctgaccatgaggccaccctgaggtgctgggccctgggtttctaccctgcggagatcacactgacctggcagcgggatggcgaggaccaaactcaggacactgagcttgtggagaccagaccagcaggagatagaaccttccagaagtggacagctgtggtggtgccttctggagaagagcagagatacacatgccatgtacagcatgaggggctgccgaagcccctcaccctgagatgggagccgtcttcccagtccaccgtccccatcgtgggcattgttgctggcctggctgtcctagcagttgtggtcatcggagctgtggtcgctgctgtgatgtgtaggaggaagagttctggtggaaaaggagggagctactctcaggctgcgtgcagcgacagtgcccagggctctgatgtgtctctcacagcttga

SEQ ID NO: 1757 - DNA, 1089 bp, Homo sapiens
atgcgggtcacggcgccccgaaccgtcctcctgctgctctggggggcagtggccctgaccgagacctgggccggctcccactccatgaggtatttctacaccgccatgtcccggcccggccgcggggagccccgcttcattgcagtgggctacgtggacgacacccagttcgtgaggttcgacagcgacgccgcgagtccgaggacggagccccgggcgccatggatagagcaggaggggccggagtattgggaccggaacacacagatcttcaagaccaacacacagactgaccgagagagcctgcggaacctgcgcggctactacaaccagagcgaggccgggtctcacacttggcagacgatgtatggctgcgacgtggggccggacgggcgcctcctccgcgggcataaccagtacgcctacgacggcaaagattacatcgccctgaacgaggacctgagctcctggaccgcggcggacaccgcggctcagatcacccagcgcaagtgggaggcggcccgtgaggcggagcagctgagagcctacctggagggcctgtgcgtggagtggctccgcagacacctggagaacgggaaggagacgctgcagcgcgcggaccccccaaagacacacgtgacccaccaccccgtctctgaccatgaggccaccctgaggtgctgggccctgggcttctaccctgcggagatcacactgacctggcagcgggatggcgaggaccaaactcaggacactgagcttgtggagaccagaccagcaggagatagaaccttccagaagtgggcagctgtggtggtgccttctggagaagagcagagatacacatgccatgtacagcatgaggggctgccgaagcccctcaccctgagatgggagccatcttcccagtccaccatccccatcgtgggcattgttgctggcctggctgtcctagcagttgtggtcatcggagctgtggtcgctactgtgatgtgtaggaggaagagctcaggtggaaaaggagggagctactctcaggctgcgtccagcgacagtgcccagggctctgatgtgtctctcacagcttga

SEQ ID NO: 1758 - DNA, 1089 bp, Homo sapiens
atgcgggtcacggcgccccgaaccctcctcctgctgctctggggggcagtggccctgaccgagacctgggccggctcccactccatgaggtatttctacaccgccatgtcccggcccggccgcggggagccccgcttcatcaccgtgggctacgtggacgacacccagttcgtgaggttcgacagcgacgccacgagtccgaggatggcgccccgggcgccatggatagagcaggaggggccggagtattgggaccgggagacacagatctccaagaccaacacacagacttaccgagagaacctgcgcaccgcgctccgctactacaaccagagcgaggccgggtctcacacttggcagacgatgtatggctgcgacctggggccggacgggcgcctcctccgcgggcataaccagttagcctacgacggcaaggattacatcgccctgaacgaggacctgagctcctggaccgcggcggacaccgcggctcagatcacccagctcaagtgggaggcggcccgtgtggcggagcagctgagagcctacctggagggcgagtgcgtggagtggctccgcagatacctggagaacgggaaggagacgctgcagcgcgcggaccccccaaagacacacgtgacccaccaccccatctctgaccatgaggccaccctgaggtgctgggccctgggcttctaccctgcggagatcacactgacctggcagcgggatggcgaggaccaaactcaggacactgagcttgtggagaccagaccagcaggagatagaaccttccagaagtgggcagctgtggtggtgccttctggagaagagcagagatacacatgccatgtacagcatgaggggctgccgaagcccctcaccctgagatgggagccatcttcccagtccaccgtccccatcgtgggcattgttgctggcctggctgtcctagcagttgtggtcatcggagctgtggtcgctgctgtgatgtgtaggaggaagagctcaggtggaaaaggagggagctactctcaggctgcgtgcagcgacagtgcccagggctctgatgtgtctctcacagcttga

SEQ ID NO: 1759 - DNA, 1093 bp, Homo sapiens
atgcgggtcacggcgccccgaaccgtcctcctgctgctctggggggcagtggccctgaccgagacctgggccggctcccactccatgaggtatttctacaccgccatgtcccggcccggccgcggggagccccgcttcattgcagtgggctacgtggacgacacccagttcgtgaggttcgacagcgacgccgcgagtccgaggacggagccccgggcgccatggatagagcaggaggggccggagtattgggaccggaacacacagatcttcaagaccaacacacagacttaccgagagaacctgcggatcgcgctccgctactacaaccagagcgaggccgggtctcacacttggcagacgatgtatggctgcgacgtggggccggacgggcgcctcctccgcgggcataaccagtacgcctacgacggcaaagattacatcgccctgaacgaggacctgagctcctggaccgcggcggacaccgcggctcagatcacccagcgcaagtgggaggcggcccgtgaggcggagcagctgagagcctacctggagggcctgtgcgtggagtggctccgcagacacctggagaacgggaaggagacgctgcagcgcgcggaccccccaaagacacacgtgacccaccaccccgtctctgaccatgaggccaccctgaggtgctgggccctgggcttctaccctgcggagatcacactgacctggcagcgggatggcgaggaccaaactcaggacactgagcttgtggagaccagaccagcaggagatagaaccttccagaagtgggcagctgtggtggtgccttctggagaagagcagagatacacatgccatgtacagcatgaggggctgccgaagcccctcaccctgagatgggagccatcttcccagtccaccatccccatcgtgggcattgttgctggcctggctgtcctagcagttgtggtcatcggagctgtggtcgctactgtgatgtgtaggaggaagagctcaggtggaaaaggagggagctactctcaggctgcgtccagcgacagtgcccagggctctgatgtgtctctcacagcttgaaaag

SEQ ID NO: 1760 - DNA, 3496 bp, Homo sapiens
  misc_feature (3483)..(3483): n is a, c, g, or t
  misc_feature (3493)..(3493): n is a, c, g, or t
gatacatctcatcccctaacaatgaacagccaattgcttcaaaatgtacccgaatttgatgtgttcgtcctgtatggagctgaatgcgcacagctgctgctwgggctcctctttttgcgagccaatattctgtactagcaaattgacctgtttcgataacttggcgttttaataaagaggacaagtcgcgcccaattggcttttcaatcaattgatgctcgcttaactgctcaatcgctccaccaacaagggcataataaatttttgtcacctttttttctcgtaattcttggtcaattaaagcatgagcaaagccgtgtttcgcaaataacatcagcccagaagtatctcgatctaaacgagtcacgacatgaataacttgattcacgtaattttgacgcttgtaatagcccttaacacgattcgccatcgttcctgaaggatgatactgagcaggtatcgaggcaatgccagcaggcttattaactactaaaaaatgatcatcttcaaacacaatttcaatcggttcatcatctgtyaataatgtctcatgttccgcttcatctggaatcgtcattttaacgacatcgccagtttgtaaaggatagatggcattttgaacggtcccattcacttgaattttaccaccctgaaatttcacctttgctaataacccttttgaaacaccttgttcctttaaaaaatatttcacttgttgtgttgtttctttgtcatatgtccattgaaattccatcgtttaattaatcctcaccaataaaggcatctttcactcgatgccaaaaatgcatgtgccgataagaggcaaaatgaatccgttcgtctgcaattcgatagcagacagaagcgatattttcttgataaatatctaattggtccaccgtgacaaaataatcatcactttcctgtaatttaatctccagccactccgtatgtgcgattacaatcggtgaccccaatgttcgaaagacacgattgtttaaggaggcgatttcggttaactgaaacgcattaatgctaggatgcaaaacagccccaccaatacttttattatacgcagtagagccggttggggtcgaaatcgacaacccatcaccacgaaatcgttcaaacagttcatctttaataaacacatcgcccaccatcgtccggtttcctcgtttaattgttgattcatttaatgctaaaaaatgtttatctggtttcccatctctaaaccgaatccgcacatctaataatggataactcgtacttttttcacgatgaatacacaaactctcaactagttcttttaattcataatcacgccaatctgtatagaaacccaagtgtccggtatgtacacctaagaaacttacttcgtttaacagatgattaaatcgatgaaaagcggaaagaagcgtaccatctccgccgactgaaatcacaagttcaggttgacgattgtctatttgaatttggttttgctctaatagtgttgtcagttgttttgtgacttgtttcgatttttcttccgagttatgaacaatcgccactttcataagcagactcctttactgattttctggtgtttcgtttttaatttgcttatagtattcgttttctagcaatccacggccatgagagaagtaatgttgtgcttcttgaatttcttcacgaatagatgacatttcttcatctaataaataggctgcctctgccgctcgctgaaggcgttctttcatttcttcaggaaagacaccttgatatttataattcaaagaatgttcaatcgttgcccaaaaattcatggagagtgtccgaatttggatttcggccaaaataatcttttccccggtgactaattgcacaggatattccactaccacatggtacgaacgatagccactttcttttttattttcaatgtagtcccgttcttccacaatttttaagtctttacgatttcttaaaagtgcgactacctggtaaatgtcttccacaaattggcacataatccgcaaaccagcaatgtcttgcatttcttcttcaatccgatttaaaggaatatgccgaatagccgtctttgtcaaaatactatctactggtttcacacgtcctgtaacgaattcaattggtatgtgtttatcttgctcccgaaattgtttacgaatacctcgtagttttacttttaattcgctgaccgcctgttcatatggcgctaaaaacagctcccactctcgttccatggtagatccctcaatttccttgaatttcattcactgattattttaccacagtcctccctaaaatagggtgttattcgctatttgatttccaaacgcctttcattagaaaaatttttcacagagaagaccacttttcttgacggaaacctatataatatgtgaaaattggagtgatttaagaaagagagagaaccccatgagtgagcacttagaaattgaatttaaaacattagttagtccgcaagatttcaaacgattaatcgaccattttgctattcaaaaaacggacttttttacgcaaacaaatcattattttgatacggacgattttcaattaaaagcacaacgaatgggcttaagaattcgcgtattagcagatcgtggtgagttaaccttaaaagttcctgcgccagaaggattattagaaatcaatgaccctttatcgcttgagacggcgaaccactttatcaagaggaatcacctccctactgagggggctgtggcgaagaaattacaagaattaggtattgaaatcgcctcgatccatttaattggttcattaaaaacagcacgtgcagaaaaacaaattcctcaaggactacttgcgttagacgaaagttggtataaccaacagcacgattttgaattagagttagaagttactgaagctgaaagcggcaagcaagcgtttcaaacattaatggctgatttgaacattcccattacgcttgcacctaacaagattcaacgcatgatgcggaccactgccccttagtattcgaagcactgacgttctggcacctgtatttgaaaaagcatggcattggaggaagtatgaatggttgaaatttatttgttcgtcaatcctttaggcggcgtctgtttagaaattgaaaaagaaattatacaattgtctgttaacgacaagaagaaaatacaattgcgctttattcctttattaaatatgaaaacgatcaatgaatttttgagtcgtcaacatattccgattaatgacattaaacgacggaatcgaatttttgaagatttatactcagccgctcttgactataaagcagcacagttacaaggccgaaaaaaaggccgacaattgttgattggcttacaaaaagcagtagctgaagacggtctagcttactctcctgagttatcagaagaactacttctagcggctggcggggatattgatatgtatcgtaaagaccgacaatccgatttngtcaaagaanctt

SEQ ID NO: 1761 - DNA, 1098 bp, Homo sapiens
atgcgggtcacggcgccccgaaccgtcctcctgctgctctggggggcagtggccctgaccgagacctgggccggctcccactccatgaggtatttctacaccgccatgtcccggcccggccgcggggagccccgcttcatcgcagtgggctacgtggacgacacccagttcgtgaggttcgacagcgacgccgcgagtccgaggacggagccccgggcgccatggatagagcaggaggggccggagtattgggaccggaacacacagatcttcaagaccaacacacagacttaccgagagagcctgcggaacctgcgcggctactacaaccagagcgaggccgggtctcacaccctccagagcatgtacggctgcgacctggggcccgacgggcgcctcctccgcgggcatgaccagtccgcctacgacggcaaggattacatcgccctgaacgaggacctgagctcctggaccgcggcggacaccgcggctcagatcacccagcgcaagtgggaggcggcccgtgtggcggagcagctgagagcctacctggagggcctgtgcgtggagtggctccgcagatacctggagaacgggaaggagacgctgcagcgcgcggaccccccaaagacacacgtgacccaccaccccgtctctgaccatgaggccaccctgaggtgctgggccctgggcttctaccctgcggagatcacactgacctggcagcgggatggcgaggaccaaactcaggacactgagcttgtggagaccagaccagcaggagatagaaccttccagaagtgggcagctgtggtggtgccttctggagaagagcagagatacacatgccatgtacagcatgaggggctgccgaagcccctcaccctgagatgggagccatcttcccagtccaccatccccatcgtgggcattgttgctggcctggctgtcctagcagttgtggtcatcggagctgtggtcgctactgtgatgtgtaggaggaagagctcaggtggaaaaggagggagctactctcaggctgcgtccagcgacagtgcccagggctctgatgtgtctctcacagcttgaaagcctgag

SEQ ID NO: 1762 - DNA, 1436 bp, Homo sapiens
cgaggatggccgtcatggcgccccgaaccctcgtcctgctactctcgggggccctggccctgacccagacctgggcgggctcccactccatgaggtatttctacacctccgtgtcccggcccggccgcggggagccccgcttcatcgccgtgggctacgtggacgacacgcagttcgtgcggttcgacagcgacgccgcgagccagaggatggagccgcgggcgccgtggatagagcaggaggggccggagtattgggaccggaacacacggaatgtgaaggcccactcacagactgaccgagagagcctgcggatcgcgctccgctactacaaccagagcgaggacggttctcacaccatccagaggatgtatggctgcgacgtggggccggacgggcgcttcctccgcgggtaccagcaggacgcttacgacggcaaggattacatcgccctgaacgaggacctgcgctcttggaccgcggcggacatggcggctcagatcacccagcgcaagtgggagacggcccatgaggcggagcagtggagagcctacctggagggccggtgcgtggagtggctccgcagatacctggagaacgggaaggagacgctgcagcgcacggacgcccccaagacgcatatgactcaccacgctgtctctgaccatgaggccaccctgaggtgctgggccctgagcttctaccctgcggagatcacactgacctggcagcgggatggggaggaccagacccaggacacggagctcgtggagaccaggcctgcaggggatgggaccttccagaagtgggcgtctgtggtggtgccttctggacaggagcagagatacacctgccatgtgcagcatgagggtctgcccaagcccctcaccctgagatgggagccgtcttcccagcccaccatccccatcgtgggcatcattgctggcctggttctctttggagctgtgatcgctggagctgtggtcgctgctgtgatgtggaggaggaagagctcagatagaaaaggagggagctactctcaggctgcaagcagtgacagtgcccagggctctgatatgtctctcacagcttgtaaagtgtgagacagctgccttgtgtgggactgagaggcaagatttgttcctgcccttccctttgtgacttgaagaaccctgactttgtttctgcaaaggcacctgcatgtgtctgtgttcttgtaggcataatgtgaggaggtggggagaccaccccacccccatgtccaccatgaccctcttcccacgctgacctgtgctccctccccaatcatctttcctgttccagagaggtggggctgaggtgtctccatctctgcctcaacttcatggtgcactgagctgtaactttttccttccctattaaaattagaacctgagtataaaaaaaaaaaaaaaaaa

SEQ ID NO: 1763 - DNA, 1089 bp, Homo sapiens
atgctggtcatggcgccccgaaccgtcctcctgctgctctcggcggccctggccctgaccgagacctgggccggctcccactccatgaggtatttctacacctccgtgtcccggcccggccgcggggagccccgcttcatctcagtgggctacgtggacgacacgcagttcgtgaggttcgacagcgacgccgcgagtccgagagaggagccgcgggcgccgtggatagagcaggaggggccggaatattgggaccggaacacacagatctgcaagaccaacacacagacttaccgagagaacctgcggatcgcgctccgctactacaaccagagcgaggccgggtctcacaccctccagaggatgtacggctgcgacgtggggccggacgggcgcctcctccgcgggcataaccagttcgcctacgacggcaaggattacatcgccctgaacgaggacctgagctcctggaccgcggcggacaccgcggctcagatcacccagcgcaagtgggaggcggcccgtgtggcggagcagctgagaacctacctggagggcacgtgcgtggagtggctccgcagatacctggagaacgggaaggagacgctgcagcgcgcggaccccccaaagacacatgtgacccaccaccccatctctgaccatgaggccaccctgaggtgctgggccctgggcttctaccctgcggagatcacactgacctggcagcgggatggcgaggaccaaactcaggacaccgagcttgtggagaccagaccagcaggagacagaaccttccagaagtgggcagctgtggtggtgccttctggagaagagcagagatacacatgccatgtacagcatgaggggctgccgaagcccctcaccctgagatgggagccatcttcccagtccaccgtccccatcgtgggcattgttgctggcctggctgtcctagcagttgtggtcatcggagctgtggtcgctgctgtgatgtgtaggaggaagagttcaggtggaaaaggagggagctactctcaggctgcgtccagcgacagtgcccagggctctgatgtgtctctcacagcttga

SEQ ID NO: 1764 - DNA, 1089 bp, Homo sapiens
atgcgggtcacggcgccccgaaccctcctcctgctgctctggggggcagtggccctgaccgagacctgggctggctcccactccatgaggtatttccacacctccgtgtcccggcccggccgcggggagccccgcttcatcaccgtgggctacgtggacgacacgctgttcgtgaggttcgacagcgacgccacgagtccgaggaaggagccgcgggcgccatggatagagcaggaggggccggagtattgggaccgggagacacagatctccaagaccaacacacagacttaccgagagagcctgcggaacctgcgcggctactacaaccagagcgaggccgggtctcacaccctccagagcatgtacggctgcgacgtggggccggacgggcgcctcctccgcgggcataaccagtacgcctacgacggcaaggattacatcgccctgaacgaggacctgcgctcctggaccgccgcggacacggcggctcagatcacccagcgcaagtgggaggcggcccgtgtggcggagcagctgagagcctacctggagggcgagtgcgtggagtggctccgcagatacctggagaacgggaaggagacgctgcagcgcgcggaccccccaaagacacacgtgacccaccaccccatctctgaccatgaggccaccctgaggtgctgggccctgggcttctaccctgcggagatcacactgacctggcagcgggatggcgaggaccaaactcaggacactgagcttgtggagaccagaccagcaggagatagaaccttccagaagtgggcagctgtggtggtgccttctggagaagagcagagatacacatgccatgtacagcatgaggggctgccgaagcccctcaccctgagatgggagccgtcttcccagtccaccgtccccatcgtgggcattgttgctggcctggctgtcctagcagttgtggtcatcggagctgtggtcgctgctgtgatgtgtaggaggaagagctcaggtggaaaaggagggagctactctcaggctgcgtgcagcgacagtgcccagggctctgatgtgtctctcacagcttga

SEQ ID NO: 1765 - DNA, 1583 bp, Homo sapiens
atgcaaatagatgggaaaatttattctataataagttttccagttagagattctgtttcaacattgggtgtgatagggattttaatatgctttgatgagtcgttagatattattgaaaatcagttgtattcttctcttaaatttggtagtaaaaattataatttttttatgcttgacagaaattacatgcccattttttcaaaccttaataatcttcaggccaaatctttttctacagcttatagtgagaattttttgagtaaagttatagcttatgctaaaaaagattcttctagctctcagtacacttttaattatgaaagagatttttattctttaaactttgtaaaaaccgatgattttttgactcaggggcttattttaaatgtcaattccattcctattatgtttaaatcaaattgggttatatttgttgcatttttattattgtcttttgcaattattttttatttatgcaatacttttgttttttcattaattaatgattttaacagaattgttgactatcaaaaatcaaaaagcgatccttttagtcttgaatctcccttagaggttaagtattcttcatctattatttcttatattagttcaaagctagataatctgtcttctaagagtaatgaatcttttgagaagataaaattttattctgaagatttgaatgaatatttggaacaaatagaaactgctatatcaaatactgagagtatagattctagcattttagtttacgaacaactaagagatactttttctagatttgaaaaatcaattgttgatattttaaaaggctttgaatctattgctgatccgattaatgatcacaataaatatatatcagaaatctcttcaaattttgaagagagtgttagttttttctatagtatagatatttaaatattgtttttgaaaatgtgaataaaaattttgcagatcttttgtctcaaacaaatagtttgcaaagtgtaaataaacttttagtttcaatttcagctcagaccaatatgcttgctatgaatgcagcaattgaagcagcaaaagcaggtgatgcaggtaaaagttttgcagttgttgctgaggagattagaaagcttgctattaattctggaaaatattctaaaaccattaaagatgaacttaaaacggtcgacagcattattgcagtaattaattcagagattgatacaatttataaaaatttcatagacattcaagataatgtggacaacaatttttcaagacacgagaaagtagatcttactcttgctaagcattttaaagaaattggcgagtttaaagaaaggtatttgtctcacgatactaagatcagagatgctaagaatatgtataaagaaatatttaataatcattattttattagtggcaagtttaacaactttagtcaagatttaaaagagtttaaagtttctaagatgaatttagatgcggtaagttctcttcaagaatattcatctttagtaaagtcttctaaggataagatattaaagacaaaggaattgattcaaaagattaatgatgagattaaagatattcttttttag

SEQ ID NO: 1766 - DNA, 3518 bp, Homo sapiens
ggcttgtttacggcccgactgcgcaggcgtgctcacctggcgtgctccacccgactgggcgtccgcaggctcctcccccgggtgtggcctccgggcggcatggctgcttcccaggtgatgccggcttcagctagtggggtctagttgaccgttccgcagccgccagggccagcggaaagccggtcagggggaaccgcggcggggctggtgtcatgagcctgaggtgaacttgagggtgcctcctcagcggtctcccgccctgccctgaggggcgccgggaccccaaagagcggaggaagagcgccaccccgacggccaccgcttcggagccagcacgcggggtaccctacggggagcgcggatgcccccgtgttcgggcggggacggctccacccctcctgggccctcccttcgggacagggactgtcccgcccagagtgctgaatacccgcgcgaccgtctggatccccgcccaggaagcccctctgaagcctcctcgccgccgtttctgagaagatgcctgaggaaacccagacccaagaccaaccgatggaggaggaggaggttgagacgttcgcctttcaggcagaaattgcccagttgatgtcattgatcatcaatactttctactcgaacaaagagatctttctgagagagctcatttcaaattcatcagatgcattggacaaaatccggtatgaaagcttgacagatcccagtaaattagactctgggaaagagctgcatattaaccttataccgaacaaacaagatcgaactctcactattgtggatactggaattggaatgaccaaggctgacttgatcaataaccttggtactatcgccaagtctgggaccaaagcgttcatggaagctttgcaggctggtgcagatatctctatgattggccagttcggtgttggtttttattctgcttatttggttgctgagaaagtaactgtgatcaccaaacataacgatgatgagcagtacgcttgggagtcctcagcagggggatcattcacagtgaggacagacacaggtgaacctatgggtcgtggaacaaaagttatcctacacctgaaagaagaccaaactgagtacttggaggaacgaagaataaaggagattgtgaagaaacattctcagtttattggatatcccattactctttttgtggagaaggaacgtgataaagaagtaagcgatgatgaggctgaagaaaaggaagacaaagaagaagaaaaagaaaaagaagagaaagagtcggaagacaaacctgaaattgaagatgttggttctgatgaggaagaagaaaagaaggatggtgacaagaagaagaagaagaagattaaggaaaagtacatcgatcaagaagagctcaacaaaacaaagcccatctggaccagaaatcccgacgatattactaatgaggagtacggagaattctataagagcttgaccaatgactgggaagatcacttggcagtgaagcatttttcagttgaaggacagttggaattcagagcccttctatttgtcccacgacgtgctccttttgatctgtttgaaaacagaaagaaaaagaacaacatcaaattgtatgtacgcagagttttcatcatggataactgtgaggagctaatccctgaatatctgaacttcattagaggggtggtagactcggaggatctccctctaaacatatcccgtgagatgttgcaacaaagcaaaattttgaaagttatcaggaagaatttggtcaaaaaatgcttagaactctttactgaactggcggaagataaagagaactacaagaaattctatgagcagttctctaaaaacataaaggttggtgtaactgcctctggtgatgagatggtttctctcaaggactactgcaccagaatgaaggagaaccagaaacatatctattatatcacaggtgagaccaaggaccaggtagctaaggaaacatggcttagaagtgatctatatgattgagcccattgatgagtactgtgtccaacagctgaaggaatttgaggggaagactttagtgtcagtcaccaaagaaggcctggaacttccagaggatgaagaagagaaaaagaagcaggaagagaaaaaaacaaagtttgagaacctctgcaaaatcatgaaagacatattggagaaaaaagttgaaaaggtggttgtgtcaaaccgattggtgacatctccaacagcaaacatggagagaatcatgaaagctcaagccctaagagacaactcaacaatgggttacatggcagcaaagaaacacctggagataaaccctgaccattccattattgagaccttaaggcaaaaggcagaggctgataagaacgacaagtctgtgaaggatctggtcatcttgctttatgaaactgcgctcctgtcttctgggtattgatgaagatgaccctactgctgatgataccagtgctgctgtaactgaagaaatgccaccccttgaaggagatgacgacacatcacgcatggaagaagtagactaatctctggctgagggatgacttacctgttcagtactctacaattcctctgataatatattttcaaggatgtttttctttatttttgttaatattaaaaagtctgtatggcatgacaactactttaaggggaagataagatttctgtctactaagtgatgctgtgataccttaggcactaaagcagagctagtaatgctttttgagtttcatgttggtttattttcacagattggggtaacgtgcactgtaagacgtatgtaacatgatgttaactttgtgtggtctaaagtgtttagctgtcaagccggatgcctaagtagaccaaatcttgttattgaagtgttctgagctgtatcttgatgtttagaaaagtattcgttacatcttgtaggatctactttttgaacttttcattccctgtagttgacaattctgcatgtactagtcctctagaaataggttaaactgaagcaacttgatggaaggatctctccacagggcttgttttccaaagaaaagtattgtttggaggagcaaagttaaaagcctacctaagcatatcgtaaagctgttcaaaaataactcagacccagtcttgtggatggaaatgtagtgctcgagtcacattctgcttaaagttgtaacaaatacagatgagttaaaagatattgtgtgacagtgtcttatttagggggaaaggggagtatctggatgacagttagtgccaaaatgtaaaacatgaggcgctagcaggagatggttaaacactagctgctccaagggttgacatggtcttcccagcatgtactcagcaggtgtggggtggagcacatgtaggcacagaaaacaggaatgcagacaacatgcatcccctgcgtccatgagttacatgtgttctcttagtgtccacgttgttttgatgttattcatggaataccttctgtgctaaatacagtcacttaattccttggcctt

SEQ ID NO: 1767 - DNA, 2990 bp, Homo sapiens
ggaggaggaggggcgccgcgaccgacgcgcgcgagttggtctgggaaaaagggcggtgcgagcgggtgcgcgcgcagcgggccggcagtggcggcggagatggaggagggaggccgggacaaggcgccggtgcagccccagcagtctccagcggcggcccccggcggcacggacgagaagccgagcggcaaggagcggcgggatgccggggacaaggacaaagaacaggagctgtctgaagaggataaacagcttcaagatgaactggagatgctcgtggaacgactaggggagaaggatacatccctgtatcgaccagcgctggaggaattgcgaaggcagattcgttcttctacaacttccatgacttcagtgcccaagcctctcaaatttctgcgtccacactatggcaaactgaaggaaatctatgagaacatggcccctggggagaataagcgttttgctgctgacatcatctccgttttggccatgaccatgagtggggagcgtgagtgcctcaagtatcggctagtgggctcccaggaggaattggcatcatggggtcatgagtatgtcaggcatctggcaggagaagtggctaaggagtggcaggagctggatgacgcagagaaggtccagcgggagcctctgctcactctggtgaaggaaatcgtcccctataacatggcccacaatgcagagcatgaggcttgcgacctgcttatggaaattgagcaggtggacatgctggagaaggacattgatgaaaatgcatatgcaaaggtctgcctttatctcaccagttgtgtgaattacgtgcctgagcctgagaactcagccctactgcgttgtgccctgggtgtgttccgaaagtttagccgcttccctgaagctctgagattggcattgatgctcaatgacatggagttggtagaagacatcttcacctcctgcaaggatgtggtagtacagaaacagatggcattcatgctaggccggcatggggtgttcctggagctgagtgaagatgtcgaggagtatgaggacctgacagagatcatgtccaatgtacagctcaacagcaacttcttggccttagctcgggagctggacatcatggagcccaaggtgcctgatgacatctacaaaacccacctagagaacaacaggtttgggggcagtggctctcaggtggactctgcccgcatgaacctggcctcctcttttgtgaatggctttgtgaatgcagcttttggccaagacaagctgctaacagatgatggcaacaaatggctttacaagaacaaggaccacggaatgttgagtgcagctgcatctcttgggatgattctgctgtgggatgtggatggtggcctcacccagattgacaagtacctgtactcctctgaggactacattaaggttggagctcttcttgcctgtggcatagtgaactctggggtccggaatgagtgtgaccctgctctggcactgctctcagactatgttctccacaacagcaacaccatgagacttggttccatctttgggctaggcttggcttatgctggctcaaatcgtgaagatgtcctaacactgctgctgcctgtgatgggagattcaaagtccagcatggaggtggcaggtgtcacagctttagcctgtggaatgatagcagtagggtcctgcaatggagatgtaacttccactatccttcagaccatcatggagaagtcagagactgagctcaaggatacttatgctcgttggcttcctcttggactgggtctcaaccacctggggaagggtgaggccatcgaggcaatcctggctgcactggaggttgtgtcagagccattccgcagttttgccaacacactggtggatgtgtgtgcatatgcaggctctgggaatgtgctgaaggtgcagcagctgctccacatttgtagcgaacactttgactccaaagagaaggaggaagacaaagacaagaaggaaaagaaagacaaggacaagaaggaagcccctgctgacatgggagcacatcagggagtggctgttctggggattgcccttattgctatgggggaggagattggtgcagagatggcattacgaacctttggccacttgctgagatatggggagcctacactccggagggctgtacctttagcactggccctcatctctgtttcaaatccacgactcaacatcctggataccctaagcaaattctctcatgatgctgatccagaagtttcctataactccatttttgccatgggcatggtgggcagtggtaccaataatgcccgtctggctgcaatgctgcgccagttagctcaatatcatgccaaggacccaaacaacctcttcatggtgcgcttggcacagggcctgacacatttagggaagggcacccttaccctctgcccctaccacagcgaccggcagcttatgagccaggtggccgtggctggactgctcactgtgcttgtctctttcctggatgttcgaaacattattctaggcaaatcacactatgtattgtatgggctggtggctgccatgcagccccgaatgctggttacgtttgatgaggagctgcggccattgccagtgtctgtccgtgtgggccaggcagtggatgtggtgggccaggctggcaagccgaagactatcacagggttccagacgcatacaaccccagtgttgttggcccacggggaacgggcagaattggccactgaggagtttcttcctgttacccccattctggaaggttttgttatccttcggaagaaccccaattatgatctctaagtgaccaccaggggctctgaactgcagctgatgttatcagcaggccatgcatcctgctgccaagggtggacacggctgcagacttctgggggaattgtcgcctcctgctcttttgttactgagtgagataaggttgttcaataaagacttttatccccaaggtc

SEQ ID NO: 1768 - DNA, 2990 bp, Homo sapiens
ggaggaggaggggcgccgcgaccgacgcgcgcgagttggtctgggaaaaagggcggtgcgagcgggtgcgcgcgcagcgggccggcagtggcggcggagatggaggagggaggccgggacaaggcgccggtgcagccccagcagtctccagcggcggcccccggcggcacggacgagaagccgagcggcaaggagcggcgggatgccggggacaaggacaaagaacaggagctgtctgaagaggataaacagcttcaagatgaactggagatgctcgtggaacgactaggggagaaggatacatccctgtatcgaccagcgctggaggaattgcgaaggcagattcgttcttctacaacttccatgacttcagtgcccaagcctctcaaatttctgcgtccacactatggcaaactgaaggaaatctatgagaacatggcccctggggagaataagcgttttgctgctgacatcatctccgttttggccatgaccatgagtggggagcgtgagtgcctcaagtatcggctagtgggctcccaggaggaattggcatcatggggtcatgagtatgtcaggcatctggcaggagaagtggctaaggagtggcaggagctggatgacgcagagaaggtccagcgggagcctctgctcactctggtgaaggaaatcgtcccctataacatggcccacaatgcagagcatgaggcttgcgacctgcttatggaaattgagcaggtggacatgctggagaaggacattgatgaaaatgcatatgcaaaggtctgcctttatctcaccagttgtgtgaattacgtgcctgagcctgagaactcagccctactgcgttgtgccctgggtgtgttccgaaagtttagccgcttccctgaagctctgagattggcattgatgctcaatgacatggagttggtagaagacatcttcacctcctgcaaggatgtggtagtacagaaacagatggcattcatgctaggccggcatggggtgttcctggagctgagtgaagatgtcgaggagtatgaggacctgacagagatcatgtccaatgtacagctcaacagcaacttcttggccttagctcgggagctggacatcatggagcccaaggtgcctgatgacatctacaaaacccacctagagaacaacaggtttgggggcagtggctctcaggtggactctgcccgcatgaacctggcctcctcttttgtgaatggctttgtgaatgcagcttttggccaagacaagctgctaacagatgatggcaacaaatggctttacaagaacaaggaccacggaatgttgagtgcagctgcatctcttgggatgattctgctgtgggatgtggatggtggcctcacccagattgacaagtacctgtactcctctgaggactacattaagtcaggagctcttcttgcctgtggcatagtgaactctggggtccggaatgagtgtgaccctgctctggcactgctctcagactatgttctccacaacagcaacaccatgagacttggttccatctttgggctaggcttggcttatgctggctcaaatcgtgaagatgtcctaacactgctgctgcctgtgatgggagattcaaagtccagcatggaggtggcaggtgtcacagctttagcctgtggaatgatagcagtagggtcctgcaatggagatgtaacttccactatccttcagaccatcatggagaagtcagagactgagctcaaggatacttatgctcgttggcttcctcttggactgggtctcaaccacctggggaagggtgaggccatcgaggcaatcctggctgcactggaggttgtgtcagagccattccgcagttttgccaacacactggtggatgtgtgtgcatatgcaggctctgggaatgtgctgaaggtgcagcagctgctccacatttgtagcgaacactttgactccaaagagaaggaggaagacaaagacaagaaggaaaagaaagacaaggacaagaaggaagcccctgctgacatgggagcacatcagggagtggctgttctggggattgcccttattgctatgggggaggagattggtgcagagatggcattacgaacctttggccacttgctgagatatggggagcctacactccggagggctgtacctttagcactggccctcatctctgtttcaaatccacgactcaacatcctggataccctaagcaaattctctcatgatgctgatccagaagtttcctataactccatttttgccatgggcatggtgggcagtggtaccaataatgcccgtctggctgcaatgctgcgccagttagctcaatatcatgccaaggacccaaacaacctcttcatggtgcgcttggcacagggcctgacacatttagggaagggcacccttaccctctgcccctaccacagcgaccggcagcttatgagccaggtggccgtggctggactgctcactgtgcttgtctctttcctggatgttcgaaacattattctaggcaaatcacactatgtattgtatgggctggtggctgccatgcagccccgaatgctggttacgtttgatgaggagctgcggccattgccagtgtctgtccgtgtgggccaggcagtggatgtggtgggccaggctggcaagccgaagactatcacagggttccagacgcatacaaccccagtgttgttggcccacggggaacgggcagaattggccactgaggagtttcttcctgttacccccattctggaaggttttgttatccttcggaagaaccccaattatgatctctaagtgaccaccaggggctctgaactgcagctgatgttatcagcaggccatgcatcctgctgccaagggtggacacggctgcagacttctgggggaattgtcgcctcctgctcttttgttactgagtgagataaggttgttcaataaagacttttatccccaaggtc

SEQ ID NO: 1769 - DNA, 2990 bp, Homo sapiens; identical to SEQ ID NO: 1768

SEQ ID NO: 1770 - DNA, 2917 bp, Homo sapiens
gatggaggagggaggccgggacaaggcgccggtgcagccccagcagtctccagcggcggcccccggcggcacggacgagaagccgagcggcaaggagcggcgggatgccggggacaaggacaaagaacaggagctgtctgaagaggataaacagcttcaagatgaactggagatgctcgtggaacgactaggggagaaggatacatccctgtatcgaccagcgctggaggaattgcgaaggcagattcgttcttctacaacttccatgacttcagtgcccaagcctctcaaatttctgcgtccacactatggcaaactgaaggaaatctatgagaacatggcccctggggagaataagcgttttgctgctgacatcatctccgttttggccatgaccatgagtggggagcgtgagtgcctcaagtatcggctagtgggctcccaggaggaattggcatcatggggtcatgagtatgtcaggcatctggcaggagaagtggctaaggagtggcaggagctggatgacgcagagaaggtccagcgggagcctctgctcactctggtgaaggaaatcgtcccctataacatggcccacaatgcagagcatgaggcttgcgacctgcttatggaaattgagcaggtggacatgctggagaaggacattgatgaaaatgcatatgcaaaggtctgcctttatctcaccagttgtgtgaattacgtgcctgagcctgagaactcagccctactgcgttgtgccctgggtgtgttccgaaagtttagccgcttccctgaagctctgagattggcattgatgctcaatgacatggagttggtagaagacatcttcacctcctgcaaggatgtggtagtacagaaacagatggcattcatgctaggccggcatggggtgttcctggagctgagtgaagatgtcgaggagtatgaggacctgacagagatcatgtccaatgtacagctcaacagcaacttcttggccttagctcgggagctggacatcatggagcccaaggtgcctgatgacatctacaaaacccacctagagaacaacaggtttgggggcagtggctctcaggtggactctgcccgcatgaacctggcctcctcttttgtgaatggctttgtgaatgcagcttttggccaagacaagctgctaacagatgatggcaacaaatggctttacaagaacaaggaccacggaatgttgagtgcagctgcatctcttgggatgattctgctgtgggatgtggatggtggcctcacccagattgacaagtacctgtactcctctgaggactacattaagtcaggagctcttcttgcctgtggcatagtgaactctggggtccggaatgagtgtgaccctgctctggcactgctctcagactatgttctccacaacagcaacaccatgagacttggttccatctttgggctaggcttggcttatgctggctcaaatcgtgaagatgtcctaacactgctgctgcctgtgatgggagattcaaagtccagcatggaggtggcaggtgtcacagctttagcctgtggaatgatagcagtagggtcctgcaatggagatgtaacttccactatccttcagaccatcatggagaagtcagagactgagctcaaggatacttatgctcgttggcttcctcttggactgggtctcaaccacctggggaagggtgaggccatcgaggcaatcctggctgcactggaggttgtgtcagagccattccgcagttttgccaacacactggtggatgtgtgtgcatatgcaggctctgggaatgtgctgaaggtgcagcagctgctccacatttgtagcgaacactttgactccaaagagaaggaggaagacaaagacaagaaggaaaagaaagacaaggacaagaaggaagcccctgctgacatgggagcacatcagggagtggctgttctggggattgcccttattgctatgggggaggagattggtgcagagatggcattacgaacctttggccacttgctgagatatggggagcctacactccggagggctgtacctttagcactggccctcatctctgtttcaaatccacgactcaacatcctggataccctaagcaaattctctcatgatgctgatccagaagtttcctataactccatttttgccatgggcatggtgggcagtggtaccaataatgcccgtctggctgcaatgctgcgccagttagctcaatatcatgccaaggacccaaacaacctcttcatggtgcgcttggcacagggcctgacacatttagggaagggcacccttaccctctgcccctaccacagcgaccggcagcttatgagccaggtggccgtggctggactgctcactgtgcttgtctctttcctggatgttcgaaacattattctaggcaaatcacactatgtattgtatgggctggtggctgccatgcagccccgaatgctggttacgtttgatgaggagctgcggccattgccagtgtctgtccgtgtgggccaggcagtggatgtggtgggccaggctggcaagccgaagactatcacagggttccagactcatacaaccccagtgttgttggcccacggggaacgggcagaattggccactgaggagtttcttcctgttacccccattctggaaggttttgttatccttcggaagaaccccaattatgatctctaagtgaccaccaggggctctgaactgcagctgatgttatcagcaggccatgcatcctgctgccaagggtggacacggctgcagacttctgggggaattgtcgcctcctgctcttttgttactgagtgagataaggttgttcaataaagacttttatccccaaaaaaaaaaaaaaaaaaaaaaaaaaaaaaa

SEQ ID NO: 1771 - DNA, 2866 bp, Homo sapiens
ttccggtctcttaggctccgggccacagagacggtgtcagtggtagcctagagaggccgctaacagacaggagccgaacgggggcttccgctcagcagagaggcaagatggctacggcagggggtggctctggggctgacccgggaagtcggggtctccttcgccttctgtctttctgcgtcctactagcaggtttgtgcaggggaaactcagtggagaggaagatatatatccccttaaataaaacagctccctgtgttcgcctgctcaacgccactcatcagattggctgccagtcttcaattagtggagacacaggggttatccacgtagtagagaaagaggaggacctacagtgggtattgactgatggccccaaccccccttacatggttctgctggagagcaagcattttaccagggatttaatggagaagctgaaagggagaaccagccgaattgctggtcttgcagtgtccttgaccaagcccagtcctgcctcaggcttctctcctagtgtacagtgcccaaatgatgggtttggtgtttactccaattcctatgggccagagtttgctcactgcagagaaatacagtggaattcgctgggcaatggtttggcttatgaagactttagtttccccatctttcttcttgaagatgaaaatgaaaccaaagtcatcaagcagtgctatcaagatcacaacctgagtcagaatggctcagcaccaaccttcccactatgtgccatgcagctcttttcacacatgcatgctgtcatcagcactgccacctgcatgcggcgcagctccatccaaagcaccttcagcatcaacccagaaatcgtctgtgaccccctgtctgattacaatgtgtggagcatgctaaagcctataaatacaactgggacattaaagcctgacgacagggttgtggttgctgccacccggctggatagtcgttcctttttctggaatgtggccccaggggctgaaagcgcagtggcttcctttgtcacccagctggctgctgctgaagctttgcaaaaggcacctgatgtgaccaccctgccccgcaatgtcatgtttgtcttctttcaaggggaaacttttgactacattggcagctcgaggatggtctacgatatggagaagggcaagtttcccgtgcagttagagaatgttgactcatttgtggagctgggacaggtggccttaagaacttcattagagctttggatgcacacagatcctgtttctcagaaaaatgagtctgtacggaaccaggtggaggatctcctggccacattggagaagagtggtgctggtgtccctgctgtcatcctcaggaggccaaatcagtcccagcctctcccaccatcttccctgcagcgatttcttcgagctcgaaacatctctggcgttgttctggctgaccactctggtgccttccataacaaatattaccagagtatttacgacactgctgagaacattaatgtgagctatcccgaatggctgagccctgaagaggacctgaactttgtaacagacactgccaaggccctggcagatgtggccacggtgctgggacgtgctctgtatgagcttgcaggaggaaccaacttcagcgacacagttcaggctgatccccaaacggttacccgcctgctctatgggttcctgattaaagccaacaactcatggttccagtctatcctcaggcaggacctaaggtcctacttgggtgacgggcctcttcaacattacatcgctgtctccagccccaccaacaccacttatgttgtacagtatgccttggcaaatttgactggcacagtggtcaacctcacccgagagcagtgccaggatccaagtaaagtcccaagtgaaaacaaggatctgtatgagtactcatgggtccagggccctttgcattctaatgagacggaccgactcccccggtgtgtgcgttctactgcacgattagccagggccttgtctcctgcctttgaactgagtcagtggagctctactgaatactctacatggactgagagccgctggaaagatatccgtgcccggatatttctcatcgccagcaaagagcttgagttgatcaccctgacagtgggcttcggcatcctcatcttctccctcatcgtcacctactgcatcaatgccaaagctgatgtccttttcattgctccccgggagccaggagctgtgtcatactgaggaggaccccagcttttcttgccagctcagcagttcacttcctagagcatctgtcccactgggacacaaccactaatttgtcactggaacctccctgggcctgtctcagattgggattaacataaaagactcccctttcccatcaccccttccccatttcctcttccttctctactcatgccagattttgggattacaaatagaagcttcttgctcctgtttaactccctagttacccaccctaatttgcccttcaggacccttctactttttccttcctgccctgtacctctctctgctcctcacccccacccctgtacccagccaccttcctgactgggaaggacataaaaggtttaatgtcagggtcaaactacattgagcccctgaggacaggggcatctctgggctgagcctactgtctccttcccactgtcctttctccaggccctcagatggcacattagggtgggcgtgctgcgggtgggtatcccacctccagcccacagtgctcagttgtactttttattaagctgtaatatctatttttgtttttgtctttttcctttattctttttgtaaatatatatataatgagtttcattaaaatagattatcccacacgactt

SEQ ID NO: 1772 - DNA, 2866 bp, Homo sapiens; identical to SEQ ID NO: 1771

SEQ ID NO: 1773 - DNA, 5628 bp, Homo sapiens
ctttcatcttttatcattgcagctctttgccgagggcgtgtggtgagagtccccacagcgaccctggttcgagtggtgggcactgagctggtcatcccctgcaacgtcagtgactatgatggccccagcgagcaaaactttgactggagcttctcatctttggggagcagctttgtggagcttgcaagcacctgggaggtggggttcccagcccagctgtaccaggagcggctgcagaggggcgagatcctgttaaggcggactgccaacgacgccgtggagctccacataaagaacgtccagccttcagaccaaggccactacaaatgttcaacccccagcacagatgccactgtccagggaaactatgaggacacagtgcaggttaaagtgctggccgactccctgcacgtgggccccagcgcgcggcccccgccgagcctgagcctgcgggagggggagcccttcgagctgcgctgcaccgccgcctccgcctcgccgctgcacacgcacctggcgctgctgtgggaggtgcaccgcggcccggccaggcggagcgtcctcgccctgacccacgagggcaggttccacccgggcctggggtacgagcagcgctaccacagtggggacgtgcgcctcgacaccgtgggcagcgacgcctaccgcctctcagtgtcccgggctctgtctgccgaccagggctcctacaggtgtatcgtcagcgagtggatcgccgagcagggcaactggcaggaaatccaagaaaaggccgtggaagttgccaccgtggtgatccagccgacagttctgcgagcagctgtgcccaagaatgtgtctgtggctgaaggaaaggaactggacctgacctgtaacatcacaacagaccgagccgatgacgtccggcccgaggtgacgtggtccttcagcaggatgcctgacagcaccctacctggctcccgcgtgttggcgcggcttgaccgtgattccctggtgcacagctcgcctcatgttgctttgagtcatgtggatgcacgctcctaccatttactggttcgggatgttagcaaagaaaactctggctactattactgccacgtgtccctgtgggcacccggacacaacaggagctggcacaaagtggcagaggccgtgtcttccccagctggtgtgggtgtgacctggctagaaccagactaccaggtgtacctgaatgcttccaaggtccccgggtttgcggatgaccccacagagctggcatgccgggtggtggacacgaagagtggggaggcgaatgtccgattcacggtttcgtggtactacaggatgaaccggcgcagcgacaatgtggtgaccagcgagctgcttgcagtcatggacggggactggacgctaaaatatggagagaggagcaagcagcgggcccaggatggagactttattttttctaaggaacatacagacacgttcaatttccggatccaaaggactacagaggaagacagaggcaattattactgtgttgtgtctgcctggaccaaacagcggaacaacagctgggtgaaaagcaaggatgtcttctccaagcctgttaacatattttgggcattagaagattccgtgcttgtggtgaaggcgaggcagccaaagcctttctttgctgccggaaatacatttgagatgacttgcaaagtatcttccaagaatattaagtcgccacgctactctgttctcatcatggctgagaagcctgtcggcgacctctccagtcccaatgaaacgaagtacatcatctctctggaccaggattctgtggtgaagctggagaattggacagatgcatcacgggtggatggcgttgttttagaaaaagtgcaggaggatgagttccgctatcgaatgtaccagactcaggtctcagacgcagggctgtaccgctgcatggtgacagcctggtctcctgtcaggggcagcctttggcgagaagcagcaaccagtctctccaatcctattgagatagacttccaaacctcaggtcctatatttaatgcttctgtgcattcagacacaccatcagtaattcggggagatctgatcaaattgttctgtatcatcactgtcgagggagcagcactggatccagatgacatggcctttgatgtgtcctggtttgcggtgcactcttttggcctggacaaggctcctgtgctcctgtcttccctggatcggaagggcatcgtgaccacctcccggagggactggaagagcgacctcagcctggagcgcgtgagtgtgctggaattcttgctgcaagtgcatggctccgaggaccaggactttggcaactactactgttccgtgactccatgggtgaagtcaccaacaggttcctggcagaaggaggcagagatccactccaagcccgtttttataactgtgaagatggatgtgctgaacgccttcaagtatcccttgctgatcggcatcggtctgtccacggtcatcgggctcctgtcctgtctcatcgggtactgcagctcccactggtgttgtaagaaggaggttcaggagacacggcgcgagcgccgcaggctcatgtcgatggagatggactaggctggcccgggaggggagtgacagagggacgttctaggagcaattggggcaagaagaggacagtgatattttaaaacaaagtgtgttacactaaaaaccagtcctctctaatctcaggtgggacttggcgctctctcttttctgcatgtcaagttctgagcgcggacatgtttaccagcacacggctcttcttcccacggcactttctgatgtaacaatcgagtgtgtgttttcccaactgcagctttttaatggttaaccttcatctaatttttttttctcccactggtttatagatcctctgacttgtgtgtgtttatagcttttgtttcgcggggttgtggtgaggaaggggtgatggcatgcggagttctttatcttcagtgagaatgtgcctgcccgcctgagagccagcttccgcgttggaggcacgtgttcagagagctgctgagcgccaccctctacccggctgacagacaacacagacctgtgccgaaggctaatttgtggcttttacgaccctaccccaccccctgttttcaggggtttagactacatttgaaatccaaacttggagtatataacttcttattgagcccaactgctttttttttttttttttgcttctctgccccttttccatttcttttgtatttgttttctgtgagagcactgaaatggcggccctggaatctacaatttggctctccactgagcaccttatcttgccaccttagccttaagaatgaatatgaagggaggatggggacaaggaaaggatcagatacctgctccagtagttgtgaggccactgtgtctcaggggactccaggaagagcagaagagggatcccacgaagttatttttatgcagctggggccaggagggtcagagtggtgccaggtgcaagttaggctaaagaagccaccactattcctctctcttgcccattgtggggggcaaaggcattggtcaccaagagtcttgcagggggacccacagatatgccatgtccttcacacgtgcttgggctccttaacctgaaggcaaattgctacttgcaagactgactgacttcaaggaatcagaaattacctagaagcaccatgttttttctatgaccttttcagtccttcaggtcattttaaggtccactgcagggggttagtgagaaagggtatactttgtggtatgttttgctttcctaatagggacatgaaggaaacccagcaatttgctgttatgtgaatggcctgtagagcagagtcaagagcggtgtgctttgcccgactgctcccatcaggaataggagagtagacagagatcttccacatcccaggcttctgctgctgctttaaaagctctgtccttggagcctcccgctccctgaagtgtctcgccccctgcacagcactggcctttcggaagcatcccagtagggttttctgaggctcgctggtgactcatgccctaattgcaatcctctgcttttatcttgactttgaaggatctaacactgctctctcttccaaaggggaaaaaaagattcatttgttttgagcaataaactaatacaaaatgatggccattcatgtgcagctctttgtcaccatgggccggatgagttgtgctcctcctggctcaccatttccccctgctcccccacagccggttctgcacttatcaccgagtcgcccctggaagcagattcccattgagttttccccaccaaggggaccatgcacatggtagaaacattagattctgcattgacagtagcctttccttggcccgggcctgtggtgggaagacgggcaacaagtataccccaccagggcctgagtgactagaggaagaggacgaggccttgttggcactagatttgggtattttctgcatgtcataacatatcctaactgctatttcagaagaggcagcttgtaggtgattgtacaagtgagaattaaagagagaacaaatatttaaacaggtgctgtattagtaacagccagtgccctttcagcccttgcatctattaaaaggagattcaggattttattggcacaggcccttcttagtaggaagaaagggtgcttagctttggacctgaccgggtgtgtgtaaaaccatggactgagtcacagcagacactcgatggtggtaaatgtgacgggtgcttacacactgtaccttttcctttcatactgatgctgcagttcagggctggagttgttaaggcattgacctccacccacctgccccatgtccgctgggctgcccaagctgcatgtcacctgagggctggcaggaaggggcgagaaatcccagggcattgtaccaaggacctagttccttctagggatataaatttccaggaatgtgtatttttaatgtggtgagatgcactcttttgttgtaccaaatagggctccccaccccacccctgcgacaagtgctcttctagaacaggttcctaccagcagcactggtgtgaatgaaagagagacccagccgcgtctcacacaggtggaattgcacttcttaacaaaaaggaactttataaaagtttgggattttttttcctaatcataaaaatagccccagaaagagcctaagctatgttcagatagaagcctcgaaattcctgtgaattgtttactttatgatgtttacatacacgtttcactttgaaaaaaaatgcaaatcgactttttaacaactgttgagatgtttcatgggacagtagaactctgactcaccaactgggctaaattttaatttaaaaatgtatttatttgagtgtctttccccccctcaccctcaccatctgaggggctccctgagatcttggtagaggaggcccctcctgcccagaccttcgtttgtttccccggtggcccttgcttcttgctttgcagactgcctgcagccatgattttgtcactgacatctgtgagccaaagactgagcctttttggcaggaataataagcaatactacacaacttgctacttt

SEQ ID NO: 1774 - DNA, 5628 bp, Homo sapiens; identical to SEQ ID NO: 1773

SEQ ID NO: 1775 - DNA, 525 bp, Homo sapiens
gccatgggttccccttcagcctgtccatacagagtgtgcattccctggcaggggctcctgctcacagcctcgcttttaaccttctggaacctgccaaacagtgcccagaccaatattgatggtgtgccgttcaatgtcgcagaagggaaggaggtccttctagtagtccataatgagtcccagaatctttatggctacaactggtacaaagggcaaagggtgcatgccaactatcgaattataggatatgtaaaaaatataagtcaagaaaatgccccagggcccgcacacaacggtcgagagacaatataccccaatggaaccctgctgatccagaacgtcacccacaatgacgcaggaatctataccctacacgttataaaagaaaatcttgtgaatgaagaagtaaccagacaattctacgtattctatgagtcagtacaagcaagttcacctgacctctcagctgggaccgctgtcagcatcatgattggagtactggctgggatggctctgatatagcag

SEQ ID NO: 1776 - DNA, 746 bp, Homo sapiens
ccgtctagcacttcccgcccgtcagtccttcacagtgcccgaatcgcccgctggtttaagtgcagcctgtcaatcagagcagctctcgaggccccgcccaaggccgtgctgcgtttctccttacgtcacttcctctccagcccctgcgtaatcgataaggaaacccggacgctgctgcccctttctttttttcaggcggccgggaagatggcggacattcagactgagcgtgcctaccaaaagcagccgaccatctttcaaaacaagaagagggtcctgctgggagaaactggcaaggagaagctcccgcggtactacaagaacatcggtctgggcttcaagacacccaaggaggctattgagggcacctacattgacaagaaatgccccttcactggtaatgtgtccattcgagggcggatcctctctggcgtggtgaccaagatgaagatgcagaggaccattgtcatccgccgagactatctgcactacatccgcaagtacaaccgcttcgagaagcgccacaagaacatgtctgtacacctgtccccctgcttcagggacgtccagatcggtgacatcgtcacagtgggcgagtgccggcctctgagcaagacagtgcgcttcaacgtgctcaaggtcaccaaggctgccggcaccaagaagcagttccagaagttctgaggctggacatcggcccgctccccacaatgaaataaagttattttctcattcccaggccagac

SEQ ID NO: 1777 - DNA, 534 bp, Homo sapiens
agatggcggacattcagacggagcgtgcttaccaaaagcagcctacaatctttcaaaacaagaaacgtgttttgctgggagaaactggcaaggaaaaactccctcggtactacaaaaacatcggtctaggcttcaagacgcccaaggaggccatcgagggcacctacatagacaagaaatgccccttcactggtaatgtctccatccgaggacggatcctgtctggtgttgtgacgaagatgaagatgcagaggaccattgtcatccgccgggactatctccattatatccgaaagtacaaccgctttgagaagcgtcacaagaacatgtctgtgcacctgtccccctgtttcagggacgtccagattggcgacattgtcactgttggagagtgcaggcctctgagcaagactgttcgattcaatgtgctcaaggtcaccaaggctgctggcaccaagaagcagttccagaagttctgaggggggactgtagccaatgctctagaacaaataaaagttattttccaacttacag

SEQ ID NO: 1778 - DNA, 3132 bp, Homo sapiens
gactggcagtccccggggccaatggcaagcggataaacagaggcggccgtggaagaggactggaggcgaggctccgcccctccacgggacagtcaggcgagatagccagtgagctcgcaccagaggtagccacgatggaggtgatgaacctgatggagcagcctatcaaggtgactgagtggcagcagacatacacctacgactcgggtatccactcgggcgccaacacctgcgtgccctccgtcagcagcaagggcatcatggaggaggatgaggcctgcgggcgccagtacacgctcaagaaaaccaccacttacacccagggggtgccccccagccaaggtgacctggagtaccagatgtccacaacagccagggccaaacgggtgcgggaggccatgtgccctggtgtgtcaggcgaggacagctcgcttctgctggccacccaggtggaggggcaggccaccaacctgcagcgactggccgagccgtcccagctgctcaagtcggccattgtgcatctcatcaactaccaggacgatgccgagctggccactcgcgccctgcccgagctcaccaaactgctcaacgacgaggacccggtggtggtgaccaaggcggccatgattgtgaaccagctgtcgaagaaggaggcgtcgcggcgggccctgatgggctcgccccagctggtggccgctgtcgtgcgtaccatgcagaataccagcgacctggacacagcccgctgcaccaccagcatcctgcacaacctctcccaccaccgggaggggctgctcgccatcttcaagtcgggtggcatccctgctctggtccgcatgctcagctcccctgtggagtcggtcctgttctatgccatcaccacgctgcacaacctgctcctgtaccaggagggcgccaagatggccgtgcgcctggccgacgggctgcaaaagatggtgcccctgctcaacaagaacaaccccaagttcctggccatcaccaccgactgcctgcagctcctggcctacggcaaccaggagagcaagctgatcatcctggccaatggtgggccccaggccctcgtgcagatcatgcgtaactacagttatgaaaagctgctctggaccaccagtcgtgtgctcaaggtgctatccgtgtgtcccagcaataagcctgccattgtggaggctggtgggatgcaggccctgggcaagcacctgaccagcaacagcccccgcctggtgcagaactgcctgtggaccctgcgcaacctctcagatgtggccaccaagcaggagggcctggagagtgtgctgaagattctggtgaatcagctgagtgtggatgacgtcaacgtcctcacctgtgccacgggcacactctccaacctgacatgcaacaacagcaagaacaagacgctggtgacacagaacagcggtgtggaggctctcatccatgccatcctgcgtgctggtgacaaggacgacatcacggagcctgccgtctgcgctctgcgccacctcactagccgccaccctgaggccgagatggcccagaactctgtgcgtctcaactatggcatcccagccatcgtgaagctgctcaaccagcccaaccagtggccactggtcaaggcaaccatcggcttgatcaggaatctggccctgtgcccagccaaccatgccccgctgcaggaggcagcggtcatcccccgcctcgtccaactgctggtgaaggcccaccaggatgcccagcgccacgtagctgcaggcacacagcagccctacacggatggtgtgaggatggaggagattgtggagggctgcaccggagcactgcacatcctcgcccgggaccccatgaaccgcatggagatcttccggctcaacaccattcccctgtttgtgcagctcctgtactcgtcggtggagaacatccagcgcgtggctgccggggtgctgtgtgagctggcccaggacaaggaggcggccgacgccattgatgcagagggggcctcggccccactcatggagttgctgcactcccgcaacgagggcactgccacctacgctgctgccgtcctgttccgcatctccgaggacaagaacccagactaccggaagcgcgtgtccgtggagctcaccaactccctcttcaagcatgacccggctgcctgggaggctgcccagagcatgattcccatcaatgagccctatggagatgacttggatgccacctaccgccccatgtactccagcgatgtgccccttgacccgctggagatgcacatggacatggatggagactaccccatcgacacctacagcgacggcctcaggcccccgtaccccactgcagaccacatgctggcctaggcggcctggccccagtgcggttcctcatctgagaggctctccgtgcaggcgatggggcaagacagaaaagtgcctgagctggggaagccggggtgtaacttcctgctgcaccctgcgcctccagaggtcctccgtagggtctttcttgggatagtgttctgctcctgcttttctgtcctgggcatgggtccagggcctgacaccccctccccgcccctgtggccctggccactaaagcttcagactcaagtacccattctgttttcccccagcaacgcccctccaaacctccagcctccctgtctccagctgcctgggcccggaagggctttggttccttctctgggtctgattttctcactgaactccaccgaccaactgccctaagcccccagggcctccagggcccaggttcgagacccaaacccccaaaatccaaaacttctcttgaaaagttcagggaccgtccaggggagatggggaggagatatggagtgagtcacctgctccattcctcacacccctgtcccacccacacagctgccctagctgaccccgagaagtgctcttggctgacccctctggtgtgtggtgaggggctttctcttccccttcctgtttcagacccccccatttcccgcacatggtgtggggggctgggggaggtccaagcagagtgttttattattatcgctttatgtttttggttattggtttttttgtatagaccaaagcaaagaaaataaaaataacacagatg

SEQ ID NO: 1779 - DNA, 3132 bp, Homo sapiens; identical to SEQ ID NO: 1778

SEQ ID NO: 1780 - DNA, 3132 bp, Homo sapiens; identical to SEQ ID NO: 1778

SEQ ID NO: 1781 - DNA, 3192 bp, Homo sapiens
cgccagagtccggagcagccgccgcccgaccgcgccgagctcagttcgctgtccgcgccggctcccaccccggcccgaccccgacccggcccggtcaggccccatactcagtagccacgatggaggtgatgaacctgatggagcagcctatcaaggtgactgagtggcagcagacatacacctacgactcgggtatccactcgggcgccaacacctgcgtgccctccgtcagcagcaagggcatcatggaggaggatgaggcctgcgggcgccagtacacgctcaagaaaaccaccacttacacccagggggtgccccccagccaaggtgacctggagtaccagatgtccacaacagccagggccaaacgggtgcgggaggccatgtgccctggtgtgtcaggcgaggacagctcgcttctgctggccacccaggtggaggggcaggccaccaacctgcagcgactggccgagccgtcccagctgctcaagtcggccattgtgcatctcatcaactaccaggacgatgccgagctggccactcgcgccctgcccgagctcaccaaactgctcaacgacgaggacccggtggtggtgaccaaggcggccatgattgtgaaccagctgtcgaagaaggaggcgtcgcggcgggccctgatgggctcgccccagctggtggccgctgtcgtgcgtaccatgcagaataccagcgacctggacacagcccgctgcaccaccagcatcctgcacaacctctcccaccaccgggaggggctgctcgccatcttcaagtcgggtggcatccctgctctggtccgcatgctcagctcccctgtggagtcggtcctgttctatgccatcaccacgctgcacaacctgctcctgtaccaggagggcgccaagatggccgtgcgcctggccgacgggctgcaaaagatggtgcccctgctcaacaagaacaaccccaagttcctggccatcaccaccgactgcctgcagctcctggcctacggcaaccaggagagcaagctgatcatcctggccaatggtgggccccaggccctcgtgcagatcatgcgtaactacagttatgaaaagctgctctggaccaccagtcgtgtgctcaaggtgctatccgtgtgtcccagcaataagcctgccattgtggaggctggtgggatgcaggccctgggcaagcacctgaccagcaacagcccccgcctggtgcagaactgcctgtggaccctgcgcaacctctcagatgtggccaccaagcaggagggcctggagagtgtgctgaagattctggtgaatcagctgagtgtggatgacgtcaacgtcctcacctgtgccacgggcacactctccaacctgacatgcaacaacagcaagaacaagacgctggtgacacagaacagcggtgtggaggctctcatccatgccatcctgcgtgctggtgacaaggacgacatcacggagcctgccgtctgcgctctgcgccacctcactagccgccaccctgaggccgagatggcccagaactctgtgcgtctcaactatggcatcccagccatcgtgaagctgctcaaccagcccaaccagtggccactggtcaaggcaaccatcggcttgatcaggaatctggccctgtgcccagccaaccatgccccgctgcaggaggcagcggtcatcccccgcctcgtccaactgctggtgaaggcccaccaggatgcccagcgccacgtagctgcaggcacacagcagccctacacggatggtgtgaggatggaggagattgtggagggctgcaccggagcactgcacatcctcgcccgggaccccatgaaccgcatggagatcttccggctcaacaccattcccctgtttgtgcagctcctgtactcgtcggtggagaacatccagcgcgtggctgccggggtgctgtgtgagctggcccaggacaaggaggcggccgacgccattgatgcagagggggcctcggccccactcatggagttgctgcactcccgcaacgagggcactgccacctacgctgctgccgtcctgttccgcatctccgaggacaagaacccagactaccggaagcgcgtgtccgtggagctcaccaactccctcttcaagcatgacccggctgcctgggaggctgcccagagcatgattcccatcaatgagccctatggagatgacatggatgccacctaccgccccatgtactccagcgatgtgccccttgacccgctggagatgcacatggacatggatggagactaccccatcgacacctacagcgacggcctcaggcccccgtaccccactgcagaccacatgctggcctaggcggcctggccccagtgcggttcctcatctgagaggctctccgtgcaggcgatggggcaagacagaaaagtgcctgagctggggaagccggggtgtaacttcctgctgcaccctgcgcctccagaggtcctccgtagggtctttcttgggatagtgttctgctcctgcttttctgtcctgggcatgggtccagggcctgacaccccctccccgcccctgtggccctggccactaaagcttcagactcaagtacccattctgttttcccccagcaacgcccctccaaacctccagcctccctgtctccagctgcctgggcccggaagggctttggttccttctctgggtctgattttctcactgaactccaccgaccaactgccctaagcccccagggcctccagggcccaggttcgagacccaaacccccaaaatccaaaacttctcttgaaaagttcagggaccgtccaggggagatggggaggagatatggagtgagtcacctgctccagaagatgccagcttctctctccagggtgcttagttggctttgcccacccctcactccccagggagctccggggacagcttcctcacacccctgtcccacccacacagctgccctagctgaccccgagaagtgctcttggctgacccctctggtgtgtggtgaggggctttctcttccccttcctgtttcagacccccccatttcccgcacatggtgtggggggctgggggaggtccaagcagagtgttttattattatcgctttatgtttttggttattggtttttttgtatagaccaaagcaaagaaaataaaaataacacag

SEQ ID NO: 1782 - DNA, 3132 bp, Homo sapiens; identical to SEQ ID NO: 1778

SEQ ID NO: 1783 - DNA, 876 bp, Homo sapiens
gcggccgccggggctggggccggcgggagtccgcgggaccctccagaagagcggccggcgccgtgactcagcactggggcggagcggggcgggaccacccttataaggctcggaggccgcgaggccttcgctggagtttcgccgccgcagtcttcgccaccatgccgccctacaccgtggtctatttcccagttcgaggccgctgcgcggccctgcgcatgctgctggcagatcagggccagagctggaaggaggaggtggtgaccgtggagacgtggcaggagggctcactcaaagcctcctgcctatacgggcagctccccaagttccaggacggagacctcaccctgtaccagtccaataccatcctgcgtcacctgggccgcacccttgggctctatgggaaggaccagcaggaggcagccctggtggacatggtgaatgacggcgtggaggacctccgctgcaaatacatctccctcatctacaccaactatgaggcgggcaaggatgactatgtgaaggcactgcccgggcaactgaagccttttgagaccctgctgtcccagaaccagggaggcaagaccttcattgtgggagaccagatctccttcgctgactacaacctgctggacttgctgctgatccatgaggtcctagcccctggctgcctggatgcgttccccctgctctcagcatatgtggggcgcctcagtgcccggcccaagctcaaggccttcctggcctcccctgagtacgtgaacctccccatcaatggcaacgggaaacagtgagggttggggggactctgagcgggaggcagagtttgccttcctttctccaggaccaataaaatttctaagagagctactatga

SEQ ID NO: 1784 - DNA, 876 bp, Homo sapiens; identical to SEQ ID NO: 1783

SEQ ID NO: 1785 - DNA, 876 bp, Homo sapiens; identical to SEQ ID NO: 1783

SEQ ID NO: 1786 - DNA, 6586 bp, Homo sapiens
gcagagcagcaccggccgtggctccggtagcagcaagttcgaaccccgctcccgctccgcttcggttctcgctccttcggcccttgggcctccaaacaccagtccccggcagctcgttgcgcattgcgctctccccgccaccaggatgccggtaaccgagaaggatctagctgaggacgcgccttggaagaagatccagcagaacacgttcacacgctggtgcaacgagcacctcaagtgcgtgaacaaacgcatcggcaacctgcagaccgacctgagcgacgggctgcggctcatcgcgctgctcgaggtgctcagccagaagcgcatgtaccgcaagtaccatcagcggcccacctttcgccagatgcagctcgagaatgtgtccgtggcgctcgagttcctggaccgtgagagcatcaagctcgtgtccatcgatagcaaagccattgtggatgggaacctgaagctcatcttgggtctggtgtggacgctgatcctccactactccatctccatgcccgtgtgggaggatgaaggggatgatgatgccaagaagcagacgccaaagcagaggctgctggggtggattcagaacaagatcccctacttgcccatcaccaactttaaccagaactggcaagacggcaaagccctgggagccctggtagacagctgtgctccaggtctgtgcccagactgggaatcctgggacccgcagaagcctgtggataatgcacgagaagccatgcagcaggcagatgactggctgggtgtcccacaggtcatcactcctgaagaaatcattcacccggatgtggacgagcactcagttatgacttacctgtcccagttccccaaagccaagctcaagccgggggctcctctcaaacccaaactcaacccgaagaaagccagggcctatggcagaggaatcgagcccactggaaacatggtgaagcagccagccaagttcactgtggacaccatcagcgccgggcaaggagacgtgatggtgtttgttgaggacccagaagggaacaaagaggaggcacaagtgacccctgacagtgacaagaacaagacatactctgtggagtatctgcccaaggtcaccgggctacacaaagtcacagtcctctttgcaggacagcacatctccaagagcccatttgaagtgagtgttgacaaggcccagggagatgccagtaaagtcactgcaaaaggtccagggttggaagctgtagggaacatcgccaataagcccacctactttgacatctatacggcaggagctggtgtgggtgacattggtgtggaggtggaagatccccaggggaagaacaccgtggagttgctcgtggaagacaaaggaaaccaggtgtatcgatgtgtgtacaaacccatgcagcctggccctcacgtggtcaagatcttctttgctggggacactattcctaagagtcccttcgttgtgcaggttggggaagcctgcaatccaaatgcctgccgggccagtggccgaggcctacaacccaaaggcgtccgtatccgggagaccacagatttcaaggttgacaccaaagctgcaggaagtggggagctcggtgtaaccatgaagggtcctaagggtctggaggagctggtgaagcagaaagactttctggatggggtctacgcattcgagtattaccccagcaccccggggagatacagcattgccatcacatgggggggacaccacattccaaagagcccctttgaagttcaagttggccctgaagcgggtatgcagaaagtccgtgcttggggccctgggctccatggtgggattgtcgggcggtcagcggacttcgtggtagaatccattggctctgaagtggggtctctggggtttgccattgaaggcccctctcaggcaaagattgagtacaacgaccagaatgatggatcgtgtgatgtcaaatactggcccaaggagcctggcgaatatgctgttcacatcatgtgtgacgacgaagacatcaaggacagcccgtacatggccttcatccacccagccacgggaggctacaaccctgatctggttcgagcatacgggccaggtttggagaaatctggatgcattgtcaacaacctggccgagttcactgtggatcctaaggatgctggaaaagctcccttaaagatatttgctcaggatggggaaggccaacgcattgacatccagatgaagaaccggatggacggcacatatgcatgctcatacaccccggtgaaggccatcaagcacaccattgctgtggtctggggaggcgtgaacatcccgcacagcccctacagggtcaacatcgggcaaggtagccatcctcagaaggtcaaagtgtttgggccaggtgtggagagaagtggtctgaaggcaaatgaacctacacacttcacggtggactgtactgaggctggggaaggtgatgtcagtgttggcattaagtgtgatgcccgggtgttaagtgaagatgaggaagacgtggattttgacattattcacaatgccaatgatacgttcacagtcaaatatgtgcctcctgctgctgggcgatacactatcaaagttctctttgcatctcaggaaatccccgccagccctttcagagtcaaagttgacccttcccacgatgccagcaaagtgaaggcagaaggcccagggctcagcaaagcaggtgtggaaaatgggaaaccgacccacttcactgtctacaccaagggggctgggaaagccccgctcaacgtgcagttcaacagccctcttcctggcgatgcagtgaaggatttggatatcatcgataattatgactactctcacacggttaaatatacacccacccaacagggcaacatgcaggttctggtgacttacggtggcgatcccatccctaaaagccctttcactgtgggtgttgctgcaccgctggatctgagcaagataaaactcaatgggctggaaaacagggtggaagttgggaaggatcaggagttcaccgttgataccaggggggcaggaggccaggggaagctggacgtgacaatcctcagcccctctcggaaggtcgtgccatgcctagtgacacctgtgacaggccgggagaacagcacggccaagttcatccctcgggaggaggggctgtatgctgtagacgtgacctacgatggacaccctgtgcccgggagcccctacacagtggaggcctcgctgccaccagatcccagcaaggtgaaggcccacggtcccggcctcgaaggtggtctcgtgggcaagcctgccgagttcaccatcgataccaaaggagctggtactggaggtctgggcttaacggtggaaggtccgtgcgaggccaaaatcgagtgctccgacaatggtgatgggacctgctccgtctcttaccttcccacaaaacccggggagtacttcgtcaacatcctctttgaagaagtccacatacctgggtctcccttcaaagctgacattgaaatgccctttgacccctctaaagtcgtggcatcggggccaggtctcgagcacgggaaggtgggtgaagctggcctccttagcgtcgactgctcggaagcgggaccgggggccctgggcctggaagctgtctcggactcgggaacaaaagccgaagtcagtattcagaacaacaaagatggcacctacgcggtgacctacgtgcccctgacggccggcatgtacacgttgaccatgaagtatggtggcgaactcgtgccacacttccccgcccgggtcaaggtggagcccgccgtggacaccagcaggatcaaagtctttggaccaggaatagaagggaaagatgtgttccgggaagctaccaccgactttacagttgactctcggccgctgacccaggttgggggtgaccacatcaaggcccacattgccaacccctcaggggcctccaccgagtgctttgtcacagacaatgcggatgggacctaccaggtggaatacacaccctttgagaaaggtctccatgtagtggaggtgacatatgatgacgtgcctatcccaaacagtcccttcaaggtggctgtcactgaaggctgccagccatctagggtgcaagcccaaggacctggattgaaagaggcctttaccaacaagcccaatgtcttcaccgtggttaccagaggcgcaggaattggtgggcttggcataactgttgagggaccatcagagtcgaagataaattgcagagacaacaaggatggcagctgcagtgctgagtacattcctttcgcgccgggggattacgatgttaatatcacatatggaggagcccacatccccggcagccccttcagggttcctgtgaaggatgttgtggaccccagcaaggtcaagattgccggccccgggctgggctcaggcgtccgagcccgtgtcctgcagtccttcacggtggacagcagcaaggctggcctggctccgctggaagtgagggttctgggcccacgagctgacgacacggattcccagtcatggcgcagccccttgaaagccctttcagagttctttaaaggtgacccgaagggcttggtggagccagtgaacgtggtggacaatggagatggcacacacacagtaacctacaccccatctcaggagggaccttacatggtctcagttaaatatgctgatgaagagattcctcgcagtcccttcaaggtcaaggtccttcccacatatgatgccagcaaagtgactgccagtggccccggccttagttcctatggtgtgcctgccagtctacctgtggactttgcaattgatgcccgagatgccggggaaggcctgcttgctgttcaaataacggaccaagaaggaaaacccaaaagagccattgtccatgacaataaagatggcacgtatgctgtcacctacatccccgacaagactgggcgctatatgattggagtcacctacgggggtgacgacatcccactttctccttatcgcatccgagccacacagacgggtgatgccagcaagtgcctggccacgggtcctggaatcgcctccactgtgaaaactggcgaagaagtaggctttgtggttgatgccaagactgccgggaagggtaaagtgacctgcacggttctgaccccagatggcactgaggccgaggccgatgtcattgagaatgaagatggaacctatgacatcttctacacagctgccaagccgggcacatatgtgatctatgtgcgcttcggtggtgttgatattcctaacagccccttcactgtcatggtgaccgaagaggcctatgtcccagtgagtgacatgaacggcctgggatttaagccttttgacctggtcattccgtttgctgtcaggaaaggagaaatcactggagaggtccacatgccttctgggaagacagccacacctgagattgtggacaacaaggacggcacggtcactgttagatatgcccccactgaggtcgggctccatgagatgcacatcaaatacatgggcagccacatccctgagagcccactccagttctacgtgaactaccccaacagtggaagtgtttctgcatacggtccaggcctcgtgtatggagtggccaacaaaactgccaccttcaccatcgtcacagaggatgcaggagaaggtggtctggacttggctattgagggcccctcaaaagcagaaatcagctgcattgacaataaagatgggacatgcacagtgacctacctgccgactctgccaggcgactacagcattctggtcaagtacaatgacaagcacatccctggcagccccttcacagccaagatcacagatgacagcaggcggtgctcccaggtgaagttgggctcagccgctgacttcctgctcgacatcagtgagactgacctcagcagcctgacggccagcattaaggccccatctggccgagacgagccctgtctcctgaagaggctgcccaacaaccacattggcatctccttcatcccccgggaagtgggcgaacatctggtcagcatcaagaaaaatggcaaccatgtggccaacagccccgtgtctatcatggtggtccagtcggagattggtgacgcccgccgagccaaagtctatggccgcggcctgtcagaaggccggactttcgagatgtctgacttcatcgtggacacaagggatgcaggttatggtggcatatccttggcggtggaaggccccagcaaagtggacatccagacggaggacctggaagatggcacctgcaaagtctcctacttccctaccgtgcctggggtttatatcgtctccaccaaattcgctgacgagcacgtgcctgggagcccatttaccgtgaagatcagtggggagggaagagtcaaagagagcatcacccgcaccagtcgggccccgtccgtggccactgtcgggagcatttgtgacctgaacctgaaaatcccaggggtcagagtcatgaactgctctgcccagatcctgtggggctggagggtgcagtttcatactggctctagg

SEQ ID NO: 1787 - DNA, 9211 bp, Homo sapiens
gcagagcagcaccggccgtggctccggtagcagcaagttcgaaccccgctcccgctccgcttcggttctcgctccttcggcccttgggcctccaaacaccagtccccggcagctcgttgcgcattgcgctctccccgccaccaggatgccggtaaccgagaaggatctagctgaggacgcgccttggaagaagatccagcagaacacgttcacacgctggtgcaacgagcacctcaagtgcgtgaacaaacgcatcggcaacctgcagaccgacctgagcgacgggctgcggctcatcgcgctgctcgaggtgctcagccagaagcgcatgtaccgcaagtaccatcagcggcccacctttcgccagatgcagctcgagaatgtgtccgtggcgctcgagttcctggaccgtgagagcatcaagctcgtgtccatcgatagcaaagccattgtggatgggaacctgaagctcatcttgggtctggtgtggacgctgatcctccactactccatctccatgcccgtgtgggaggatgaaggggatgatgatgccaagaagcagacgccaaagcagaggctgctggggtggattcagaacaagatcccctacttgcccatcaccaactttaaccagaactggcaagacggcaaagccctgggagccctggtagacagctgtgctccaggtctgtgcccagactgggaatcctgggacccgcagaagcctgtggataatgcacgagaagccatgcagcaggcagatgactggctgggtgtcccacaggtcatcactcctgaagaaatcattcacccggatgtggacgagcactcagttatgacttacctgtcccagttccccaaagccaagctcaagccgggggctcctctcaaacccaaactcaacccgaagaaagccagggcctatggcagaggaatcgagcccactggaaacatggtgaagcagccagccaagttcactgtggacaccatcagcgccgggcaaggagacgtgatggtgtttgttgaggacccagaagggaacaaagaggaggcacaagtgacccctgacagtgacaagaacaagacatactctgtggagtatctgcccaaggtcaccgggctacacaaagtcacagtcctctttgcaggacagcacatctccaagagcccatttgaagtgagtgttgacaaggcccagggagatgccagtaaagtcactgcaaaaggtccagggttggaagctgtagggaacatcgccaataagcccacctactttgacatctatacggcaggagctggtgtgggtgacattggtgtggaggtggaagatccccaggggaagaacaccgtggagttgctcgtggaagacaaaggaaaccaggtgtatcgatgtgtgtacaaacccatgcagcctggccctcacgtggtcaagatcttctttgctggggacactattcctaagagtcccttcgttgtgcaggttggggaagcctgcaatccaaatgcctgccgggccagtggccgaggcctacaacccaaaggcgtccgtatccgggagaccacagatttcaaggttgacaccaaagctgcaggaagtggggagctcggtgtaaccatgaagggtcctaagggtctggaggagctggtgaagcagaaagactttctggatggggtctacgcattcgagtattaccccagcaccccggggagatacagcattgccatcacatgggggggacaccacattccaaagagcccctttgaagttcaagttggccctgaagcgggtatgcagaaagtccgtgcttggggccctgggctccatggtgggattgtcgggcggtcagcggacttcgtggtagaatccattggctctgaagtggggtctctggggtttgccattgaaggcccctctcaggcaaagattgagtacaacgaccagaatgatggatcgtgtgatgtcaaatactggcccaaggagcctggcgaatatgctgttcacatcatgtgtgacgacgaagacatcaaggacagcccgtacatggccttcatccacccagccacgggaggctacaaccctgatctggttcgagcatacgggccaggtttggagaaatctggatgcattgtcaacaacctggccgagttcactgtggatcctaaggatgctggaaaagctcccttaaagatatttgctcaggatggggaaggccaacgcattgacatccagatgaagaaccggatggacggcacatatgcatgctcatacaccccggtgaaggccatcaagcacaccattgctgtggtctggggaggcgtgaacatcccgcacagcccctacagggtcaacatcgggcaaggtagccatcctcagaaggtcaaagtgtttgggccaggtgtggagagaagtggtctgaaggcaaatgaacctacacacttcacggtggactgtactgaggctggggaaggtgatgtcagtgttggcattaagtgtgatgcccgggtgttaagtgaagatgaggaagacgtggattttgacattattcacaatgccaatgatacgttcacagtcaaatatgtgcctcctgctgctgggcgatacactatcaaagttctctttgcatctcaggaaatccccgccagccctttcagagtcaaagttgacccttcccacgatgccagcaaagtgaaggcagaaggcccagggctcagcaaagcaggtgtggaaaatgggaaaccgacccacttcactgtctacaccaagggggctgggaaagccccgctcaacgtgcagttcaacagccctcttcctggcgatgcagtgaaggatttggatatcatcgataattatgactactctcacacggttaaatatacacccacccaacagggcaacatgcaggttctggtgacttacggtggcgatcccatccctaaaagccctttcactgtgggtgttgctgcaccgctggatctgagcaagataaaactcaatgggctggaaaacagggtggaagttgggaaggatcaggagttcaccgttgataccaggggggcaggaggccaggggaagctggacgtgacaatcctcagcccctctcggaaggtcgtgccatgcctagtgacacctgtgacaggccgggagaacagcacggccaagttcatccctcgggaggaggggctgtatgctgtagacgtgacctacgatggacaccctgtgcccgggagcccctacacagtggaggcctcgctgccaccagatcccagcaaggtgaaggcccacggtcccggcctcgaaggtggtctcgtgggcaagcctgccgagttcaccatcgataccaaaggagctggtactggaggtctgggcttaacggtggaaggtccgtgcgaggccaaaatcgagtgctccgacaatggtgatgggacctgctccgtctcttaccttcccacaaaacccggggagtacttcgtcaacatcctctttgaagaagtccacatacctgggtctcccttcaaagctgacattgaaatgccctttgacccctctaaagtcgtggcatcggggccaggtctcgagcacgggaaggtgggtgaagctggcctccttagcgtcgactgctcggaagcgggaccgggggccctgggcctggaagctgtctcggactcgggaacaaaagccgaagtcagtattcagaacaacaaagatggcacctacgcggtgacctacgtgcccctgacggccggcatgtacacgttgaccatgaagtatggtggcgaactcgtgccacacttccccgcccgggtcaaggtggagcccgccgtggacaccagcaggatcaaagtctttggaccaggaatagaagggaaagatgtgttccgggaagctaccaccgactttacagttgactctcggccgctgacccaggttgggggtgaccacatcaaggcccacattgccaacccctcaggggcctccaccgagtgctttgtcacagacaatgcggatgggacctaccaggtggaatacacaccctttgagaaaggtctccatgtagtggaggtgacatatgatgacgtgcctatcccaaacagtcccttcaaggtggctgtcactgaaggctgccagccatctagggtgcaagcccaaggacctggattgaaagaggcctttaccaacaagcccaatgtcttcaccgtggttaccagaggcgcaggaattggtgggcttggcataactgttgagggaccatcagagtcgaagataaattgcagagacaacaaggatggcagctgcagtgctgagtacattcctttcgcgccgggggattacgatgttaatatcacatatggaggagcccacatccccggcagccccttcagggttcctgtgaaggatgttgtggaccccagcaaggtcaagattgccggccccgggctgggctcaggcgtccgagcccgtgtcctgcagtccttcacggtggacagcagcaaggctggcctggctccgctggaagtgagggttctgggcccacgaggcttggtggagccagtgaacgtggtggacaatggagatggcacacacacagtaacctacaccccatctcaggagggaccttacatggtctcagttaaatatgctgatgaagagattcctcgcagtcccttcaaggtcaaggtccttcccacatatgatgccagcaaagtgactgccagtggccccggccttagttcctatggtgtgcctgccagtctacctgtggactttgcaattgatgcccgagatgccggggaaggcctgcttgctgttcaaataacggaccaagaaggaaaacccaaaagagccattgtccatgacaataaagatggcacgtatgctgtcacctacatccccgacaagactgggcgctatatgattggagtcacctacgggggtgacgacatcccactttctccttatcgcatccgagccacacagacgggtgatgccagcaagtgcctggccacgggtcctggaatcgcctccactgtgaaaactggcgaagaagtaggctttgtggttgatgccaagactgccgggaagggtaaagtgacctgcacggttctgaccccagatggcactgaggccgaggccgatgtcattgagaatgaagatggaacctatgacatcttctacacagctgccaagccgggcacatatgtgatctatgtgcgcttcggtggtgttgatattcctaacagccccttcactgtcatggccacagatggggaagtcacagccgtggaggaggcaccggtaaatgcatgtccccctggattcaggccctgggtgaccgaagaggcctatgtcccagtgagtgacatgaacggcctgggatttaagccttttgacctggtcattccgtttgctgtcaggaaaggagaaatcactggagaggtccacatgccttctgggaagacagccacacctgagattgtggacaacaaggacggcacggtcactgttagatatgcccccactgaggtcgggctccatgagatgcacatcaaatacatgggcagccacatccctgagagcccactccagttctacgtgaactaccccaacagtggaagtgtttctgcatacggtccaggcctcgtgtatggagtggccaacaaaactgccaccttcaccatcgtcacagaggatgcaggagaaggtggtctggacttggctattgagggcccctcaaaagcagaaatcagctgcattgacaataaagatgggacatgcacagtgacctacctgccgactctgccaggcgactacagcattctggtcaagtacaatgacaagcacatccctggcagccccttcacagccaagatcacagatgacagcaggcggtgctcccaggtgaagttgggctcagccgctgacttcctgctcgacatcagtgagactgacctcagcagcctgacggccagcattaaggccccatctggccgagacgagccctgtctcctgaagaggctgcccaacaaccacattggcatctccttcatcccccgggaagtgggcgaacatctggtcagcatcaagaaaaatggcaaccatgtggccaacagccccgtgtctatcatggtggtccagtcggagattggtgacgcccgccgagccaaagtctatggccgcggcctgtcagaaggccggactttcgagatgtctgacttcatcgtggacacaagggatgcaggttatggtggcatatccttggcggtggaaggccccagcaaagtggacatccagacggaggacctggaagatggcacctgcaaagtctcctacttccctaccgtgcctggggtttatatcgtctccaccaaattcgctgacgagcacgtgcctgaaatcaacagcagtgatatgtcggcccacgtcaccagcccctctggccgtgtgactgaggcagagattgtgcccatggggaagaactcacactgcgtccggtttgtgccccaggagatgggcgtgcacacggtcagcgtcaagtaccgtgggcagcacgtcaccggcagccccttccagttcaccgtggggccacttggtgaaggaggcgcccacaaggtgcgggcaggaggccctggcctggagagaggagaagcgggagtcccagctgagttcagcatttggacccgggaagcaggcgctggaggcctctccatcgctgttgagggccccagtaaggccgagattacattcgatgaccataaaaatgggtcgtgcggtgtatcttatattgcccaagagcctggtaactacgaggtgtccatcaagttcaatgatgagcacatcccggaaagcccctacctggtgccggtcatcgcaccctccgacgacgcccgccgcctcactgttatgagccttcaggaatcgggattaaaagttaaccagccagcatcctttgctataaggttgaatggcgcaaaaggcaagattgatgcaaaggtgcacagcccctctggagccgtggaggagtgccacgtgtctgagctggagccagataagtatgctgttcgcttcatccctcatgagaatggtgtccacaccatcgatgtcaagttcaatgggagccacgtggttggaagccccttcaaagtgcgcgttggggagcctggacaagcggggaaccctgccctggtgtccgcctatggcacgggactcgaagggggcaccacaggtatccagtcggaattctttattaacaccacccgagcaggtccagggacattatccgtcaccatcgaaggcccatccaaggttaaaatggattgccaggaaacacctgaagggtacaaagtcatgtacacccccatggctcctggtaactacctgatcagcgtcaaatacggtgggcccaaccacatcgtgggcagtcccttcaaggccaaggtgacaggccagcgtctagttagccctggctcagccaacgaggctctcaaaggcctttgtgggccagaagaagttccttcctggtggactgcagcaaagctggctccaacatgctgctgatcggggtccatgggcccaccaccccctgcgaggaggtctccatgaagcatgtaggcaaccagcaatacaacgtcacatacgtcgtcaaggagaggggcgattatgtgctggctgtgaagtggggggaggaacacatccctggcagcccttttcatgtcacagtgccttaaaacagttttctcaaatcctggagagagttcttgtggttgcttttgttgcttgtttgtaattcattttatacaaagccctccagcctgtttgtggggctgaaaccccatccctaaaatattgctgttgtaaaatgccttcagaaataagtcctagactggactcttgagggacatattggagaatcttaagaaatgcaagcttgttcagggggctgagaagatcctgagtacactaggtgcaaaccagaactcttggtggaacagaccagccactgcagcagacagaccaggaacacaatgagactgacatttcaaaaaaacaaaactggctagcctgagctgctggttcactcttcagcatttatgaaacaaggctaggggaagatgggcagagaaaaaggggacacctagtttggttgtcatttggcaaaggagatgacttaaaatccgcttaatctcttccagtgtccgtgttaatgtatttggctattagatcactagcactgctttaccgctcctcatcgccaacacccccatgctctgtggccttcttacacttctcagagggcagagtggcagccgggcaccctacagaaactcagagggcagagtggcagccaggcccacatgtctctcaagtacctgtcccctcgctctggtgattatttcttgcagaatcaccacacgagaccatcccggcagtcatggttttgctttagttttccaagtccgtttcagtcccttccttggtctgaagaaattctgcagtggcgagcagtttcccacttgccaaagatcccttttaaccaacactagcccttgtttttaacacacgctccagcccttcatcagcctgggcagtcttaccaaaatgtttaaagtgatctcagaggggcccatggattaacgccctcatcccaaggtccgtcccatgacataacactccacacccgccccagccaacttcatgggtcactttttctggaaaataatgatctgtacagacaggacagaatgaaactcctgcgggtctttggcctgaaagttgggaatggttgggggagagaagggcagcagcttattggtggtcttttcaccattggcagaaacagtgagagctgtgtggtgcagaaatccagaaatgaggtgtagggaattttgcctgccttcctgcagacctgagctggctttggaatgaggttaaagtgtcagggacgttgcctgagcccaaatgtgtagtgtggtctgggcaggcagacctttaggttttgctgcttagtcctgaggaagtggccactcttgtggcaggtgtagtatctggggcgagtgttgggggtaaaagcccaccctacagaaagtggaacagcccggagcctgatgtgaaaggaccacgggtgttgtaagctgggacacggaagccaaactggaatcaaacgccgactgtaaattgtatcttataacttattaaataaaacatttgctccgtaaa

SEQ ID NO: 1788 - DNA, 9409 bp, Homo sapiens
gcagagcagcaccggccgtggctccggtagcagcaagttcgaaccccgctcccgctccgcttcggttctcgctccttcggcccttgggcctccaaacaccagtccccggcagctcgttgcgcattgcgctctccccgccaccaggatgccggtaaccgagaaggatctagctgaggacgcgccttggaagaagatccagcagaacacgttcacacgctggtgcaacgagcacctcaagtgcgtgaacaaacgcatcggcaacctgcagaccgacctgagcgacgggctgcggctcatcgcgctgctcgaggtgctcagccagaagcgcatgtaccgcaagtaccatcagcggcccacctttcgccagatgcagctcgagaatgtgtccgtggcgctcgagttcctggaccgtgagagcatcaagctcgtgtccatcgatagcaaagccattgtggatgggaacctgaagctcatcttgggtctggtgtggacgctgatcctccactactccatctccatgcccgtgtgggaggatgaaggggatgatgatgccaagaagcagacgccaaagcagaggctgctggggtggattcagaacaagatcccctacttgcccatcaccaactttaaccagaactggcaagacggcaaagccctgggagccctggtagacagctgtgctccaggtctgtgcccagactgggaatcctgggacccgcagaagcctgtggataatgcacgagaagccatgcagcaggcagatgactggctgggtgtcccacaggtcatcactcctgaagaaatcattcacccggatgtggacgagcactcagttatgacttacctgtcccagttccccaaagccaagctcaagccgggggctcctctcaaacccaaactcaacccgaagaaagccagggcctatggcagaggaatcgagcccactggaaacatggtgaagcagccagccaagttcactgtggacaccatcagcgccgggcaaggagacgtgatggtgtttgttgaggacccagaagggaacaaagaggaggcacaagtgacccctgacagtgacaagaacaagacatactctgtggagtatctgcccaaggtcaccgggctacacaaagtcacagtcctctttgcaggacagcacatctccaagagcccatttgaagtgagtgttgacaaggcccagggagatgccagtaaagtcactgcaaaaggtccagggttggaagctgtagggaacatcgccaataagcccacctactttgacatctatacggcaggagctggtgtgggtgacattggtgtggaggtggaagatccccaggggaagaacaccgtggagttgctcgtggaagacaaaggaaaccaggtgtatcgatgtgtgtacaaacccatgcagcctggccctcacgtggtcaagatcttctttgctggggacactattcctaagagtcccttcgttgtgcaggttggggaagcctgcaatccaaatgcctgccgggccagtggccgaggcctacaacccaaaggcgtccgtatccgggagaccacagatttcaaggttgacaccaaagctgcaggaagtggggagctcggtgtaaccatgaagggtcctaagggtctggaggagctggtgaagcagaaagactttctggatggggtctacgcattcgagtattaccccagcaccccggggagatacagcattgccatcacatgggggggacaccacattccaaagagcccctttgaagttcaagttggccctgaagcgggtatgcagaaagtccgtgcttggggccctgggctccatggtgggattgtcgggcggtcagcggacttcgtggtagaatccattggctctgaagtggggtctctggggtttgccattgaaggcccctctcaggcaaagattgagtacaacgaccagaatgatggatcgtgtgatgtcaaatactggcccaaggagcctggcgaatatgctgttcacatcatgtgtgacgacgaagacatcaaggacagcccgtacatggccttcatccacccagccacgggaggctacaaccctgatctggttcgagcatacgggccaggtttggagaaatctggatgcattgtcaacaacctggccgagttcactgtggatcctaaggatgctggaaaagctcccttaaagatatttgctcaggatggggaaggccaacgcattgacatccagatgaagaaccggatggacggcacatatgcatgctcatacaccccggtgaaggccatcaagcacaccattgctgtggtctggggaggcgtgaacatcccgcacagcccctacagggtcaacatcgggcaaggtagccatcctcagaaggtcaaagtgtttgggccaggtgtggagagaagtggtctgaaggcaaatgaacctacacacttcacggtggactgtactgaggctggggaaggtgatgtcagtgttggcattaagtgtgatgcccgggtgttaagtgaagatgaggaagacgtggattttgacattattcacaatgccaatgatacgttcacagtcaaatatgtgcctcctgctgctgggcgatacactatcaaagttctctttgcatctcaggaaatccccgccagccctttcagagtcaaagttgacccttcccacgatgccagcaaagtgaaggcagaaggcccagggctcagcaaagcaggtgtggaaaatgggaaaccgacccacttcactgtctacaccaagggggctgggaaagccccgctcaacgtgcagttcaacagccctcttcctggcgatgcagtgaaggatttggatatcatcgataattatgactactctcacacggttaaatatacacccacccaacagggcaacatgcaggttctggtgacttacggtggcgatcccatccctaaaagccctttcactgtgggtgttgctgcaccgctggatctgagcaagataaaactcaatgggctggaaaacagggtggaagttgggaaggatcaggagttcaccgttgataccaggggggcaggaggccaggggaagctggacgtgacaatcctcagcccctctcggaaggtcgtgccatgcctagtgacacctgtgacaggccgggagaacagcacggccaagttcatccctcgggaggaggggctgtatgctgtagacgtgacctacgatggacaccctgtgcccgggagcccctacacagtggaggcctcgctgccaccagatcccagcaaggtgaaggcccacggtcccggcctcgaaggtggtctcgtgggcaagcctgccgagttcaccatcgataccaaaggagctggtactggaggtctgggcttaacggtggaaggtccgtgcgaggccaaaatcgagtgctccgacaatggtgatgggacctgctccgtctcttaccttcccacaaaacccggggagtacttcgtcaacatcctctttgaagaagtccacatacctgggtctcccttcaaagctgacattgaaatgccctttgacccctctaaagtcgtggcatcggggccaggtctcgagcacgggaaggtgggtgaagctggcctccttagcgtcgactgctcggaagcgggaccgggggccctgggcctggaagctgtctcggactcgggaacaaaagccgaagtcagtattcagaacaacaaagatggcacctacgcggtgacctacgtgcccctgacggccggcatgtacacgttgaccatgaagtatggtggcgaactcgtgccacacttccccgcccgggtcaaggtggagcccgccgtggacaccagcaggatcaaagtctttggaccaggaatagaagggaaagatgtgttccgggaagctaccaccgactttacagttgactctcggccgctgacccaggttgggggtgaccacatcaaggcccacattgccaacccctcaggggcctccaccgagtgctttgtcacagacaatgcggatgggacctaccaggtggaatacacaccctttgagaaaggtctccatgtagtggaggtgacatatgatgacgtgcctatcccaaacagtcccttcaaggtggctgtcactgaaggctgccagccatctagggtgcaagcccaaggacctggattgaaagaggcctttaccaacaagcccaatgtcttcaccgtggttaccagaggcgcaggaattggtgggcttggcataactgttgagggaccatcagagtcgaagataaattgcagagacaacaaggatggcagctgcagtgctgagtacattcctttcgcgccgggggattacgatgttaatatcacatatggaggagcccacatccccggcagccccttcagggttcctgtgaaggatgttgtggaccccagcaaggtcaagattgccggccccgggctgggctcaggcgtccgagcccgtgtcctgcagtccttcacggtggacagcagcaaggctggcctggctccgctggaagtgagggttctgggcccacgagctgacgacacggattcccagtcatggcgcagccccttgaaagccctttcagagttctttaaaggtgacccgaagggcttggtggagccagtgaacgtggtggacaatggagatggcacacacacagtaacctacaccccatctcaggagggaccttacatggtctcagttaaatatgctgatgaagagattcctcgcagtcccttcaaggtcaaggtccttcccacatatgatgccagcaaagtgactgccagtggccccggccttagttcctatggtgtgcctgccagtctacctgtggactttgcaattgatgcccgagatgccggggaaggcctgcttgctgttcaaataacggaccaagaaggaaaacccaaaagagccattgtccatgacaataaagatggcacgtatgctgtcacctacatccccgacaagactgggcgctatatgattggagtcacctacgggggtgacgacatcccactttctccttatcgcatccgagccacacagacgggtgatgccagcaagtgcctggccacgggtcctggaatcgcctccactgtgaaaactggcgaagaagtaggctttgtggttgatgccaagactgccgggaagggtaaagtgacctgcacggttctgaccccagatggcactgaggccgaggccgatgtcattgagaatgaagatggaacctatgacatcttctacacagctgccaagccgggcacatatgtgatctatgtgcgcttcggtggtgttgatattcctaacagccccttcactgtcatggccacagatggggaagtcacagccgtggaggaggcaccggtaaatgcatgtccccctggattcaggccctgggtgaccgaagaggcctatgtcccagtgagtgacatgaacggcctgggatttaagccttttgacctggtcattccgtttgctgtcaggaaaggagaaatcactggagaggtccacatgccttctgggaagacagccacacctgagattgtggacaacaaggacggcacggtcactgttagatatgcccccactgaggtcgggctccatgagatgcacatcaaatacatgggcagccacatccctgagagcccactccagttctacgtgaactaccccaacagtggaagtgtttctgcatacggtccaggcctcgtgtatggagtggccaacaaaactgccaccttcaccatcgtcacagaggatgcaggagaaggtggtctggacttggctattgagggcccctcaaaagcagaaatcagctgcattgacaataaagatgggacatgcacagtgacctacctgccgactctgccaggcgactacagcattctggtcaagtacaatgacaagcacatccctggcagccccttcacagccaagatcacagatgacagcaggcggtgctcccaggtgaagttgggctcagccgctgacttcctgctcgacatcagtgagactgacctcagcagcctgacggccagcattaaggccccatctggccgagacgagccctgtctcctgaagaggctgcccaacaaccacattggcatctccttcatcccccgggaagtgggcgaacatctggtcagcatcaagaaaaatggcaaccatgtggccaacagccccgtgtctatcatggtggtccagtcggagattggtgacgcccgccgagccaaagtctatggccgcggcctgtcagaaggccggactttcgagatgtctgacttcatcgtggacacaagggatgcaggttatggtggcatatccttggcggtggaaggccccagcaaagtggacatccagacggaggacctggaagatggcacctgcaaagtctcctacttccctaccgtgcctggggtttatatcgtctccaccaaattcgctgacgagcacgtgcctgggagcccatttaccgtgaagatcagtggggagggaagagtcaaagagagcatcacccgcaccagtcgggccccgtccgtggccactgtcgggagcatttgtgacctgaacctgaaaatcccagaaatcaacagcagtgatatgtcggcccacgtcaccagcccctctggccgtgtgactgaggcagagattgtgcccatggggaagaactcacactgcgtccggtttgtgccccaggagatgggcgtgcacacggtcagcgtcaagtaccgtgggcagcacgtcaccggcagccccttccagttcaccgtggggccacttggtgaaggaggcgcccacaaggtgcgggcaggaggccctggcctggagagaggagaagcgggagtcccagctgagttcagcatttggacccgggaagcaggcgctggaggcctctccatcgctgttgagggccccagtaaggccgagattacattcgatgaccataaaaatgggtcgtgcggtgtatcttatattgcccaagagcctggtaactacgaggtgtccatcaagttcaatgatgagcacatcccggaaagcccctacctggtgccggtcatcgcaccctccgacgacgcccgccgcctcactgttatgagccttcaggaatcgggattaaaagttaaccagccagcatcctttgctataaggttgaatggcgcaaaaggcaagattgatgcaaaggtgcacagcccctctggagccgtggaggagtgccacgtgtctgagctggagccagataagtatgctgttcgcttcatccctcatgagaatggtgtccacaccatcgatgtcaagttcaatgggagccacgtggttggaagccccttcaaagtgcgcgttggggagcctggacaagcggggaaccctgccctggtgtccgcctatggcacgggactcgaagggggcaccacaggtatccagtcggaattctttattaacaccacccgagcaggtccagggacattatccgtcaccatcgaaggcccatccaaggttaaaatggattgccaggaaacacctgaagggtacaaagtcatgtacacccccatggctcctggtaactacctgatcagcgtcaaatacggtgggcccaaccacatcgtgggcagtcccttcaaggccaaggtgacaggccagcgtctagttagccctggctcagccaacgaggctctcaaaggcctttgtgggccagaagaagttccttcctggtggactgcagcaaagctggctccaacatgctgctgatcggggtccatgggcccaccaccccctgcgaggaggtctccatgaagcatgtaggcaaccagcaatacaacgtcacatacgtcgtcaaggagaggggcgattatgtgctggctgtgaagtggggggaggaacacatccctggcagcccttttcatgtcacagtgccttaaaacagttttctcaaatcctggagagagttcttgtggttgcttttgttgcttgtttgtaattcattttatacaaagccctccagcctgtttgtggggctgaaaccccatccctaaaatattgctgttgtaaaatgccttcagaaataagtcctagactggactcttgagggacatattggagaatcttaagaaatgcaagcttgttcagggggctgagaagatcctgagtacactaggtgcaaaccagaactcttggtggaacagaccagccactgcagcagacagaccaggaacacaatgagactgacatttcaaaaaaacaaaactggctagcctgagctgctggttcactcttcagcatttatgaaacaaggctaggggaagatgggcagagaaaaaggggacacctagtttggttgtcatttggcaaaggagatgacttaaaatccgcttaatctcttccagtgtccgtgttaatgtatttggctattagatcactagcactgctttaccgctcctcatcgccaacacccccatgctctgtggccttcttacacttctcagagggcagagtggcagccgggcaccctacagaaactcagagggcagagtggcagccaggcccacatgtctctcaagtacctgtcccctcgctctggtgattatttcttgcagaatcaccacacgagaccatcccggcagtcatggttttgctttagttttccaagtccgtttcagtcccttccttggtctgaagaaattctgcagtggcgagcagtttcccacttgccaaagatcccttttaaccaacactagcccttgtttttaacacacgctccagcccttcatcagcctgggcagtcttaccaaaatgtttaaagtgatctcagaggggcccatggattaacgccctcatcccaaggtccgtcccatgacataacactccacacccgccccagccaacttcatgggtcactttttctggaaaataatgatctgtacagacaggacagaatgaaactcctgcgggtctttggcctgaaagttgggaatggttgggggagagaagggcagcagcttattggtggtcttttcaccattggcagaaacagtgagagctgtgtggtgcagaaatccagaaatgaggtgtagggaattttgcctgccttcctgcagacctgagctggctttggaatgaggttaaagtgtcagggacgttgcctgagcccaaatgtgtagtgtggtctgggcaggcagacctttaggttttgctgcttagtcctgaggaagtggccactcttgtggcaggtgtagtatctggggcgagtgttgggggtaaaagcccaccctacagaaagtggaacagcccggagcctgatgtgaaaggaccacgggtgttgtaagctgggacacggaagccaaactggaatcaaacgccgactgtaaattgtatcttataacttattaaataaaacatttgctccgtaaa

SEQ ID NO: 1789 - DNA, 9444 bp, Homo sapiens
gcagagcagcaccggccgtggctccggtagcagcaagttcgaaccccgctcccgctccgcttcggttctcgctccttcggcccttgggcctccaaacaccagtccccggcagctcgttgcgcattgcgctctccccgccaccaggatgccggtaaccgagaaggatctagctgaggacgcgccttggaagaagatccagcagaacacgttcacacgctggtgcaacgagcacctcaagtgcgtgaacaaacgcatcggcaacctgcagaccgacctgagcgacgggctgcggctcatcgcgctgctcgaggtgctcagccagaagcgcatgtaccgcaagtaccatcagcggcccacctttcgccagatgcagctcgagaatgtgtccgtggcgctcgagttcctggaccgtgagagcatcaagctcgtgtccatcgatagcaaagccattgtggatgggaacctgaagctcatcttgggtctggtgtggacgctgatcctccactactccatctccatgcccgtgtgggaggatgaaggggatgatgatgccaagaagcagacgccaaagcagaggctgctggggtggattcagaacaagatcccctacttgcccatcaccaactttaaccagaactggcaagacggcaaagccctgggagccctggtagacagctgtgctccaggtctgtgcccagactgggaatcctgggacccgcagaagcctgtggataatgcacgagaagccatgcagcaggcagatgactggctgggtgtcccacaggtcatcactcctgaagaaatcattcacccggatgtggacgagcactcagttatgacttacctgtcccagttccccaaagccaagctcaagccgggggctcctctcaaacccaaactcaacccgaagaaagccagggcctatggcagaggaatcgagcccactggaaacatggtgaagcagccagccaagttcactgtggacaccatcagcgccgggcaaggagacgtgatggtgtttgttgaggacccagaagggaacaaagaggaggcacaagtgacccctgacagtgacaagaacaagacatactctgtggagtatctgcccaaggtcaccgggctacacaaagtcacagtcctctttgcaggacagcacatctccaagagcccatttgaagtgagtgttgacaaggcccagggagatgccagtaaagtcactgcaaaaggtccagggttggaagctgtagggaacatcgccaataagcccacctactttgacatctatacggcaggagctggtgtgggtgacattggtgtggaggtggaagatccccaggggaagaacaccgtggagttgctcgtggaagacaaaggaaaccaggtgtatcgatgtgtgtacaaacccatgcagcctggccctcacgtggtcaagatcttctttgctggggacactattcctaagagtcccttcgttgtgcaggttggggaagcctgcaatccaaatgcctgccgggccagtggccgaggcctacaacccaaaggcgtccgtatccgggagaccacagatttcaaggttgacaccaaagctgcaggaagtggggagctcggtgtaaccatgaagggtcctaagggtctggaggagctggtgaagcagaaagactttctggatggggtctacgcattcgagtattaccccagcaccccggggagatacagcattgccatcacatgggggggacaccacattccaaagagcccctttgaagttcaagttggccctgaagcgggtatgcagaaagtccgtgcttggggccctgggctccatggtgggattgtcgggcggtcagcggacttcgtggtagaatccattggctctgaagtggggtctctggggtttgccattgaaggcccctctcaggcaaagattgagtacaacgaccagaatgatggatcgtgtgatgtcaaatactggcccaaggagcctggcgaatatgctgttcacatcatgtgtgacgacgaagacatcaaggacagcccgtacatggccttcatccacccagccacgggaggctacaaccctgatctggttcgagcatacgggccaggtttggagaaatctggatgcattgtcaacaacctggccgagttcactgtggatcctaaggatgctggaaaagctcccttaaagatatttgctcaggatggggaaggccaacgcattgacatccagatgaagaaccggatggacggcacatatgcatgctcatacaccccggtgaaggccatcaagcacaccattgctgtggtctggggaggcgtgaacatcccgcacagcccctacagggtcaacatcgggcaaggtagccatcctcagaaggtcaaagtgtttgggccaggtgtggagagaagtggtctgaaggcaaatgaacctacacacttcacggtggactgtactgaggctggggaaggtgatgtcagtgttggcattaagtgtgatgcccgggtgttaagtgaagatgaggaagacgtggattttgacattattcacaatgccaatgatacgttcacagtcaaatatgtgcctcctgctgctgggcgatacactatcaaagttctctttgcatctcaggaaatccccgccagccctttcagagtcaaagttgacccttcccacgatgccagcaaagtgaaggcagaaggcccagggctcagcaaagcaggtgtggaaaatgggaaaccgacccacttcactgtctacaccaagggggctgggaaagccccgctcaacgtgcagttcaacagccctcttcctggcgatgcagtgaaggatttggatatcatcgataattatgactactctcacacggttaaatatacacccacccaacagggcaacatgcaggttctggtgacttacggtggcgatcccatccctaaaagccctttcactgtgggtgttgctgcaccgctggatctgagcaagataaaactcaatgggctggaaaacagggtggaagttgggaaggatcaggagttcaccgttgataccaggggggcaggaggccaggggaagctggacgtgacaatcctcagcccctctcggaaggtcgtgccatgcctagtgacacctgtgacaggccgggagaacagcacggccaagttcatccctcgggaggaggggctgtatgctgtagacgtgacctacgatggacaccctgtgcccgggagcccctacacagtggaggcctcgctgccaccagatcccagcaaggtgaaggcccacggtcccggcctcgaaggtggtctcgtgggcaagcctgccgagttcaccatcgataccaaaggagctggtactggaggtctgggcttaacggtggaaggtccgtgcgaggccaaaatcgagtgctccgacaatggtgatgggacctgctccgtctcttaccttcccacaaaacccggggagtacttcgtcaacatcctctttgaagaagtccacatacctgggtctcccttcaaagctgacattgaaatgccctttgacccctctaaagtcgtggcatcggggccaggtctcgagcacgggaaggtgggtgaagctggcctccttagcgtcgactgctcggaagcgggaccgggggccctgggcctggaagctgtctcggactcgggaacaaaagccgaagtcagtattcagaacaacaaagatggcacctacgcggtgacctacgtgcccctgacggccggcatgtacacgttgaccatgaagtatggtggcgaactcgtgccacacttccccgcccgggtcaaggtggagcccgccgtggacaccagcaggatcaaagtctttggaccaggaatagaagggaaagatgtgttccgggaagctaccaccgactttacagttgactctcggccgctgacccaggttgggggtgaccacatcaaggcccacattgccaacccctcaggggcctccaccgagtgctttgtcacagacaatgcggatgggacctaccaggtggaatacacaccctttgagaaaggtctccatgtagtggaggtgacatatgatgacgtgcctatcccaaacagtcccttcaaggtggctgtcactgaaggctgccagccatctagggtgcaagcccaaggacctggattgaaagaggcctttaccaacaagcccaatgtcttcaccgtggttaccagaggcgcaggaattggtgggcttggcataactgttgagggaccatcagagtcgaagataaattgcagagacaacaaggatggcagctgcagtgctgagtacattcctttcgcgccgggggattacgatgttaatatcacatatggaggagcccacatccccggcagccccttcagggttcctgtgaaggatgttgtggaccccagcaaggtcaagattgccggccccgggctgggctcaggcgtccgagcccgtgtcctgcagtccttcacggtggacagcagcaaggctggcctggctccgctggaagtgagggttctgggcccacgaggcttggtggagccagtgaacgtggtggacaatggagatggcacacacacagtaacctacaccccatctcaggagggaccttacatggtctcagttaaatatgctgatgaagagattcctcgcagtcccttcaaggtcaaggtccttcccacatatgatgccagcaaagtgactgccagtggccccggccttagttcctatggtgtgcctgccagtctacctgtggactttgcaattgatgcccgagatgccggggaaggcctgcttgctgttcaaataacggaccaagaaggaaaacccaaaagagccattgtccatgacaataaagatggcacgtatgctgtcacctacatccccgacaagactgggcgctatatgattggagtcacctacgggggtgacgacatcccactttctccttatcgcatccgagccacacagacgggtgatgccagcaagtgcctggccacgggtcctggaatcgcctccactgtgaaaactggcgaagaagtaggctttgtggttgatgccaagactgccgggaagggtaaagtgacctgcacggttctgaccccagatggcactgaggccgaggccgatgtcattgagaatgaagatggaacctatgacatcttctacacagctgccaagccgggcacatatgtgatctatgtgcgcttcggtggtgttgatattcctaacagccccttcactgtcatggccacagatggggaagtcacagccgtggaggaggcaccggtaaatgcatgtccccctggattcaggccctgggtgaccgaagaggcctatgtcccagtgagtgacatgaacggcctgggatttaagccttttgacctggtcattccgtttgctgtcaggaaaggagaaatcactggagaggtccacatgccttctgggaagacagccacacctgagattgtggacaacaaggacggcacggtcactgttagatatgcccccactgaggtcgggctccatgagatgcacatcaaatacatgggcagccacatccctgagagcccactccagttctacgtgaactaccccaacagtggaagtgtttctgcatacggtccaggcctcgtgtatggagtggccaacaaaactgccaccttcaccatcgtcacagaggatgcaggagaaggtggtctggacttggctattgagggcccctcaaaagcagaaatcagctgcattgacaataaagatgggacatgcacagtgacctacctgccgactctgccaggcgactacagcattctggtcaagtacaatgacaagcacatccctggcagccccttcacagccaagatcacagatgacagcaggcggtgctcccaggtgaagttgggctcagccgctgacttcctgctcgacatcagtgagactgacctcagcagcctgacggccagcattaaggccccatctggccgagacgagccctgtctcctgaagaggctgcccaacaaccacattggcatctccttcatcccccgggaagtgggcgaacatctggtcagcatcaagaaaaatggcaaccatgtggccaacagccccgtgtctatcatggtggtccagtcggagattggtgacgcccgccgagccaaagtctatggccgcggcctgtcagaaggccggactttcgagatgtctgacttcatcgtggacacaagggatgcaggttatggtggcatatccttggcggtggaaggccccagcaaagtggacatccagacggaggacctggaagatggcacctgcaaagtctcctacttccctaccgtgcctggggtttatatcgtctccaccaaattcgctgacgagcacgtgcctgggagcccatttaccgtgaagatcagtggggagggaagagtcaaagagagcatcacccgcaccagtcgggccccgtccgtggccactgtcgggagcatttgtgacctgaacctgaaaatcccagaaatcaacagcagtgatatgtcggcccacgtcaccagcccctctggccgtgtgactgaggcagagattgtgcccatggggaagaactcacactgcgtccggtttgtgccccaggagatgggcgtgcacacggtcagcgtcaagtaccgtgggcagcacgtcaccggcagccccttccagttcaccgtggggccacttggtgaaggaggcgcccacaaggtgcgggcaggaggccctggcctggagagaggagaagcgggagtcccagctgagttcagcatttggacccgggaagcaggcgctggaggcctctccatcgctgttgagggccccagtaaggccgagattacattcgatgaccataaaaatgggtcgtgcggtgtatcttatattgcccaagagcctggtaactacgaggtgtccatcaagttcaatgatgagcacatcccggaaagcccctacctggtgccggtcatcgcaccctccgacgacgcccgccgcctcactgttatgagccttcaggaatcgggattaaaagttaaccagccagcatcctttgctataaggttgaatggcgcaaaaggcaagattgatgcaaaggtgcacagcccctctggagccgtggaggagtgccacgtgtctgagctggagccagataagtatgctgttcgcttcatccctcatgagaatggtgtccacaccatcgatgtcaagttcaatgggagccacgtggttggaagccccttcaaagtgcgcgttggggagcctggacaagcggggaaccctgccctggtgtccgcctatggcacgggactcgaagggggcaccacaggtatccagtcggaattctttattaacaccacccgagcaggtccagggacattatccgtcaccatcgaaggcccatccaaggttaaaatggattgccaggaaacacctgaagggtacaaagtcatgtacacccccatggctcctggtaactacctgatcagcgtcaaatacggtgggcccaaccacatcgtgggcagtcccttcaaggccaaggtgacaggccagcgtctagttagccctggctcagccaacgagacctcatccatcctggtggagtcagtgaccaggtcgtctacagagacctgctatagcgccattcccaaggcatcctcggacgccagcaaggtgacctctaagggggcagggctctcaaaggcctttgtgggccagaagaagttccttcctggtggactgcagcaaagctggctccaacatgctgctgatcggggtccatgggcccaccaccccctgcgaggaggtctccatgaagcatgtaggcaaccagcaatacaacgtcacatacgtcgtcaaggagaggggcgattatgtgctggctgtgaagtggggggaggaacacatccctggcagcccttttcatgtcacagtgccttaaaacagttttctcaaatcctggagagagttcttgtggttgcttttgttgcttgtttgtaattcattttatacaaagccctccagcctgtttgtggggctgaaaccccatccctaaaatattgctgttgtaaaatgccttcagaaataagtcctagactggactcttgagggacatattggagaatcttaagaaatgcaagcttgttcagggggctgagaagatcctgagtacactaggtgcaaaccagaactcttggtggaacagaccagccactgcagcagacagaccaggaacacaatgagactgacatttcaaaaaaacaaaactggctagcctgagctgctggttcactcttcagcatttatgaaacaaggctaggggaagatgggcagagaaaaaggggacacctagtttggttgtcatttggcaaaggagatgacttaaaatccgcttaatctcttccagtgtccgtgttaatgtatttggctattagatcactagcactgctttaccgctcctcatcgccaacacccccatgctctgtggccttcttacacttctcagagggcagagtggcagccgggcaccctacagaaactcagagggcagagtggcagccaggcccacatgtctctcaagtacctgtcccctcgctctggtgattatttcttgcagaatcaccacacgagaccatcccggcagtcatggttttgctttagttttccaagtccgtttcagtcccttccttggtctgaagaaattctgcagtggcgagcagtttcccacttgccaaagatcccttttaaccaacactagcccttgtttttaacacacgctccagcccttcatcagcctgggcagtcttaccaaaatgtttaaagtgatctcagaggggcccatggattaacgccctcatcccaaggtccgtcccatgacataacactccacacccgccccagccaacttcatgggtcactttttctggaaaataatgatctgtacagacaggacagaatgaaactcctgcgggtctttggcctgaaagttgggaatggttgggggagagaagggcagcagcttattggtggtcttttcaccattggcagaaacagtgagagctgtgtggtgcagaaatccagaaatgaggtgtagggaattttgcctgccttcctgcagacctgagctggctttggaatgaggttaaagtgtcagggacgttgcctgagcccaaatgtgtagtgtggtctgggcaggcagacctttaggttttgctgcttagtcctgaggaagtggccactcttgtggcaggtgtagtatctggggcgagtgttgggggtaaaagcccaccctacagaaagtggaacagcccggagcctgatgtgaaaggaccacgggtgttgtaagctgggacacggaagccaaactggaatcaaacgccgactgtaaattgtatcttataacttattaaataaaacatttgctccgtaaa

SEQ ID NO: 1790 - DNA, 9094 bp, Homo sapiens
gcagagcagcaccggccgtggctccggtagcagcaagttcgaaccccgctcccgctccgcttcggttctcgctccttcggcccttgggcctccaaacaccagtccccggcagctcgttgcgcattgcgctctccccgccaccaggatgccggtaaccgagaaggatctagctgaggacgcgccttggaagaagatccagcagaacacgttcacacgctggtgcaacgagcacctcaagtgcgtgaacaaacgcatcggcaacctgcagaccgacctgagcgacgggctgcggctcatcgcgctgctcgaggtgctcagccagaagcgcatgtaccgcaagtaccatcagcggcccacctttcgccagatgcagctcgagaatgtgtccgtggcgctcgagttcctggaccgtgagagcatcaagctcgtgtccatcgatagcaaagccattgtggatgggaacctgaagctcatcttgggtctggtgtggacgctgatcctccactactccatctccatgcccgtgtgggaggatgaaggggatgatgatgccaagaagcagacgccaaagcagaggctgctggggtggattcagaacaagatcccctacttgcccatcaccaactttaaccagaactggcaagacggcaaagccctgggagccctggtagacagctgtgctccaggtctgtgcccagactgggaatcctgggacccgcagaagcctgtggataatgcacgagaagccatgcagcaggcagatgactggctgggtgtcccacaggtcatcactcctgaagaaatcattcacccggatgtggacgagcactcagttatgacttacctgtcccagttccccaaagccaagctcaagccgggggctcctctcaaacccaaactcaacccgaagaaagccagggcctatggcagaggaatcgagcccactggaaacatggtgaagcagccagccaagttcactgtggacaccatcagcgccgggcaaggagacgtgatggtgtttgttgaggacccagaagggaacaaagaggaggcacaagtgacccctgacagtgacaagaacaagacatactctgtggagtatctgcccaaggtcaccgggctacacaaagtcacagtcctctttgcaggacagcacatctccaagagcccatttgaagtgagtgttgacaaggcccagggagatgccagtaaagtcactgcaaaaggtccagggttggaagctgtagggaacatcgccaataagcccacctactttgacatctatacggcaggagctggtgtgggtgacattggtgtggaggtggaagatccccaggggaagaacaccgtggagttgctcgtggaagacaaaggaaaccaggtgtatcgatgtgtgtacaaacccatgcagcctggccctcacgtggtcaagatcttctttgctggggacactattcctaagagtcccttcgttgtgcaggttggggaagcctgcaatccaaatgcctgccgggccagtggccgaggcctacaacccaaaggcgtccgtatccgggagaccacagatttcaaggttgacaccaaagctgcaggaagtggggagctcggtgtaaccatgaagggtcctaagggtctggaggagctggtgaagcagaaagactttctggatggggtctacgcattcgagtattaccccagcaccccggggagatacagcattgccatcacatgggggggacaccacattccaaagagcccctttgaagttcaagttggccctgaagcgggtatgcagaaagtccgtgcttggggccctgggctccatggtgggattgtcgggcggtcagcggacttcgtggtagaatccattggctctgaagtggggtctctggggtttgccattgaaggcccctctcaggcaaagattgagtacaacgaccagaatgatggatcgtgtgatgtcaaatactggcccaaggagcctggcgaatatgctgttcacatcatgtgtgacgacgaagacatcaaggacagcccgtacatggccttcatccacccagccacgggaggctacaaccctgatctggttcgagcatacgggccaggtttggagaaatctggatgcattgtcaacaacctggccgagttcactgtggatcctaaggatgctggaaaagctcccttaaagatatttgctcaggatggggaaggccaacgcattgacatccagatgaagaaccggatggacggcacatatgcatgctcatacaccccggtgaaggccatcaagcacaccattgctgtggtctggggaggcgtgaacatcccgcacagcccctacagggtcaacatcgggcaaggtagccatcctcagaaggtcaaagtgtttgggccaggtgtggagagaagtggtctgaaggcaaatgaacctacacacttcacggtggactgtactgaggctggggaaggtgatgtcagtgttggcattaagtgtgatgcccgggtgttaagtgaagatgaggaagacgtggattttgacattattcacaatgccaatgatacgttcacagtcaaatatgtgcctcctgctgctgggcgatacactatcaaagttctctttgcatctcaggaaatccccgccagccctttcagagtcaaagttgacccttcccacgatgccagcaaagtgaaggcagaaggcccagggctcagcaaagcaggtgtggaaaatgggaaaccgacccacttcactgtctacaccaagggggctgggaaagccccgctcaacgtgcagttcaacagccctcttcctggcgatgcagtgaaggatttggatatcatcgataattatgactactctcacacggttaaatatacacccacccaacagggcaacatgcaggttctggtgacttacggtggcgatcccatccctaaaagccctttcactgtgggtgttgctgcaccgctggatctgagcaagataaaactcaatgggctggaaaacagggtggaagttgggaaggatcaggagttcaccgttgataccaggggggcaggaggccaggggaagctggacgtgacaatcctcagcccctctcggaaggtcgtgccatgcctagtgacacctgtgacaggccgggagaacagcacggccaagttcatccctcgggaggaggggctgtatgctgtagacgtgacctacgatggacaccctgtgcccgggagcccctacacagtggaggcctcgctgccaccagatcccagcaaggtgaaggcccacggtcccggcctcgaaggtggtctcgtgggcaagcctgccgagttcaccatcgataccaaaggagctggtactggaggtctgggcttaacggtggaaggtccgtgcgaggccaaaatcgagtgctccgacaatggtgatgggacctgctccgtctcttaccttcccacaaaacccggggagtacttcgtcaacatcctctttgaagaagtccacatacctgggtctcccttcaaagctgacattgaaatgccctttgacccctctaaagtcgtggcatcggggccaggtctcgagcacgggaaggtgggtgaagctggcctccttagcgtcgactgctcggaagcgggaccgggggccctgggcctggaagctgtctcggactcgggaacaaaagccgaagtcagtattcagaacaacaaagatggcacctacgcggtgacctacgtgcccctgacggccggcatgtacacgttgaccatgaagtatggtggcgaactcgtgccacacttccccgcccgggtcaaggtggagcccgccgtggacaccagcaggatcaaagtctttggaccaggaatagaagggaaagatgtgttccgggaagctaccaccgactttacagttgactctcggccgctgacccaggttgggggtgaccacatcaaggcccacattgccaacccctcaggggcctccaccgagtgctttgtcacagacaatgcggatgggacctaccaggtggaatacacaccctttgagaaaggtctccatgtagtggaggtgacatatgatgacgtgcctatcccaaacagtcccttcaaggtggctgtcactgaaggctgccagccatctagggtgcaagcccaaggacctggattgaaagaggcctttaccaacaagcccaatgtcttcaccgtggttaccagaggcgcaggaattggtgggcttggcataactgttgagggaccatcagagtcgaagataaattgcagagacaacaaggatggcagctgcagtgctgagtacattcctttcgcgccgggggattacgatgttaatatcacatatggaggagcccacatccccggcagccccttcagggttcctgtgaaggatgttgtggaccccagcaaggtcaagattgccggccccgggctgggctcaggcgtccgagcccgtgtcctgcagtccttcacggtggacagcagcaaggctggcctggctccgctggaagtgagggttctgggcccacgaggcttggtggagccagtgaacgtggtggacaatggagatggcacacacacagtaacctacaccccatctcaggagggaccttacatggtctcagttaaatatgctgatgaagagattcctcgcagtcccttcaaggtcaaggtccttcccacatatgatgccagcaaagtgactgccagtggccccggccttagttcctatggtgtgcctgccagtctacctgtggactttgcaattgatgcccgagatgccggggaaggcctgcttgctgttcaaataacggaccaagaaggaaaacccaaaagagccattgtccatgacaataaagatggcacgtatgctgtcacctacatccccgacaagactgggcgctatatgattggagtcacctacgggggtgacgacatcccactttctccttatcgcatccgagccacacagacgggtgatgccagcaagtgcctggccacgggtcctggaatcgcctccactgtgaaaactggcgaagaagtaggctttgtggttgatgccaagactgccgggaagggtaaagtgacctgcacggttctgaccccagatggcactgaggccgaggccgatgtcattgagaatgaagatggaacctatgacatcttctacacagctgccaagccgggcacatatgtgatctatgtgcgcttcggtggtgttgatattcctaacagccccttcactgtcatggtgaccgaagaggcctatgtcccagtgagtgacatgaacggcctgggatttaagccttttgacctggtcattccgtttgctgtcaggaaaggagaaatcactggagaggtccacatgccttctgggaagacagccacacctgagattgtggacaacaaggacggcacggtcactgttagatatgcccccactgaggtcgggctccatgagatgcacatcaaatacatgggcagccacatccctgagagcccactccagttctacgtgaactaccccaacagtggaagtgtttctgcatacggtccaggcctcgtgtatggagtggccaacaaaactgccaccttcaccatcgtcacagaggatgcaggagaaggtggtctggacttggctattgagggcccctcaaaagcagaaatcagctgcattgacaataaagatgggacatgcacagtgacctacctgccgactctgccaggcgactacagcattctggtcaagtacaatgacaagcacatccctggcagccccttcacagccaagatcacagatgacagcaggcggtgctcccaggtgaagttgggctcagccgctgacttcctgctcgacatcagtgagactgacctcagcagcctgacggccagcattaaggccccatctggccgagacgagccctgtctcctgaagaggctgcccaacaaccacattggcatctccttcatcccccgggaagtgggcgaacatctggtcagcatcaagaaaaatggcaaccatgtggccaacagccccgtgtctatcatggtggtccagtcggagattggtgacgcccgccgagccaaagtctatggccgcggcctgtcagaaggccggactttcgagatgtctgacttcatcgtggacacaagggatgcaggttatggtggcatatccttggcggtggaaggccccagcaaagtggacatccagacggaggacctggaagatggcacctgcaaagtctcctacttccctaccgtgcctggggtttatatcgtctccaccaaattcgctgacgagcacgtgcctgggagcccatttaccgtgaagatcagtggggagggaagagtcaaagagagcatcacccgcaccagtcgggccccgtccgtggccactgtcgggagcatttgtgacctgaacctgaaaatcccagaaatcaacagcagtgatatgtcggcccacgtcaccagcccctctggccgtgtgactgaggcagagattgtgcccatggggaagaactcacactgcgtccggtttgtgccccaggagatgggcgtgcacacggtcagcgtcaagtaccgtgggcagcacgtcaccggcagccccttccagttcaccgtggggccacttggtgaaggaggcgcccacaaggtgcgggcaggaggccctggcctggagagaggagaagcgggagtcccagctgagttcagcatttggacccgggaagcaggcgctggaggcctctccatcgctgttgagggccccagtaaggccgagattacattcgatgaccataaaaatgggtcgtgcggtgtatcttatattgcccaagagcctggtaactacgaggtgtccatcaagttcaatgatgagcacatcccggaaagcccctacctggtgccggtcatcgcaccctccgacgacgcccgccgcctcactgttatgagccttcaggaatcgggattaaaagttaaccagccagcatcctttgctataaggttgaatggcgcaaaaggcaagattgatgcaaaggtgcacagcccctctggagccgtggaggagtgccacgtgtctgagctggagccagataagtatgctgttcgcttcatccctcatgagaatggtgtccacaccatcgatgtcaagttcaatgggagccacgtggttggaagccccttcaaagtgcgcgttggggagcctggacaagcggggaaccctgccctggtgtccgcctatggcacgggactcgaagggggcaccacaggtatccagtcggaattctttattaacaccacccgagcaggtccagggacattatccgtcaccatcgaaggcccatccaaggttaaaatggattgccaggaaacacctgaagggtacaaagtcatgtacacccccatggctcctggtaactacctgatcagcgtcaaatacggtgggcccaaccacatcgtgggcagtcccttcaaggccaaggtgacaggccagcgtctagttagccctggctcagccaacgagacctcatccatcctggtggagtcagtgaccaggtcgtctacagagacctgctatagcgccattcccaaggcatcctcggacgccagcaaggtgacctctaagggggcagggctctcaaaggcctttgtgggccagaagaagttccttcctggtggactgcagcaaagctggctccaacatgctgctgatcggggtccatgggcccaccaccccctgcgaggaggtctccatgaagcatgtaggcaaccagcaatacaacgtcacatacgtcgtcaaggagaggggcgattatgtgctggctgtgaagtggggggaggaacacatccctggcagcccttttcatgtcacagtgccttaaaacagttttctcaaatcctggagagagttcttgtggttgcttttgttgcttgtttgtaattcattttatacaaagccctccagcctgtttgtggggctgaaaccccatccctaaaatattgctgttgtaaaatgccttcagaaataagtcctagactggactcttgagggacatattggagaatcttaagaaatgcaagcttgttcagggggctgagaagatcctgagtacactaggtgcaaaccagaactcttggtggaacagaccagccactgcagcagacagaccaggaacacaatgagactgacatttcaaaaaaacaaaactggctagcctgagctgctggttcactcttcagcatttatgaaacaaggctaggggaagatgggcagagaaaaaggggacacctagtttggttgtcatttggcaaaggagatgacttaaaatccgcttaatctcttccagtgtccgtgttaatgtatttggctattagatcactagcactgctttaccgctcctcatcgccaacacccccatgctctgtggccttcttacacttctcagagggcagagtggcagccgggcaccctacagaaactcagagggcagagtggcagccaggcccacatgtctctcaagtacctgtcccctcgctctggtgattatttcttgcagaatcaccacacgagaccatcccggcagtcatggttttgctttagttttccaagtccgtttcagtcccttccttggtctgaagaaattctgcagtggcgagcagtttcccacttgccaaagatcccttttaaccaacactagcccttgtttttaacacacgctccagcccttcatcagcctgggcagtcttaccaaaatgtttaaagtgatctcagaggggcccatggattaacgccctcatcccaaggtccgtcccatgacataacactccacacccgccccagccaacttcatgggtcactttttctggaaaataatgatctgtacagacaggacagaagtggccactcttgtggcaggtgtagtatctggggcgagtgttgggggtaaaagcccaccctacagaaagtggaacagcccggagcctgatgtgaaaggaccacgggtgttgtaagctgggacacggaagccaaactggaatcaaacgccgactgtaaattgtatcttataacttattaaataaaacatttgctccg

SEQ ID NO: 1791 - DNA, 9444 bp, Homo sapiens; identical to SEQ ID NO: 1789

SEQ ID NO: 1792 - DNA, 1982 bp, Homo sapiens
gaagccagggggactgcgcgcgtgagcgtcacgcatgcggggtcaacggatgggtgcttggtgctctgggcactgcaggggtgctggctggactgcggttaccgcagcgcggaaccccctaggcgaccccgcgctggccgggagcactctttcttcagccaaagagtctacttcagaagcggaggcactgggagtccggtttgggattgccaggctgtggttgtgagtctgagcttgtgagcggctgtggcgccccaactcttcgccagcatatcatcccggcaggcgataaactacattcagttgagtctgcaagactgggaggaactggggtgataagaaatctattcactgtcaaggtttattgaagtcaaaatgtccaaaaaaatcagtggcggttctgtggtagagatgcaaggagatgaaatgacacgaatcatttgggaattgattaaagagaaactcatttttccctacgtggaattggatctacatagctatgatttaggcatagagaatcgtgatgccaccaacgaccaagtcaccaaggatgctgcagaagctataaagaagcataatgttggcgtcaaatgtgccactatcactcctgatgagaagagggttgaggagttcaagttgaaacaaatgtggaaatcaccaaatggcaccatacgaaatattctgggtggcacggtcttcagagaagccattatctgcaaaaatatcccccggcttgtgagtggatgggtaaaacctatcatcataggtcgtcatgcttatggggatcaatacagagcaactgattttgttgttcctgggcctggaaaagtagagataacctacacaccaagtgacggaacccaaaaggtgacatacctggtacataactttgaagaaggtggtggtgttgccatggggatgtataatcaagataagtcaattgaagattttgcacacagttccttccaaatggctctgtctaagggttggcctttgtatctgagcaccaaaaacactattctgaagaaatatgatgggcgttttaaagacatctttcaggagatatatgacaagcagtacaagtcccagtttgaagctcaaaagatctggtatgagcataggctcatcgacgacatggtggcccaagctatgaaatcagagggaggcttcatctgggcctgtaaaaactatgatggtgacgtgcagtcggactctgtggcccaagggtatggctctctcggcatgatgaccagcgtgctggtttgtccagatggcaagacagtagaagcagaggctgcccacgggactgtaacccgtcactaccgcatgtaccagaaaggacaggagacgtccaccaatcccattgcttccatttttgcctggaccagagggttagcccacagagcaaagcttgataacaataaagagcttgccttctttgcaaatgctttggaagaagtctctattgagacaattgaggctggcttcatgaccaaggacttggctgcttgcattaaaggtttacccaatgtgcaacgttctgactacttgaatacatttgagttcatggataaacttggagaaaacttgaagatcaaactagctcaggccaaactttaagttcatacctgagctaagaaggataattgtcttttggtaactaggtctacaggtttacatttttctgtgttacactcaaggataaaggcaaaatcaattttgtaatttgtttagaagccagagtttatcttttctataagtttacagcctttttcttatatatacagttattgccacctttgtgaacatggcaagggacttttttacaatttttattttattttctagtaccagcctaggaattcggttagtactcatttgtattcactgtcacttttttagccacagtattgctccctaaaatatgcataaagtagaaattcactgccttcccctcctgtccatgaccttgggcacaggga

SEQ ID NO: 1793 - DNA, 1982 bp, Homo sapiens; identical to SEQ ID NO: 1792

SEQ ID NO: 1794 - DNA, 1982 bp, Homo sapiens; identical to SEQ ID NO: 1792

SEQ ID NO: 1795 - DNA, 2339 bp, Homo sapiens
cctgtggtcccgggtttctgcagagtctacttcagaagcggaggcactgggagtccggtttgggattgccaggctgtggttgtgagtctgagcttgtgagcggctgtggcgccccaactcttcgccagcatatcatcccggcaggcgataaactacattcagttgagtctgcaagactgggaggaactggggtgataagaaatctattcactgtcaaggtttattgaagtcaaaatgtccaaaaaaatcagtggcggttctgtggtagagatgcaaggagatgaaatgacacgaatcatttgggaattgattaaagagaaactcatttttccctacgtggaattggatctacatagctatgatttaggcatagagaatcgtgatgccaccaacgaccaagtcaccaaggatgctgcagaagctataaagaagcataatgttggcgtcaaatgtgccactatcactcctgatgagaagagggttgaggagttcaagttgaaacaaatgtggaaatcaccaaatggcaccatacgaaatattctgggtggcacggtcttcagagaagccattatctgcaaaaatatcccccggcttgtgagtggatgggtaaaacctatcatcataggtcgtcatgcttatggggatcaatacagagcaactgattttgttgttcctgggcctggaaaagtagagataacctacacaccaagtgacggaacccaaaaggtgacatacctggtacataactttgaagaaggtggtggtgttgccatggggatgtataatcaagataagtcaattgaagattttgcacacagttccttccaaatggctctgtctaagggttggcctttgtatctgagcaccaaaaacactattctgaagaaatatgatgggcgttttaaagacatctttcaggagatatatgacaagcagtacaagtcccagtttgaagctcaaaagatctggtatgagcataggctcatcgacgacatggtggcccaagctatgaaatcagagggaggcttcatctgggcctgtaaaaactatgatggtgacgtgcagtcggactctgtggcccaagggtatggctctctcggcatgatgaccagcgtgctggtttgtccagatggcaagacagtagaagcagaggctgcccacgggactgtaacccgtcactaccgcatgtaccagaaaggacaggagacgtccaccaatcccattgcttccatttttgcctggaccagagggttagcccacagagcaaagcttgataacaataaagagcttgccttctttgcaaatgctttggaagaagtctctattgagacaattgaggctggcttcatgaccaaggacttggctgcttgcattaaaggtttacccaatgtgcaacgttctgactacttgaatacatttgagttcatggataaacttggagaaaacttgaagatcaaactagctcaggccaaactttaagttcatacctgagctaagaaggataattgtcttttggtaactaggtctacaggtttacatttttctgtgttacactcaaggataaaggcaaaatcaattttgtaatttgtttagaagccagagtttatcttttctataagtttacagcctttttcttatatatacagttattgccacctttgtgaacatggcaagggacttttttacaatttttattttattttctagtaccagcctaggaattcggttagtactcatttgtattcactgtcactttttctcatgttctaattataaatgaccaaaatcaagattgctcaaaagggtaaatgatagccacagtattgctccctaaaatatgcataaagtagaaattcactgccttcccctcctgtccatgaccttgggcacagggaagttctggtgtcatagatatcccgttttgtgaggtagagctgtgcattaaacttgcacatgactggaacgaagtatgagtgcaactcaaatgtgttgaagatactgcagtcatttttgtaaagaccttgctgaatgtttccaatagactaaatactgtttaggccgcaggagagtttggaatccggaataaatactacctggaggtttgtcctctccatttttctctttctcctcctggcctggcctgaatattatactactctaaatagcatatttcatccaagtgcaataatgtaagctgaatcttttttggacttctgctggcctgttttatttcttttatataaatgtgatttctcagaaattgatattaaacactatcttatcttctcctgaactgttgattttaattaaaattaagtgctaattaccaaaaaaaaaaa

SEQ ID NO: 1796 - DNA, 2293 bp, Homo sapiens
gaagccagggggactgcgcgcgtgagcgtcacgcatgcggggtcaacggatgggtgcttggtgctctgggcactgcaggggtgctggctggactgcggttaccgcagcgcggaaccccctaggcgaccccgcgctggccgggagcactctttcttcagccaaagagtctacttcagaagcggaggcactgggagtccggtttgggattgccaggctgtggttgtgagtctgagcttgtgagcggctgtggcgccccaactcttcgccagcatatcatcccggcaggcgataaactacattcagttgagtctgcaagactgggaggaactggggtgataagaaatctattcactgtcaaggtttattgaagtcaaaatgtccaaaaaaatcagtggcggttctgtggtagagatgcaaggagatgaaatgacacgaatcatttgggaattgattaaagagaaactcatttttccctacgtggaattggatctacatagctatgatttaggcatagagaatcgtgatgccaccaacgaccaagtcaccaaggatgctgcagaagctataaagaagcataatgttggcgtcaaatgtgccactatcactcctgatgagaagagggttgaggagttcaagttgaaacaaatgtggaaatcaccaaatggcaccatacgaaatattctgggtggcacggtcttcagagaagccattatctgcaaaaatatcccccggcttgtgagtggatgggtaaaacctatcatcataggtcgtcatgcttatggggatcaatacagagcaactgattttgttgttcctgggcctggaaaagtagagataacctacacaccaagtgacggaacccaaaaggtgacatacctggtacataactttgaagaaggtggtggtgttgccatggggatgtataatcaagataagtcaattgaagattttgcacacagttccttccaaatggctctgtctaagggttggcctttgtatctgagcaccaaaaacactattctgaagaaatatgatgggcgttttaaagacatctttcaggagatatatgaccagcgtgctggtttgtccagatggcaagacagtagaagcagaggctgcccacgggactgtaacccgtcactaccgcatgtaccagaaaggacaggagacgtccaccaatcccattgcttccatttttgcctggaccagagggttagcccacagagcaaagcttgataacaataaagagcttgccttctttgcaaatgctttggaagaagtctctattgagacaattgaggctggcttcatgaccaaggacttggctgcttgcattaaaggtttacccaatgtgcaacgttctgactacttgaatacatttgagttcatggataaacttggagaaaacttgaagatcaaactagctcaggccaaactttaagttcatacctgagctaagaaggataattgtcttttggtaactaggtctacaggtttacatttttctgtgttacactcaaggataaaggcaaaatcaattttgtaatttgtttagaagccagagtttatcttttctataagtttacagcctttttcttatatatacagttattgccacctttgtgaacatggcaagggacttttttacaatttttattttattttctagtaccagcctaggaattcggttagtactcatttgtattcactgtcactttttctcatgttctaattataaatgaccaaaatcaagattgctcaaaagggtaaatgatagccacagtattgctccctaaaatatgcataaagtagaaattcactgccttcccctcctgtccatgaccttgggcacagggaagttctggtgtcatagatatcccgttttgtgaggtagagctgtgcattaaacttgcacatgactggaacgaagtatgagtgcaactcaaatgtgttgaagatactgcagtcatttttgtaaagaccttgctgaatgtttccaatagactaaatactgtttaggccgcaggagagtttggaatccggaataaatactacctggaggtttgtcctctccatttttctctttctcctcctggcctggcctgaatattatactactctaaatagcatatttcatccaagtgcaataatgtaagctgaatcttttttggacttctgctggcctgttttatttcttttatataaatgtgatttctcagaaattgatattaaacactatcttatcttctcctgaactgttgattttaattaaaattaagtgctaattaccatt

SEQ ID NO: 1797 - DNA, 3717 bp, Homo sapiens
gctgaagacggaggcagctccacactgtgaactaaaatcatattctaagaactcagccactcaggtatccaccatggtgctgggtcctgaacagaagatgtcagatgacagtgtttctggagatcatggggagtctgccagtcttggtaacatcaaccctgcctatagtaatccctctctttcacagtcccctggggactcagaggagtacttcgccacttactttaatgagaagatctccattcctgaggaggagtactcttgttttagctttcgtaaactctgggctttcaccggaccaggttttcttatgagcattgcctacctggatccaggaaatattgaatccgatttgcagtctggagcagtggctggatttaagttgctctggatccttctgttggccacccttgtggggctgctgctccagcggcttgcagctagactgggagtggttactgggctgcatcttgctgaagtatgtcaccgtcagtatcccaaggtcccacgagtcatcctgtggctgatggtggagttggctatcatcggctcagacatgcaagaagtcattggctcagccattgctatcaatcttctgtctgtaggaagaattcctctgtggggtggcgttctcatcaccattgcagatacttttgtatttctcttcttggacaaatatggcttgcggaagctagaagcattttttggctttctcatcactattatggccctcacatttggatatgaggcaagtgtgaaacccagccagagccaggtactcaagggcatgttcgtaccatcctgttcaggctgtcgcactccacagattgaacaggctgtgggcatcgtgggagctgtcatcatgccacacaacatgtacctgcattctgccttagtcaagtctagacaggtaaaccggaacaataagcaggaagttcgagaagccaataagtactttttcattgaatcctgcattgcactctttgtttccttcatcatcaatgtctttgttgtctcagtctttgctgaagcattttttgggaaaaccaacgagcaggtggttgaagtctgtacaaataccagcagtcctcatgctggcctctttcctaaagataactcgacactggctgtggacatctacaaagggggtgttgtgctgggatgttactttgggcctgctgcactctacatttgggcagtggggatcctggctgcaggacagagctccaccatgacaggaacctattctggccagtttgtcatggagggattcctgaacctaaagtggtcacgctttgcccgagtggttctgactcgctctattgccatcatccccactctgcttgttgctgtcttccaagatgtagagcatctaacagggatgaatgactttctgaatgttctacagagcttacagcttccctttgctctcatacccatcctcacatttacgagcttgcggccagtaatgagtgactttgccaatggactaggctggcggattgcaggaggaatcttggtccttatcatctgttccatcaatatgtactttgtagtggtttatgtccgggacctagggcatgtggcattatatgtggtggctgctgtggtcagcgtggcttatctgggctttgtgttctacttgggttggcaatgtttgattgcactgggcatgtccttcctggactgtgggcatacggtaagcatctctaaaggcctgctgacagaagaagccacccgtggctacgttaaataacactggattagtctgtcttctgcaggtagccatcagagccagtgtgtttctatggtttactgtgtgaacatagccaaaagtatgtgccgttgcacagactgtgtttatgactcaaccgttggttggaaaagactttgtttcatgtgtatttgaaagatggaattattttttccttcctgacctaaccttagaactggattagggtgggatctttgaaaagctgacatttgctgctatcattccaacactaaattcttaagtagttgcccaagggccagctcagtttatccttcggagagacaaggatatgcatgattcttaaccaggctatatgttaaaaaaaaattggaaaatgcaatacattttttattatacaaactacagaatgagtatgcaagttttatttatcaaaatgtaatggatttttaaaggctgagaaattttccttatacctaccttttcagttattttaattataccaaattatcaactagaatagcttcatccatatgaaatataaaatgaagagacacctagctctatcaggcttaggattctttgaacttatttccactttaatttctcagtggaagttaagaggggtgagaaaacaaagaaggggaaaaactgacaactaacaaaaccagcaccacatcgctaggtggtgcttactaattaccttctcaggattttcctcagattgaaaagcttatgaggatttcttgggagtcttaataacctgcctgttagtacagagctttcctgatgatatttactcttgagcacatgtggttgtaaaaccttaactttctttctccaggagggtggtgatagaaacagatggtagtatttatgaactgatgttctcgtgaaatgttgagggtggggacagaatcgtcatgtttttctgatgcaccgctctgcttcatgcccaagatgacttgcgaggcaatctcaggagctgtggacttaaccattgcaaagcacactgtctttctcagcgttctctgcaagtcagtaggtgttagtatggttgcaaagttcactgtctcagcaaagttgaactgggctacctctctacagctgtttcctcagagggaaaaatcttgagaccagatggtggagctctggagtcagaggaaatgggtgtcttcagcacaaagctgctgcttttacttcagccacttctgacatttttacataccgagcctgagattgtgtgattatctcaaatcaaatcactttgatggagataaataatcaaaactgttttatagtcattgatttggtgagaacagtaatggaaaatggtgttgaaggacttctcatttttggagctttccttccagagtcctggctgattggtgttcgctgttcatctgagcccccaaaagcattattactgatacttgcacacagtcaaaagcgcagactggatggatggtcttttataaggcatttaagggtacactactgtgtttcactgaccatacatttttcttagcccctcaagtaatatagcacagagttatgaatgacaattcccctaaccattcctcttcatatctgcctcttccccttaccatcgtaattctccaaactggtcataaaggcactctgtgaagatattggggactgacatcttaagctctcacctggctgcagtaggaaaggccaaactgacgacaaaaaaaaaattctttataaagatgatatggtaacatgtatctttgccctgggtctgggtgggtccagtcagtctcagatttacaagcatttaggagcctaggtaaaagctgctagtattcttttaaaagttatatttatgacttgcaatgatagaaaactccttccaattaaatggcattttataatattatgtgtgtacttcacagtgttaaaatactctgggtgcaataaataatatgtagaaatttaagtcctccaattccagcatatcc

SEQ ID NO: 1798 - DNA, 2138 bp, Homo sapiens
gctgaagacggaggcagctccacactgtgaactaaaatcatattctaagaactcagccactcaggtatccaccatggtgctgggtcctgaacagaagatgtcagatgacagtgtttctggagatcatggggagtctgccagtcttggtaacatcaaccctgcctatagtaatccctctctttcacagtcccctggggactcagaggagtacttcgccacttactttaatgagaagatctccattcctgaggaggagtactcttgttttagctttcgtaaactctgggctttcaccggaccaggttttcttatgagcattgcctacctggatccaggaaatattgaatccgatttgcagtctggagcagtggctggatttaagttgctctggatccttctgttggccacccttgtggggctgctgctccagcggcttgcagctagactgggagtggttactgggctgcatcttgctgaagtatgtcaccgtcagtatcccaaggtcccacgagtcatcctgtggctgatggtggagttggctatcatcggctcagacatgcaagaagtcattggctcagccattgctatcaatcttctgtctgtaggaagaattcctctgtggggtggcgttctcatcaccattgcagatacttttgtatttctcttcttggacaaatatggcttgcggaagctagaagcattttttggctttctcatcactattatggccctcacatttggatatgaggcaagtgtgaaacccagccagagccaggtactcaagggcatgttcgtaccatcctgttcaggctgtcgcactccacagattgaacaggctgtgggcatcgtgggagctgtcatcatgccacacaacatgtacctgcattctgccttagtcaagtctagacaggtaaaccggaacaataagcaggaagttcgagaagccaataagtactttttcattgaatcctgcattgcactctttgtttccttcatcatcaatgtctttgttgtctcagtctttgctgaagcattttttgggaaaaccaacgagcaggtggttgaagtctgtacaaataccagcagtcctcatgctggcctctttcctaaagataactcgacactggctgtggacatctacaaagggggtgttgtgctgggatgttactttgggcctgctgcactctacatttgggcagtggggatcctggctgcaggacagagctccaccatgacaggaacctattctggccagtttgtcatggagggattcctgaacctaaagtggtcacgctttgcccgagtggttctgactcgctctattgccatcatccccactctgcttgttgctgtcttccaagatgtagagcatctaacagggatgaatgactttctgaatgttctacagagcttacagcttccctttgctctcatacccatcctcacatttacgagcttgcggccagtaatgagtgactttgccaatggactaggctggcggattgcaggaggaatcttggtccttatcatctgttccatcaatatgtactttgtagtggtttatgtccgggacctagggcatgtggcattatatgtggtggctgctgtggtcagcgtggcttatctgggctttgtgttctacttgggttggcaatgtttgattgcactgggcatgtccttcctggactgtgggcatacgtgccatctgggattgacagctcagcctgaactctatcttctgaacaccatggacgctgactcacttgtgtctagatgactgacagcctgagagactctataagaacatgtttttctaagccctttttgtgccaggtgtcccgttaacgtctctgttagttcagagagacgggatttcaccatgttgcccaggctggtgttgaactcatgagctcaagtaatctgctggccttggcctcccaaagtgctgagattataggcgtgagccactgcatccagctcactcctcatttctttctagccccaaaggtgttgagtcagcaaatcctgcagcctttgtgtgactttgagcatcactttcccctttcagcattaaatatatgacctctctgccttattttagaacttactacatttcaataaaactttttaaaaaatcc

SEQ ID NO: 1799 - DNA, 4134 bp, Homo sapiens
agccagcttggcgctggctcccggaatatggagccctgggcgcgggggcggcgtgtcaggtggttgcggagctggtaagaatcatattctaagaactcagccactcaggtatccaccatggtgctgggtcctgaacagaagatgtcagatgacagtgtttctggagatcatggggagtctgccagtcttggtaacatcaaccctgcctatagtaatccctctctttcacagtcccctggggactcagaggagtacttcgccacttactttaatgagaagatctccattcctgaggaggagtactcttgttttagctttcgtaaactctgggctttcaccggaccaggttttcttatgagcattgcctacctggatccaggaaatattgaatccgatttgcagtctggagcagtggctggatttaagttgctctggatccttctgttggccacccttgtggggctgctgctccagcggcttgcagctagactgggagtggttactgggctgcatcttgctgaagtatgtcaccgtcagtatcccaaggtcccacgagtcatcctgtggctgatggtggagttggctatcatcggctcagacatgcaagaagtcattggctcagccattgctatcaatcttctgtctgtaggaagaattcctctgtggggtggcgttctcatcaccattgcagatacttttgtatttctcttcttggacaaatatggcttgcggaagctagaagcattttttggctttctcatcactattatggccctcacatttggatatgagtatgttacagtgaaacccagccagagccaggtactcaagggcatgttcgtaccatcctgttcaggctgtcgcactccacagattgaacaggctgtgggcatcgtgggagctgtcatcatgccacacaacatgtacctgcattctgccttagtcaagtctagacaggtaaaccggaacaataagcaggaagttcgagaagccaataagtactttttcattgaatcctgcattgcactctttgtttccttcatcatcaatgtctttgttgtctcagtctttgctgaagcattttttgggaaaaccaacgagcaggtggttgaagtctgtacaaataccagcagtcctcatgctggcctctttcctaaagataactcgacactggctgtggacatctacaaagggggtgttgtgctgggatgttactttgggcctgctgcactctacatttgggcagtggggatcctggctgcaggacagagctccaccatgacaggaacctattctggccagtttgtcatggagggattcctgaacctaaagtggtcacgctttgcccgagtggttctgactcgctctattgccatcatccccactctgcttgttgctgtcttccaagatgtagagcatctaacagggatgaatgactttctgaatgttctacagagcttacagcttccctttgctctcatacccatcctcacatttacgagcttgcggccagtaatgagtgactttgccaatggactaggctggcggattgcaggaggaatcttggtccttatcatctgttccatcaatatgtactttgtagtggtttatgtccgggacctagggcatgtggcattatatgtggtggctgctgtggtcagcgtggcttatctgggctttgtgttctacttgggttggcaatgtttgattgcactgggcatgtccttcctggactgtgggcatacggtaagcatctctaaaggcctgctgacagaagaagccacccgtggctacgttaaataacactggattagtctgtcttctgcaggtagccatcagagccagtgtgtttctatggtttactgtgtgaacatagccaaaagtatgtgccgttgcacagactgtgtttatgactcaaccgttggttggaaaagactttgtttcatgtgtatttgaaagatggaattattttttccttcctgacctaaccttagaactggattagggtgggatctttgaaaagctgacatttgctgctatcattccaacactaaattcttaagtagttgcccaagggccagctcagtttatccttcggagagacaaggatatgcatgattcttaaccaggctatatgttaaaaaaaaattggaaaatgcaatacattttttattatacaaactacagaatgagtatgcaagttttatttatcaaaatgtaatggatttttaaaggctgagaaattttccttatacctaccttttcagttattttaattataccaaattatcaactagaatagcttcatccatatgaaatataaaatgaagagacacctagctctatcaggcttaggattctttgaacttatttccactttaatttctcagtggaagttaagaggggtgagaaaacaaagaaggggaaaaactgacaactaacaaaaccagcaccacatcgctaggtggtgcttactaattaccttctcaggattttcctcagattgaaaagcttatgaggatttcttgggagtcttaataacctgcctgttagtacagagctttcctgatgatatttactcttgagcacatgtggttgtaaaaccttaactttctttctccaggagggtggtgatagaaacagatggtagtatttatgaactgatgttctcgtgaaatgttgagggtggggagaaaagactttaagggaggagagccatctattttgttcctaaagccacctctcagcagaatcgtcatgtttttctgatgcaccgctctgcttcatgcccaagatgacttgcgaggcaatctcaggagctgtggacttaaccattgcaaagcacactgtctttctcagcgttctctgcaagtcagtaggtgttagtatggttgcaaagttcactgtctcagcaaagttgaactgggctacctctctacagctgtttcctcagagggaaaaatcttgagaccagatggtggagctctggagtcagaggaaatgggtgtcttcagcacaaagctgctgcttttacttcagccacttctgacatttttacataccgagcctgagattgtgtgattatctcaaatcaaatcactttgatggagataaataatcaaaactgttttatagtcattgatttggtgagaacagtaatggaaaatggtgttgaaggacttctcatttttggagctttccttccagagtcctggctgattggtgttcgctgttcatctgagcccccaaaagcattattactgatacttgcacacagtcaaaagcgcagactggatggatggtcttttataaggcatttaagggtacactactgtgtttcactgaccatacatttttcttagcccctcaagtaatatagcacagagttatgaatgacaattcccctaaccattcctcttcatatctgcctcttccccttaccatcgtaattctccaaactggtcataaaggcactctgtgaagatattggggactgacatcttaagctctcacctggctgcagtaggaaaggccaaactgacgacaaaaaaaaaattctttataaagatgatatggtaacatgtatctttgccctgggtctgggtgggtccagtcagtctcagatttacaagcatttaggagcctaggtaaaagctgctagtattcttttaaaagttatatttatgacttgcaatgatagaaaactccttccaattaaatggcattttataatattatgtgtgtacttcacagtgttaaaaataccctcatacgttattgcatttgatcttcacagaaagtgcattttaaccagtactctgggtgcaataaataatatgtagaaatttaagtcctccaattccagcatatccagtgagttttgacagtgtgtttatgtggaatgtttaaggatatacaattgtactttatataaattggttcttgttcttcttaaatgtgacatgaaataattgtgctgctacattatactggaaattaacaggggaaaagggaagagctcttggctcccttgaggttctgctagtggtgttaggagtggttacaactgagcttttagtaaccatttaaccgtatgtaaacttggtttctaattaaaaaaaaatttctttttcc

SEQ ID NO: 1800 - DNA, 3901 bp, Homo sapiens
aagatggcggcgtgtggacgtgtacggaggatgttccgcttgtcggcggcgctgcatctgctgctgctattcgcggccggggccgagaaactccccggccatggcgtccacagccagggccagggtcccggggccaactttgtgtccttcgtagggcaggccggaggcggcggcccggcgggtcagcagctgccccagctgcttcagtcatcgcagcttcagcagcaacagcagcagcagcaacagcaacagcagcttcagccgccgcagccgcctttcccggcgggtgggcctccggcccggcggggaggagcgggggctggtgggggctggaagctggcggaggaagagtcctgcagggaggacgtgacccgcgtgtgccctaagcacacctggagcaacaacctggcggtgctcgagtgcctgcaggatgtgagggagcctgaaaatgaaatttcttcagactgcaatcatttgttgtggaattataagctgaacctaactacagatcccaaatttgaatctgtggccagagaggtttgcaaatctactataacagagattaaagaatgtgctgatgaaccggttggaaaaggttacatggtttcctgcttagtggatcaccgaggcaacatcactgagtatcagtgtcaccagtacattaccaagatgacggccatcatttttagtgattaccgtttaatctgtggcttcatggatgactgcaaaaatgacatcaacattctgaaatgtggcagtattcggcttggagaaaaggatgcacattcacaaggtgaggtggtatcatgcttggagaaaggcctggtgaaagaagcagaagaaagagaacccaagattcaagtttctgaactctgcaagaaagccattctccgggtggctgagctgtcatcggatgactttcacttagaccggcatttatattttgcttgccgagatgatcgggagcgtttttgtgaaaatacacaagctggtgagggcagagtgtataagtgcctctttaaccataaatttgaagaatccatgagtgaaaagtgtcgagaagcacttacaacccgccaaaagctgattgcccaggattataaagtcagttattcattggccaaatcctgtaaaagtgacttgaagaaataccggtgcaatgtggaaaaccttccgcgatcgcgtgaagccaggctctcctacttgttaatgtgcctggagtcagctgtacacagagggcgacaagtcagcagtgagtgccagggggagatgctggattaccgacgcatgttgatggaagacttttctctgagccctgagatcatcctaagctgtcggggggagattgaacaccattgttccggattacatcgaaaagggcggaccctacactgtctgatgaaagtagttcgaggggagaaggggaaccttggaatgaactgccagcaggcgcttcaaacactgattcaggagactgaccctggtgcagattaccgcattgatcgagctttgaatgaagcttgtgaatctgtaatccagacagcctgcaaacatataagatctggagacccaatgatcttgtcgtgcctgatggaacatttatacacagagaagatggtagaagactgtgaacaccgtctcttagagctgcagtatttcatctcccgggattggaagctggaccctgtcctgtaccgcaagtgccagggagacgcttctcgtctttgccacacccacggttggaatgagaccagtgaatttatgcctcagggagctgtgttctcttgtttatacagacacgcctaccgcactgaggaacagggaaggaggctctcacgggagtgccgagctgaagtccaaaggatcctacaccagcgtgccatggatgtcaagctggatcctgccctccaggataagtgcctgattgatctgggaaaatggtgcagtgagaaaacagagactggacaggagctggagtgccttcaggaccatctggatgacttggtggtggagtgtagagatatagttggcaacctcactgagttagaatcagaggatattcaaatagaagccttgctgatgagagcctgtgagcccataattcagaacttctgccacgatgtggcagataaccagatagactctggggacctgatggagtgtctgatacagaacaaacaccagaaggacatgaacgagaagtgtgccatcggagttacccacttccagctggtgcagatgaaggattttcggttttcttacaagtttaaaatggcctgcaaggaggacgtgttgaagctttgcccaaacataaaaaagaaggtggacgtggtgatctgcctgagcacgaccgtgcgcaatgacactctgcaggaagccaaggagcacagggtgtccctgaagtgccgcaggcagctccgtgtggaggagctggagatgacggaggacatccgcttggagccagatctatacgaagcctgcaagagtgacatcaaaaacttctgttccgctgtgcaatatggcaacgctcagattatcgaatgtctgaaagaaaacaagaagcagctaagcacccgctgccaccaaaaagtatttaagctgcaggagacagagatgatggacccagagctagactacaccctcatgagggtctgcaagcagatgataaagaggttctgtccggaagcagattctaaaaccatgttgcagtgcttgaagcaaaataaaaacagtgaattgatggatcccaaatgcaaacagatgataaccaagcgccagatcacccagaacacagattaccgcttaaaccccatgttaagaaaagcctgtaaagctgacattcctaaattctgtcacggtatcctgactaaggccaaggatgattcagaattagaaggacaagtcatctcttgcctgaagctgagatatgctgaccagcgcctgtcttcagactgtgaagaccagatccgaatcattatccaggagtccgccctggactaccgcctggatcctcagctccagctgcactgctcagacgagatctccagtctatgtgctgaagaagcagcagcccaagagcagacaggtcaggtggaggagtgcctcaaggtcaacctgctcaagatcaaaacagaattgtgtaaaaaggaagtgctaaacatgctgaaggaaagcaaagcagacatctttgttgacccggtacttcatactgcttgtgccctggacattaaacaccactgcgcagccatcacccctggccgcgggcgtcaaatgtcctgtctcatggaagcactggaggataagcgggtgaggttacagcccgagtgcaaaaagcgcctcaatgaccggattgagatgtggagttacgcagcaaaggtggccccagcagatggcttctctgatcttgccatgcaagtaatgacgtctccatctaagaactacattctctctgtgatcagtgggagcatctgtatattgttcctgattggcctgatgtgtggacggatcaccaagcgagtgacacgagagctcaaggacaggtagagccaccttgaccaccaaaggaactacctatccagtgcccagtttgtacagccctcttgtatagcatccccactcacctcgctcttctcagaagtgacaccaaccccgtgttagagcattagcagatgtccactgcgttgtcccatccagcctccactcgtgtccatggtgtcctcctcctcctcaccgtgcagcagcagcagctggtcgctggggttactgcctttgtttggcaaacttgggtttacctgcctgtagacaagtctctctcataccaacagaacttccggtacttccagaaccaactcacctgacctgcaactcaaaggcttttttaagaaaaccaccaaaaaaaaaa

SEQ ID NO: 1801 - DNA, 5191 bp, Homo sapiens
ggcgagtgcgtcgagctcgccgcggactcaagatggcggcgtgtggacgtgtacggaggatgttccgcttgtcggcggcgctgcatctgctgctgctattcgcggccggggccgagaaactccccggccagggcgtccacagccagggccagggtcccggggccaactttgtgtccttcgtagggcaggccggaggcggcggcccggcgggtcagcagctgccccagctgcctcagtcatcgcagcttcagcagcaacagcagcagcagcaacagcaacagcagcctcagccgccgcagccgcctttcccggcgggtgggcctccggcccggcggggaggagcgggggctggtgggggctggaagctggcggaggaagagtcctgcagggaggacgtgacccgcgtgtgccctaagcacacctggagcaacaacctggcggtgctcgagtgcctgcaggatgtgagggagcctgaaaatgaaatttcttcagactgcaatcatttgttgtggaattataagctgaacctaactacagatcccaaatttgaatctgtggccagagaggtttgcaaatctactataacagagattaaagaatgtgctgatgaaccggttggaaaaggttacatggtttcctgcttggtggatcaccgaggcaacatcactgagtatcagtgtcaccagtacattaccaagatgacggccatcatttttagtgattaccgtttaatctgtggcttcatggatgactgcaaaaatgacatcaacattctgaaatgtggcagtattcggcttggagaaaaggatgcacattcacaaggtgaggtggtatcatgcttggagaaaggcctggtgaaagaagcagaagaaagagaacccaagattcaagtttctgaactctgcaagaaagccattctccgggtggctgagctgtcatcggatgactttcacttagaccggcatttatattttgcttgccgagatgatcgggagcgtttttgtgaaaatacacaagctggtgagggcagagtgtataagtgcctctttaaccataaatttgaagaatccatgagtgaaaagtgtcgagaagcacttacaacccgccaaaagctgattgcccaggattataaagtcagttattcattggccaaatcctgtaaaagtgacttgaagaaataccggtgcaatgtggaaaaccttccgcgatcgcgtgaagccaggctctcctacttgttaatgtgcctggagtcagctgtacacagagggcgacaagtcagcagtgagtgccagggggagatgctggattaccgacgcatgttgatggaagacttttctctgagccctgagatcatcctaagctgtcggggggagattgaacaccattgttccggattacatcgaaaagggcggaccctacactgtctgatgaaagtagttcgaggggagaaggggaaccttggaatgaactgccagcaggcgcttcaaacactgattcaggagactgaccctggtgcagattaccgcattgatcgagctttgaatgaagcttgtgaatctgtaatccagacagcctgcaaacatataagatctggagacccaatgatcttgtcgtgcctgatggaacatttatacacagagaagatggtagaagactgtgaacaccgtctcttagagctgcagtatttcatctcccgggattggaagctggaccctgtcctgtaccgcaagtgccagggagacgcttctcgtctttgccacacccacggttggaatgagaccagtgaatttatgcctcagggagctgtgttctcttgtttatacagacacgcctaccgcactgaggaacagggaaggaggctctcacgggagtgccgagctgaagtccaaaggatcctacaccagcgtgccatggatgtcaagctggatcctgccctccaggataagtgcctgattgatctgggaaaatggtgcagtgagaaaacagagactggacaggagctggagtgccttcaggaccatctggatgacttggtggtggagtgtagagatatagttggcaacctcactgagttagaatcagaggatattcaaatagaagccttgctgatgagagcctgtgagcccataattcagaacttctgccacgatgtggcagataaccagatagactctggggacctgatggagtgtctgatacagaacaaacaccagaaggacatgaacgagaagtgtgccatcggagttacccacttccagctggtgcagatgaaggattttcggttttcttacaagtttaaaatggcctgcaaggaggacgtgttgaagctttgcccaaacataaaaaagaaggtggacgtggtgatctgcctgagcacgaccgtgcgcaatgacactctgcaggaagccaaggagcacagggtgtccctgaagtgccgcaggcagctccgtgtggaggagctggagatgacggaggacatccgcttggagccagatctatacgaagcctgcaagagtgacatcaaaaacttctgttccgctgtgcaatatggcaacgctcagattatcgaatgtctgaaagaaaacaagaagcagctaagcacccgctgccaccaaaaagtatttaagctgcaggagacagagatgatggacccagagctagactacaccctcatgagggtctgcaagcagatgataaagaggttctgtccggaagcagattctaaaaccatgttgcagtgcttgaagcaaaataaaaacagtgaattgatggatcccaaatgcaaacagatgataaccaagcgccagatcacccagaacacagattaccgcttaaaccccatgttaagaaaagcctgtaaagctgacattcctaaattctgtcacggtatcctgactaaggccaaggatgattcagaattagaaggacaagtcatctcttgcctgaagctgagatatgctgaccagcgcctgtcttcagactgtgaagaccagatccgaatcattatccaggagtccgccctggactaccgcctggatcctcagctccagctgcactgctcagacgagatctccagtctatgtgctgaagaagcagcagcccaagagcagacaggtcaggtggaggagtgcctcaaggtcaacctgctcaagatcaaaacagaattgtgtaaaaaggaagtgctaaacatgctgaaggaaagcaaagcagacatctttgttgacccggtacttcatactgcttgtgccctggacattaaacaccactgcgcagccatcacccctggccgcgggcgtcaaatgtcctgtctcatggaagcactggaggataagcgggtgaggttacagcccgagtgcaaaaagcgcctcaatgaccggattgagatgtggagttacgcagcaaaggtggccccagcagatggcttctctgatcttgccatgcaagtaatgacgtctccatctaagaactacattctctctgtgatcagtgggagcatctgtatattgttcctgattggcctgatgtgtggacggatcaccaagcgagtgacacgagagctcaaggacaggtagagccaccttgaccaccaaaggaactacctatccagtgcccagtttgtacagccctcttgtatagcatccccactcacctcgctcttctcagaagtgacaccaaccccgtgttagagcattagcagatgtccactgcgttgtcccatccagcctccactcgtgtccatggtgtcctcctcctcctcaccgtgcagcagcagcagctggtcgctggggttactgcctttgtttggcaaacttgggtttacctgcctgtagacaagtctctctcataccaacagaacttccggtacttccagaaccaactcacctgacctgcaactcaaaggcttttttaagaaaaccaccaaaaaaaaaaatttttttaaagaaaaaaatgtatatagtaacgcatctcctccaggcttgatttgggcaatggggttatgtctttcatatgactgtgtaaaacaaagacaggacttggaggggaagcacaccacccagtgtgccatgactgaggtgtctcgttcatctctcagaagcaccttggggcctcgccagggccgtggtcttcaccgaggcgtgggtgggcagccgttccccaggctgtgtggggtcctgctttcttctgctgagacagtgacgctttccagtttccaccctaatcagccactgctggtcacagccccacagccatgggtatttctgtggtctcctcgcttcattgaagcaaagcatgagccttcctagacaagggcagctggggaggggaagggaccggaagtttgtgaagttgaacagtccatccatctgcactgagaggctggatcctgagtcccggggcagcaggatcccaggaaccttcctcctccagggcagcacaggactcagccatgtctggaccggccctgctgaggctacagtcactctggaagctctgcgcttcatcaggaggcaggactgtggcgggaggggtccttgaagatgggtgtggggagcagtgggtcaggaagtgggagccagaggtttgactcactttgctttatttttcaggctacaatacaggtcagagacaatggcttataaaggtttagtgtggtctcaggatgtgacaggcagtccagcctgacctttctgcacactccagacaaacttcccagacaagctcctttgtgcctctacgtggagagggtgtggaaagttatcacattaaaagatggaggatttgctctgttttttttctttctgtccatttgctgcgtgtacccactctagtaggcattggctaaatgttgtattttggcgattcatcaacctttgcagaatatgggctttatagaagcaatattcttggccatcccgcctcattcctccagtgtggagatgacaagtctgggtgtgagagggaggggtccgggcatcatggttcagcgtggcactcctttggttgagtttggggcatgagatcacagtggctgcacaagagagcagtgtgtacagtaggagagacatttatgtaatatatattttattaacctgttagatgtccacaaagtattataaatcacgtgcctaaaactgtccatgtagaccaaggcctgccctcggcgccccccactcttgcctctgctctgcac

SEQ ID NO: 1802 - DNA, 5191 bp, Homo sapiens; identical to SEQ ID NO: 1801

SEQ ID NO: 1803 - DNA, 5191 bp, Homo sapiens; identical to SEQ ID NO: 1801

SEQ ID NO: 1804 - DNA, 4291 bp, Homo sapiens
cgggacccggctgccggcggtgggtctagctgggggaggtcgggccatgctggtgggccagggcgcggggctgctggggcccgcggtggtcaccgccgcggtggtgctgctgctgagcggcgtggggccggcgcacggctcggaggacatcgtggtgggctgcggtggcttcgtcaagtcggacgtggagatcaactactcgctcatcgagataaagctgtacaccaagcatgggactttgaaataccagacagactgtgcccctaataatggttactttatgatccctttgtatgataagggggatttcattctgaagattgagcctcccctagggtggagttttgagccgacgaccgtggagctccatgtggatggagtcagtgacatctgcacaaagggtggggacatcaactttgtcttcactgggttctctgtgaatggcaaggtcctcagcaaagggcagcccctgggtcctgcgggagttcaggtgtctctgagaaacactgggaccgaagcaaagatccagtccacagttacacagcctggcggaaagtttgcattttttaaagttctgcctggagattatgaaatcctcgcaactcatccaacctgggcgttgaaagaggcaagcaccacagtgcgtgtaaccaactccaatgccaatgcggccagtcccctcatagttgctggctacaatgtgtctggctctgtccgaagtgatggggagcccatgaaaggggtgaagtttcttctcttttcttctttagtaactaaagaggatgtcctgggctgcaatgtctcaccagtgcctgggttccagccccaagacgagagtctggtgtatttgtgctacacggtctccagagaagatggctcgttctctttctattccttgccaagtgggggctacactgtgattccgttctatcgaggggagaggattacctttgatgtggcgccttccagacttgacttcacagtggagcatgacagcttgaaaatcgagcccgtgttccacgtcatgggattctccgtcaccgggagggtcttgaacggacccgaaggagatggtgttccagaagcagtagtcaccctgaataaccaaatcaaagttaaaacaaaagctgatggctcattccgccttgagaacataaccacagggacatacaccatccatgctcagaaagagcacctctactttgaaacggtcaccatcaaaattgcaccgaacacacctcagctggctgacattgttgcaacagggttcagtgtctgtggtcggatatcaatcattcgcttcccggacaccgtcaagcagatgaataaatacaaagttgtcctgtcatctcaagacaaggacaagtctttggtcaccgtggagacagatgctcatggatcattttgttttaaagcaaaaccagggacttacaaagtgcaggtgatggttcctgaggcagaaaccagagcagggctgacgttgaaaccccagacatttcctcttactgtgaccgacaggcccgtgatggatgtggcctttgtacagttcttggcatcagtttctgggaaagtctcttgtttggacacctgtggtgacttgctggtgactctacagtccctgagccgccagggtgagaagcggagcctccagctctccggcaaggtcaacgccatgactttcacctttgacaacgtgctccctggaaaatacaaaataagcatcatgcatgaggattggtgctggaagaacaagagcctggaggtggaagtgctggaggatgacgtgtctgcagttgagttcaggcagacgggctacatgctgagatgttccctgtctcacgccatcactctggaattttatcaggatggaaatgggcgtgagaatgtggggatttataacctctccaaaggagtcaaccgattctgcctgtccaagcctggtgtgtacaaagtgacccctcgctcctgccaccggtttgagcaagcgttctacacctatgacacgtcttcacctagtatcttgacattgacagccattcgccaccatgtccttggaactatcaccaccgacaaaatgatggatgtcactgtgactatcaagtcttccatcgacagtgaacccgccttggtcttaggccctctgaagtctgtgcaggagctgcggagggagcagcagctggctgagatcgaggcccgcaggcaggagagggagaaaaacggcaatgaggaaggtgaagaaagaatgaccaagcctcccgtgcaggagatggtagatgagttacaaggccccttctcgtatgatttctcttactgggcgcggtctggagagaaaatcactgttacaccgtcatctaaagagctgctcttttatcccccttcaatggaagccgttgtcagtggagaaagctgcccagggaagctgatcgagatccacgggaaggcaggcctgtttttagaaggccagatccaccccgagttggaaggagtcgagattgtcatcagtgaaaagggggcaagttcaccgctgatcacagtctttactgatgacaaaggtgcctacagtgttggccccctgcacagtgacctggagtacacggtgacctcacagaaggagggctatgttctgactgcagtggaaggaaccatcggagacttcaaggcctatgccctggcaggcgtaagctttgagataaaagctgaggatgaccagcccctcccgggagtcctcttatccctgagtggtggcctgtttcgttccaacctcttgacccaggacaacggcattctgacattctcaaacctgagccctggccagtattacttcaaacccatgatgaaggagttccggtttgagccatcctcacagatgatcgaggtgcaggaaggccagaacctgaagatcaccatcacggggtaccgaaccgcttacagttgctatggcacagtgtcttccttaaacggagagcccgaacaaggggttgccatggaagcggtgggccagaacgactgcagcatttacggagaagacaccgtgacagacgaagagggcaagttcagattacgtggattgctgccgggatgtgtgtaccacgttcagctcaaggcagaaggcaacgaccacattgagcgggcgctcccccaccatagggtgattgaggttgggaataatgacatcgatgatgtaaacatcatagttttccggcagattaatcaatttgatttaagtggaaatgtgatcacttcctctgaataccttcctacgttatgggtcaagctttacaaaagcgaaaacctcgacaatccaatccagacagtttcccttggccagtccctgttcttccatttccccccactgctcagagatggcgagaactatgttgtgcttctggactccacactccccagatcccagtatgactacatcttgcctcaagtttctttcaccgcagtgggctaccataaacacatcaccttgatttttaatcccacgaggaagctgcctgaacaggacatcgcacaaggatcctacattgccctgccattgacgctgctggttctgctggccggttacaaccatgacaagctcattcctttgctgctgcagttgacaagccggctacagggagtcggcgcgctcggccaggcagcctctgacaatagcggcccagaagatgcaaagagacaagccaagaaacagaagacaaggcggacgtgaggaggaaggggacagttgcagtctcacttgggacaggccacagccaggggtccggccactacccgcccgtgggataaaagccaaaagcatgcgtcagctaacttcagcctgtgctgctgggcccgcaccccatgtcccttgtcactgtggcatcctgcacccatcctcacccctccgtagagcccctcgtgcaatgcaatgaatggaccctcctgtcactctgctgaacagaatttattttctgagtcaaatataatttattattatttttgtcaaagaagtatttaagctgtgctgtggtgtgagaatgtcattcttgatcttcagccttcgtttgcaagaagagttccagttgatgtggtgtttggttccatggcggggtaccctagggattcatctgttttcttcacttccctttgcatctgagatcctgctggaaaccacggcaacctgtatccactattaggaggtaaaaatcaataaaatggcccattcatttgtgttgtagctcaaaaaaaaaaaaaaaaaaaaaaaaaaaaaaaaaaaaaaaaaaaaaaaaaaaaaaaaaaaaaaaaa

SEQ ID NO: 1805 - DNA, 15534 bp, Homo sapiens
ccagccgtgtgtgatgagtggccacaccttgcctcctcttcccgtcccaggcaccaacagcacagagcaggccagtgtacccagagccatggcagccacgctgggagccggcacgccccccaggccccaggccaggagcatagctggggtgtatgtggaggcctcgggccaggcccagagtgtctacgccgccatggagcagggcctcctgcctgctgggctcgggcaggctctgctagaggcccaggcagccactgggggcctggtggacctcgcccggggccagctgctccctgtgtccaaggccctgcagcagggtctggtggggctggagctgaaggagaagctgctggccgctgagcgtgccactacgggctatcctgacccctacggcggtgagaagctggccctctttcaggccatcgggaaggaggttgtggacagggccctggggcagagctggctggaggtccaactggccactgggggcctggtggaccccgcccagggagtgctcgtggcccctgagccagcctgccaccagggcctcctggaccgggagacatggcacaagctgtcagagcttgagcctggcacaggtgacctgcgcttcctcaaccccaacacgctggagcggctgacataccaccagctgctggaaaggtgtgtgcgtgcccccgggtcggggctagccttgctgcccctcaagatcaccttccgctccatgggcggggcggtgagtgcagctgagctgctggaggtgggcatcctggacgagcaggctgtgcagggtctgcgggagggcaggctggccgcagtggacgtgagtgcacgtgccgaggtgcggcgctacctggagggtaccggcagcgtggccggggttgtcctgctgcccgaaggccacaagaagagctttttccaggctgccaccgagcacctgctcccaatgggcaccgcgctgccactcctagaggcccaggctgccacccacaccctggtggaccccatcacaggccagcggctgtgggtagacgaggcagtcagggcgggcctggtcagcccagagctccatgagcagctcctggtggctgagcaggccgtgacagggcaccacgaccccttcagtggctcccaaatcccccttttccaggccatgaagaaggggctagtggacaggccactagcactgcggctcttggatgcccagctggccacaggcgggctggtctgtccagcacgcaggctccggctgcccctggaggccgccctgcgctgcggctgcctggatgaagacactcagcggcagctctcgcaggctggcagcttctcagacggcacgcacggcggcctgcgctatgaacagctgctggccctctgtgtcaccgacccagagaccgggcttgccttcctgccactctcagggggaccccggggaggggagccccagggacccccattcatcaagtacagcactcggcaggccctgagcacggccacagccaccgtctctgtggggaagttccggggccggcccgtgtccctctgggagctgctcttctctgaggccatctcctcagagcagagggcgatgctggcccagcagtaccaggaagggaccctctccgtggagaagctggccgctgagctgagcgccacccttgagcaggctgcagccactgccagggtcaccttttctgggctgagggacaccgtgacaccaggagagctgctgaaagccgagatcatcgaccaggacctgtacgagcggttggagcatggacaggccacagccaaggatgtgggcagcctggcctcggcgcagaggtacctgcagggtacgggctgcattgctggcctgctgctccctggctcccaggaacgcctgagcatctatgaggcccgatgcaaggggctcctccggcccggcactgccctcatccttctggaggcacaagctgccacaggcttcatcatcgacccaaaagcaaacaaggggcactccgttgaggaggcactgagggctgctgtcattgggcctgatgtgttcgcgaagctgctgtcggctgagcgcgctgtcactggctacactgacccctacaccgggcagcagatctccctcttccaggccatgcagaagggcctcatcgtccgggagcacggcatccgcctgctggaggcccagatcgccacgggcggcgtcatcgaccccgtgcacagccaccgcgtgcccgtggacgtggcctaccggcgcggctacttcgatcagatgctgaacttgatcctgttggacccttctgacgacaccaagggcttcttcgaccccaacacgcacgagaacctcacgtacctgcagcttctggagcgctgtgtgcgtgaccccgagacgggcctgtacctcctgccactcagcagcacgcagtccccgctggtggacagtgccacccagcaggccttccagaacctgctgctctccgtgaagtatggacggtttcaggggcagagggtctccgcgtgggagctgatcaactctgagtacttcagcgagggccgcaggaggcagctgctgcgtcgctaccggcagcgcgaggtcacgctggggcaggtggcaaagctgctggaggcggagacgcagagacaggcggacatcatgctgcccgcactgcggagccgggtcaccgtccaccagctcctggaggccggtatcattgaccagcagctgttggaccaagtgctggccgggacaatcagcccggaggccctcctactcatggacggcgtccgcaggtacctgtgcggcctgggagctgtgggcggtgtgcggctgctgccctctggccagcggctcagcctctaccaggccatgaggcagaagctgctggggcccagggtggccctggccctgctggaggcccaggcggccaccggaaccatcatggaccctcacagcccagagagcctctcggtggatgaggccgtgcgcaggggtgtggtggggccggagctgtatggcaggctgaagcgggctgagggtgccattgctggcttcagagaccccttctctgggaagcaggtgtctgtgttccaggccatgaagaaaggtctcatcccttgggagcaagctgcccgcctcctggaggctcaagtggccacaggagggatcattgaccccaccagccaccaccacctccccatgccagtggccattcagcgtggctatgttgaccaggagatggagacagccttgtccagctcctccgagaccttccccacaccggacggccaggggcgcacgagctatgcccagctcctggaggagtgccccagggatgagacttctggccttcacctcctgcccctgccagaaagtgctcctgccctccccaccgaggagcaggtccagaggagcctgcaggccgtgccgggggccaaggatggcacatccctctgggacctgctcagctcctgccacttcaccgaggagcaacggaggggcctgctggaggacgtgcaggaggggaggaccactgtgccacagctgctagcctctgtgcagaggtgggtacaggagaccaagcttctggcccaggcccgcgtcatggtgcccggcccacggggtgaggtacccgctgtctggctgctggatgctggcatcatcacccaggagacccttgaggccctggctcagggcacgcagtcgcccgcccaggtcgccgagcagccggcggtgaaggcctgcctgtggggcacaggctgcgtggccggtgtgctgctacagccctctggggccaaggccagcatcgcccaggccgtgagggatggcctcctgcccacaggcctgggccagaggctgctggaagcccaggtggcatctggcttccttgttgaccccctgaacaaccagagactgtcagtggaggacgcggttaaggtcggcctggtgggcagggagctgagtgagcagctcgggcaggccgagagggcggcggccgggtacccagatccctactctagggcctccctctctctgtggcaggccatggagaaggggctcgtgccacagaacgagggcttgcccctcctgcaggtgcagctggccacagggggtgtggtggaccctgtccacggggtgcacctgccccaggcggcagcctgcagactcggccttctggacacacagacgagccaggtgctgactgcagttgacaaggacaacaagttcttctttgaccccagtgcgcgggaccaggtgacctaccagcagctcagggagcgctgcgtgtgcgactccgagaccggattgttgctgttgccactgccttcagacacagtgcttgaggtggacgaccacaccgcggtggctctgagggccatgaaggtgcccgtcagcacagggaggtttaaggggtgtagcgtgtcactctgggacctgctgctctccgaatacgttggcgctgacaagcggcgggagctggtggcactctgtcggtctgggagggctgcggccctgcggcaggtggtcagcgcagtcaccgccctggtcgaggctgcagagaggcagcccctgcaggccaccttcagagggctccggaagcaggtgtcagccagggacctgttcagggcgcagctgatcagcaggaagacgctggacgagctgagccaggggacaacgactgtgaaggaggtggcggagatggacagcgtgaagcggtccctggagggaggcaacttcattgccggggtccttatccagggcacccaggagaggatgagcatcccagaggccctgaggaggcacatcctgcggcctggcacagccctggtgctgctggaggcacaggcagctaccggcttcatcatcgaccccgcggagaaccggaagctgaccgtggaggaggcgttcaaagcaggaatgttcgggaaagaaacctacgtgaagctgctgtcggccgagcgcgccgtcaccggctacaccgacccctataccgggcagcagatctccctcttccaggccatgcagaaggacctcatcgtccgggagcacggcatccgcctgctggaggcccagatcgccacgggcggcatcatcgaccccgtgcacagccaccgcgtgcccgtggacgtggcctaccgctgcggctacttcgacgaggagatgaaccgcatcctggcggaccccagcgacgacaccaagggcttcttcgaccccaacacgcacgagaacctcacgtacctgcagcttctggagcgctgtgtggaggaccccgagacgggcctgtacctgctacaaatcataaagaaaggagaaaactacgtgtacatcaatgaggccacgagacacgtgttgcaatccagaactgcaaaaatgcgcgtggggaggtttgctgaccaggtggtctctttctgggacctgctgtcctctccatacttcacagaggacaggaagcgggagctcatccaggagtatggagcccagagtgggggcctggagaaattgctggaaatcatcaccacgacaattgaagaaacagagacgcaaaaccaaggcatcaaagtggcggccatcagaggggaggtgacagctgcagacctgttcaactccagggtcatcgatcagaagaccctgcacacacttcgtgtggggaggactgggggacaggcactcagcacgctggagtgtgtgaagccctatctggaaggcagcgactgcattgcgggggtcacggtgccctccaccagggaggtcatgagcctccatgaggccagcaggaaggagctcatccctgcagcatttgcgacttggctgctggaggcgcaggccgccaccgggttcctcctggacccctgcacccgccagaagctctctgtggatgaggctgtggatgtgggcctggtgaacgaggagctgcgggagaggctcctgaaggctgaaagagctgccacgggctacagggatccggccacaggagacacgatcccgctgttccaggccatgcagaagcagctcatcgagaaggcggaggcactgaggctgctggaggtgcaggtggccacggggggtgtcatcgacccacagcaccaccaccggctcccactggaaacagcctacagacggggctgtctgcacaaggacatctatgcgctcatttccgaccagaagcacatgaggaaacggtttgtggacccgaacacgcaagagaaggtctcgtaccgagagctgcaggagaggtgccgcccacaagaggacacgggctgggtgctgttcccagtgaacaaggctgcacgggactccgagcacatcgatgacgagacgagaagggccctggaggcagagcaagtggaaatcacagtgggaaggttcagaggccagaaaccaacactgtgggcactactgaattccgaatacgtgacagaggagaagaagctccagctggtgaggatgtatagaacacacaccagacgggcactgcagacggtagcgcagctcatcttagagttgatcgagaagcaggaaaccagcaacaaacacctgtggttccaaggaattagacgacagatcacagcttctgaactcctcagctcagccataatcacggaggaaatgctccaggacctggaaacgggacggagcacgacgcaagagctcatggaggacgaccgcgtcaagcgctacctggagggcaccagctgcatcgcgggcgtcctggtgcccgccaaggaccagcccggccgccaggagaagatgagcatctaccaggccatgtggaagggcgtgctgcggcccggcacggccctggtgctgctggaggcgcaggcggccaccggcttcgtcatcgaccccgtgcgcaacctgaggctgtcggtggaggagcccgtgcccgcgggcgtggtgggcagcgagatccaggagaagctgctgtcggccgagcgcgccgtcaccggctacaccgacccctacaccgggcagcagatctccctcttccaggccatgcagaaggacctcatcgtccgggagcacggcatccgcctgctggaggcccagatcgccacgggcggcgtcatcgaccccgtgcacagccaccgcgtgcccgtggacgtggcctaccggcgcggctacttcgacgaggagatgaaccgtgtcctggccgaccccagcgacgacaccaagggtttcttcgaccccaacacgcacgagaacctcacgtacgtgcagctgctgcgccgctgcgtgcccgacccggacaccgggctctacatgctgcagctggcaggccggggctccgccgtgcaccagctgagcgaggagctgcgctgtgccctgcgcgacgcccgcgtgacgccaggctcgggcgccctccagggccagagcgtctccgtctgggagctcctcttctaccgcgaggtgtccgaggaccggcgccaggacctgctgagcagataccgggcgggcacgctgaccgtggaggagctgggcgccaccctcacctcgctgctggcccaggcccaggcccaggcccgggccgaggccgaggccgggagcccgcgcccagacccccgggaggccctgcgtgcggccaccatggaggtcaaggtgggccgcctccgggggcgcgcggtgcccgtgtgggacgtgctggcgtccggctacgtgagcagggccgcccgggaggagctgctggccgagtttggctcggggaccctggacttgcccgcgctgacccgccggctgaccgccatcatcgaggaggccgaggaagcccccggggcccggccgcagctccaggacgccaggcgcggcccgcgggagccagggccagccgggcgaggggacggcgactcggggcgctcccagcgagagggccagggggagggcgagacccaggaggccgccgccgccgccgccgccgcccgccgccaggagcagaccctgcgtgatgccaccatggaggtgcagcgcgggcagttccaggggcggccggtctccgtgtgggacgtcctcttctcctcgtacctgagcgaggcccgccgagacgagctcctggcccagcacgcggccggcgccctgggcctgcccgacctcgtcgccgtcctcacccgggtcatcgaggagacggaggagcggctcagcaaggtgtccttccgcggcctgaggcgccaggtgtccgcctccgagctgcacacgtccgggatcctgggccccgagaccctgcgggacctggcccagggcactaagacgctgcaggaggtgacggagatggactcggtcaagcgctacctggagggcaccagctgcatcgcgggcgtcctggtgcccgccaaggaccagcccggccgccaggagaagatgagcatctaccaggccatgtggaagggcgtgctgcggcccggcacggccctggtgctgctggaggcgcaggcggccaccggcttcgtcatcgaccccgtgcgcaacctgaggctgtcggtggaggaggccgtggccgcgggcgtggtgggcggcgagatccaggagaagctgctgtcggccgagcgcgccgtcaccggctacaccgacccctacaccgggcagcagatctccctcttccaggccatgcagaaggacctcatcgtccgggagcacggcatccgcctgctggaggcccagatcgccacgggcggcgtcatcgaccccgtgcacagccaccgcgtgcccgtggacgtggcctaccggcgcggctacttcgacgaggagatgaaccgtgtcctggccgaccccagcgacgacaccaagggtttcttcgaccccaacacgcacgagaacctcacgtacgtgcagctgctgcgccgctgcgtgcccgacccggacaccgggctctacatgctgcagctggcaggccggggctccgccgtgcaccagctgagcgaggagctgcgctgtgccctgcgcgacgcccgcgtgacgccaggctcgggcgccctccagggccagagcgtctccgtctgggagctcctcttctaccgcgaggtgtccgaggaccggcgccaggacctgctgagcagataccgggcgggcacgctgaccgtggaggagctgggcgccaccctcacctcgctgctggcccaggcccaggcccaggcccgggccgaggccgaggccgggagcccgcgcccagacccccgggaggccctgcgtgcggccaccatggaggtcaaggtgggccgcctccgggggcgcgcggtgcccgtgtgggacgtgctggcgtccggctacgtgagcggggccgcccgggaggagctgctggccgagtttggctcggggaccctggacttgcccgcgctgacccgccggctgaccgccatcatcgaggaggccgaggaggcccccggggcccggccgcagctccaggacgcctggcgcggcccgcgggagccagggccagccgggcgaggggacggcgactcggggcgctcccagcgagagggccagggggagggcgagacccaggaggccgccgccgccgccgccgccgcccgccgccaggagcagaccctgcgtgatgccaccatggaggtgcagcgcgggcagttccaggggcggccggtctccgtgtgggacgtcctcttctcctcgtacctgagcgaggcccgccgagacgagctcctggcccagcacgcggccggcgccctgggcctgcccgacctcgtcgccgtcctcacccgggtcatcgaggagacggaggagcggctcagcaaggtgtccttccgcggcctgaggcgccaggtgtccgcctccgagctgcacacgtccgggatcctgggccccgagaccctgcgggacctggcccagggcactaagacgctgcaggaggtgacggagatggactcggtcaagcgctacctggagggcaccagctgcatcgcgggcgtcctggtgcccgccaaggaccagcccggccgccaggagaagatgagcatctaccaggccatgtggaagggcgtgctgcggcccggcacggccctggtgctgctggaggcgcaggcggccaccggcttcgtcatcgaccccgtgcgcaacctgaggctgtcggtggaggaggccgtggccgcgggcgtggtgggcggcgagatccaggagaagctgctgtcggccgagcgcgccgtcaccggctacaccgacccctacaccgggcagcagatctccctcttccaggccatgcagaaggacctcatcgtccgggagcacggcatccgcctgctggaggcccagatcgccacgggcggcgtcatcgaccccgtgcacagccaccgcgtgcccgtggacgtggcctaccggcgcggctacttcgacgaggagatgaaccgtgtcctggccgaccccagcgacgacaccaagggtttcttcgaccccaacacgcacgagaacctcacgtacgtgcagctgctgcgccgctgcgtgcccgacccggacaccgggctctacatgctgcagctggcaggccggggctccgccgtgcaccagctgagcgaggagctgcgctgtgccctgcgcgacgcccgcgtgacgccaggctcgggcgccctccagggccagagcgtctccgtctgggagctcctcttctaccgcgaggtgtccgaggaccggcgccaggacctgctgagcagataccgggcgggcacgctgaccgtggaggagctgggcgccaccctcacctcgctgctggcccaggcccaggcccaggcccgggccgaggccgaggccgggagcccgcgcccagacccccgggaggccctgcgtgcggccaccatggaggtcaaggtgggccgcctccgggggcgcgcggtgcccgtgtgggacgtgctggcgtccggctacgtgagcggggccgcccgggaggagctgctggccgagtttggctcggggaccctggacttgcccgcgctgacccgccggctgaccgccatcatcgaggaggccgaggaggcccccggggcccggccgcagctccaggacgcctggcgcggcccgcgggagccagggccagccgggcgaggggacggcgactcggggcgctcccagcgagagggccagggggagggcgagacccaggaggccgccgccgccgccgccgccgcccgccgccaggagcagaccctgcgtgatgccaccatggaggtgcagcgcgggcagttccaggggcggccggtctccgtgtgggacgtcctcttctcctcgtacctgagcgaggcccgccgagacgagctcctggcccagcacgcggccggcgccctgggcctgcccgacctcgtcgccgtcctcacccgggtcatcgaggagacggaggagcggctcagcaaggtgtccttccgcggcctgaggcgccaggtgtccgcctccgagctgcacacgtccgggatcctgggccccgagaccctgcgggacctggcccagggcactaagacgctgcaggaggtgacggagatggactcggtcaagcgctacctggagggcaccagctgcatcgcgggcgtcctggtgcccgccaaggaccagcccggccgccaggagaagatgagcatctaccaggccatgtggaagggcgtgctgcggcccggcacggccctggtgctgctggaggcgcaggcggccaccggcttcgtcatcgaccccgtgcgcaacctgaggctgtcggtggaggaggccgtggccgcgggcgtggtgggcggcgagatccaggagaagctgctgtcggccgagcgcgccgtcaccggctacaccgacccctacaccgggcagcagatctccctcttccaggccatgcagaaggacctcatcgtccgggagcacggcatccgcctgctggaggcccagatcgccacgggcggcgtcatcgaccccgtgcacagccaccgcgtgcccgtggacgtggcctaccggcgcggctacttcgacgaggagatgaaccgtgtcctggccgaccccagcgacgacaccaagggcttcttcgaccccaacacgcacgagaacctcacgtacgtgcagctgctgcgccgctgcgtgcccgacccggacaccgggctctacatgctgcagctggcaggccggggctccgccgtgcaccagctgagcgaggagctgcgctgtgccctgcgcgacgcccgcgtgacgccaggctcgggcgccctccagggccagagcgtctccgtctgggagctcctcttctaccgcgaggtgtccgaggaccggcgccaggacctgctgagcagataccgggcgagcacgctgaccgtggaggagctgggcgccaccctcacctcgctgctggcccaggcccaggcccaggcccgggccgaggccgaggccgggagcccgcgcccagacccccgggaggccctgcgtgcggccaccatggaggtcaaggtgggccgcctccgggggcgcgcggtgcccgtgtgggacgtgctggcgtccggctacgtgagcagggccgcccgggaggagctgctggccgagtttggctcggggaccctggacttgcccgcgctgacccgccggctgaccgccatcatcgaggaggccgaggaggcccccggggcccggccgcagctccaggacgcctggcgcggcccgcgggagccagggccagccgggcgaggggacggcgactcggggcgctcccagcgagagggccagggggagggcgagacccaggaggccgccgccgccaccgccgccgcccgccgccaggagcagaccctgcgtgatgccaccatggaggtgcagcgcgggcagttccaggggcggccggtctccgtgtgggacgtcctcttctcctcgtacctgagcgaggcccgccgagacgagctcctggcccagcacgcggccggcgccctgggcctgcccgacctcgtcgccgtcctcacccgggtcatcgaggagacggaggagcggctcagcaaggtgtccttccgcggcctgaggcgccaggtgtccgcctccgagctgcacacgtccgggatcctgggccccgagaccctgcgggacctggcccagggcactaagacgctgcaggaggtgacggagatggactcggtcaagcgctacctggagggcaccagctgcatcgcgggcgtcctggtgcccgccaaggaccagcccggccgccaggagaagatgagcatctaccaggccatgtggaagggcgtgctgcggcccggcacggccctggtgctgctggaggcgcaggcggccaccggcttcgtcatcgaccccgtgcgcaacctgaggctgtcggtggaggaggccgtggccgcgggcgtggtgggcggcgagatccaggagaagctgctgtcggccgagcgcgccgtcaccggctacaccgacccctacaccgggcagcagatctccctcttccaggccatgcagaaggacctcatcgtccgggagcacggcatccgcctgctggaggcccagatcgccacgggcggcgtcatcgaccccgtgcacagccaccgcgtgcccgtggacgtggcctaccggcgcggctacttcgacgaggagatgaaccgtgtcctggccgaccccagcgacgacaccaagggcttcttcgaccccaacacgcacgagaacctcacgtacgtgcagctgctgcgccgctgcgtgcccgacccggacaccgggctctacatgctgcagctggcaggccggggctccgccgtgcaccagctgagcgaggagctgcgctgtgccctgcgcgacgcccgcgtgacgccaggctcgggcgccctccagggccagagcgtctccgtctgggagctcctcttctaccgcgaggtgtccgaggaccggcgccaggacctgctgagcagataccgggcgggcacgctgaccgtggaggagctgggcgccaccctcacctcgctgctggcccaggcccaggcccaggcccgggccgaggccgaggccgggagcccgcgcccagacccccgggaggccctgcgtgcggccaccatggaggtcaaggtgggccgcctccgggggcgcgcggtgcccgtgtgggacgtgctggcgtccggctacgtgagcggggccgcccgggaggagctgctggccgagtttggctcggggaccctggacttgcccgcgctgacccgccggctgaccgccatcatcgaggaggccgaggaggcccccggggcccggccgcagctccaggacgcctggcgcggcccgcgggagccagggccagccgggcgaggggacggcgactcggggcgctcccagcgagagggccagggggagggcgagacccaggaggccgccgccgccgccgccgccgcccgccgccaggagcagaccctgcgtgatgccaccatggaggtgcagcgcgggcagttccaggggcggccggtctccgtgtgggacgtcctcttctcctcgtacctgagcgaggcccgccgagacgagctcctggcccagcacgcggccggcgccctgggcctgcccgacctcgtcgccgtcctcacccgggtcatcgaggagacggaggagcggctcagcaaggtgtccttccgcggcctgaggcgccaggtgtccgcctccgagctgcacacgtccgggatcctgggccccgagaccctgcgggacctggcccagggcactaagacgctgcaggaggtgacggagatggactcggtcaagcgctacctggagggcaccagctgcatcgcgggcgtcctggtgcccgccaaggaccagcccggccgccaggagaagatgagcatctaccaggccatgtggaagggcgtgctgcggcccggcacggccctggtgctgctggaggcgcaggcggccaccggcttcgtcatcgaccccgtgcgcaacctgaggctgtcggtggaggaggccgtggccgcgggcgtggtgggcggcgagatccaggagaagctgctgtcggccgagcgcgccgtcaccggctacaccgacccctacaccgggcagcagatctccctcttccaggccatgcagaaggacctcatcgtccgggagcacggcatccgcctgctggaggcccagatcgccacgggcggcgtcatcgaccccgtgcacagccaccgcgtgcccgtggacgtggcctaccggcgcggctacttcgacgaggagatgaaccgcgtcctggccgaccccagcgacgacaccaagggcttcttcgaccccaacacgcacgagaacctcacgtacctgcagcttctgcagagggccaccctggaccctgagacggggctcctatttctttctctctctctacagtgactgggcttcctccgtgcagttttctgcaactctggagaagttgaggcatacttgtgtgtctgggttgtttttttttttttttgtcattctttaattttgttgttttacccattcgttatctgtggaaaacgttttaagttgtcatgtgacagaaacttttcctttgtccatcgaggtgtttcataagttttttggtgtgttttctgggtcgtctatgtgtcatatggttttacttttctcccggaatt

SEQ ID NO: 1806 - DNA, 9535 bp, Homo sapiens
ccagccgtgtgtgatgagtggccacaccttgcctcctcttcccgtcccaggcaccaacagcacagagcaggccagtgtacccagagccatggcagccacgctgggagccggcacgccccccaggccccaggccaggagcatagctggggtgtatgtggaggcctcgggccaggcccagagtgtctacgccgccatggagcagggcctcctgcctgctgggctcgggcaggctctgctagaggcccaggcagccactgggggcctggtggacctcgcccggggccagctgctccctgtgtccaaggccctgcagcagggtctggtggggctggagctgaaggagaagctgctggccgctgagcgtgccactacgggctatcctgacccctacggcggtgagaagctggccctctttcaggccatcgggaaggaggttgtggacagggccctggggcagagctggctggaggtccaactggccactgggggcctggtggaccccgcccagggagtgctcgtggcccctgagccagcctgccaccagggcctcctggaccgggagacatggcacaagctgtcagagcttgagcctggcacaggtgacctgcgcttcctcaaccccaacacgctggagcggctgacataccaccagctgctggaaaggtgtgtgcgtgcccccggctcggggctagccttgctgcccctcaagatcaccttccgctccatgggcggggcggtgagtgcagctgagctgctggaggtgggcatcctggacgagcaggctgtgcagggtctgcgggagggcaggctggccgcagtggacgtgagtgcacgtgccgaggtgcggcgctacctggagggtaccggcagcgtggccggggttgtcctgctgcccgaaggccacaagaagagctttttccaggctgccaccgagcacctgctcccaatgggcaccgcgctgccactcctagaggcccaggctgccacccacaccctggtggaccccatcacaggccagcggctgtgggtagacgaggcagtcagggcgggcctggtcagcccagagctccatgagcagctcctggtggccgagcaggccgtgacagggcaccacgaccccttcagtggctcccaaatcccccttttccaggccatgaagaaggggctagtggacaggccactagcactgcggctcttggatgcccagctggccacaggcgggctggtctgtccagcacgcaggctccggctgcccctggaggccgccctgcgctgcggctgcctggatgaagacactcagcggcagctctcgcaggctggcagcttctcagacggcacgcacggcggcctgcgctatgaacagctgctggccctctgtgtcaccgacccagagaccgggcttgccttcctgccactctcagggggaccccggggaggggagccccagggacccccattcatcaagtacagcactcggcaggccctgagcacggccacagccaccgtctctgtggggaagttccggggccggcccgtgtccctctgggagctgctcttctctgaggccatctcctcagagcagagggcgatgctggcccagcagtaccaggaagggaccctctccgtggagaagctggccgctgagctgagcgccaccctcgagcaggctgcagccactgccagggtcaccttttctgggctgagggacaccgtgacaccaggagagctgctgaaagccgagatcatcgaccaggacctgtacgagcggctggagcatggacaggccacagccaaggatgtgggcagcctggcctcggtgcagaggtacctgcagggtacgggctgcattgctggcctgctgctccctggctcccaggaacgcctgagcatctatgaggcccgatgcaaggggctcctccggcccggcactgccctcatccttctggaggcacaagctgccacaggcttcatcatcgacccaaaagcaaacaaggggcactccgttgaggaggcactgagggctgctgtcattgggcctgatgtgttcgcgaagctgctgtcggctgagcgcgctgtcactggctacactgacccctacaccgggcagcagatctccctcttccaggccatgcagaagggcctcatcgtccgggagcacggcatccgcctgctggaggcccagatcgccacgggcggcgtcatcgaccccgtgcacagccaccgcgtgcccgtggacgtggcctaccggcgcggctacttcgatcagatgctgaacttgatcctgttggacccttctgacgacaccaagggcttcttcgaccccaacacgcacgagaacctcacgtacctgcagcttctggagcgctgtgtgcgtgaccccgagacgggcctgtacctcctgccactcagcagcacgcagtccccgctggtggacagtgccacccagcaggccttccagaacctgctgctctccgtgaagtatggacggtttcaggggcagagggtctccgcgtgggagctgatcaactctgagtacttcagcgagggccgcaggaggcagctgctgcgtcgctaccggcagcgcgaggtcacgctggggcaggtggcaaagctgctggaggcggagacgcagagacaggcggacatcatgctgcccgcactgcggagccgggtcaccgtccaccagctcctggaggccggtatcattgaccagcagctgttggaccaagtgctggccgggacaatcagcccggaggccctcctactcatggacggcgtccgcaggtacctgtgcggcctgggagctgtgggcggtgtgcggctgctgccctctggccagcggctcagcctctaccaggccatgaggcagaagctgctggggcccagggtggccctggccctgctggaggcccaggcggccaccggaaccatcatggaccctcacagcccagagagcctctcggtggatgaggccgtgcgcaggggtgtggtggggccggagctgtatggcaggctgaagcgggctgagggtgccattgctggcttcagagaccccttctctgggaagcaggtgtctgtgttccaggccatgaagaaaggtctcatcccttgggagcaagctgcccgcctcctggaggctcaagtggccacaggagggatcattgaccccaccagccaccaccacctccccatgccagtggccattcagcgtggctatgttgaccaggagatggagacagccttgtccagctcctccgaaaccttccccacaccggacggccaggggcgcacgagctatgcccagctcctggaggagtgccccagggatgagacttctggccttcacctcctgcccctgccagaaagtgctcctgccctccccaccgaggagcaggtccagaggagcctgcaggccgtgccgggggccaaggatggcacatccctctgggacctgctcagctcctgccacttcaccgaggagcaacggaggggcctgctggaggacgtgcaggaggggaggaccactgtgccacagctgctagcctctgtgcagaggtgggtacaggagaccaagctcctggcccaggcccgcgtcatggtgcccggcccacggggtgaggtacccgctgtctggctgctggatgctggcatcatcacccaggagacccttgaggccctggctcagggcacgcagtcgcccgcccaggtcgccgagcagccggcggtgaaggcctgcctgtggggcacaggctgcgtggccggtgtgctgctacagccctctggggccaaggccagcatcgcccaggccgtgagggatggcctcctgcccacaggcctgggccagaggctgctggaagcccaggtggcatctggcttccttgttgaccccctgaacaaccagagactgtcagtggaggacgcggttaaggtcggcctggtgggcagggagctgagtgagcagctcgggcaggccgagagggcggcggccgggtacccagatccctactctagggcctccctctctctgtggcaggccatggagaaggggctcgtgccacagaacgagggcttgcccctcctgcaggtgcagctggccacagggggtgtggtggaccctgtccacggggtgcacctgccccaggcggcagcctgcagactcggccttctggacacacagacgagccaggtgctgactgcagttgacaaggacaacaagttcttctttgaccccagtgcgcgggaccaggtgacctaccagcagctcagggagcgctgcgtgtgcgactccgagaccggattgttgctgttgccactgccctcagacacagtgcttgaggtggacgaccacaccgcggtggctctgagggccatgaaggtgcccgtcagcacagggaggtttaaggggtgtagcgtgtcactctgggacctgctgctctccgaatacgttggcgctgacaagcggcgggagctggtggcactctgtcggtctgggagggctgcggccctgcggcaggtggtcagcgcagtcaccgccctggtcgaggctgcagagaggcagcccctgcaggccaccttcagagggctccggaagcaggtgtcagccagggacctgttcagggcgcagctgatcagcaggaagacgctggacgagctgagccaggggacaacgactgtgaaggaggtggcggagatggacagcgtgaagcggtccctggagggaggcaacttcattgccggggtccttatccagggcacccaggagaggatgagcatcccagaggccctgaggaggcacatcctgcggcctggcacagccctggtgctgctggaggcacaggcagctaccggcttcatcatcgaccccgtggagaaccggaagctgaccgtggaggaggcgttcaaagcaggaatgttcgggaaagaaacctacgtgaagctgctgtcggccgagcgcgccgtcaccggctacaccgacccctataccgggcagcagatctccctcttccaggccatgcagaaggacctcatcgtccgggagcacggcatccgcctgctggaggcccagatcgccacgggcggcatcatcgaccccgtgcacagccaccgcgtgcccgtggacgtggcctaccgctgcggctacttcgacgaggagatgaaccgcatcctggcggaccccagcgacgacaccaagggcttcttcgaccccaacacgcacgagaacctcacgtacctgcagcttctggagcgctgtgtggaggaccccgagacgggcctgtacctgctacaaatcataaagaaaggagaaaactacgtgtacatcaatgaggccacgagacacgtgttgcaatccagaactgcaaaaatgcgcgtggggaggtttgctgaccaggtggtctctttctgggacctgctgtcctctccatacttcacagaggacaggaagcgggagctcatccaggagtatggagcccagagtgggggcctggagaaattgctggaaatcatcaccacgacaattgaagaaacagagacgcaaaaccaaggcatcaaagtggcggccatcagaggggaggtgacagctgcagacctgttcaactccagggtcatcgatcagaagaccctgcacacacttcgtgtggggaggactgggggacaggcactcagcacgctggagtgtgtgaagccctatctggaaggcagcggctgcattgcgggggtcacggtgccctccaccagggaggtcatgagcctccatgaggccagcaggaaggagctcatccctgcagcatttgcgacttggctgctggaggcgcaggccgccaccgggttcctcctggacccctgcacccgccagaagctctctgtggatgaggctgtggatgtgggcctggtgaacgaggagctgcgggagaggctcctgaaggctgaaagagctgccacgggctacagggatccggccacaggagacacgatcccgctgttccaggccatgcagaagcagctcatcgagaaggcggaggcactgaggctgctggaggtgcaggtggccacggggggtgtcatcgacccacagcaccaccaccggctcccactggaaacagcctacagacggggctgtctgcacaaggacatctatgcgctcatttccgaccagaagcacatgaggaaacggtttgtggacccgaacacgcaagagaaggtctcgtaccgagagctgcaggagaggtgccgcccacaagaggacacgggctggctgctgttcccagtgaacaaggctgcacgggactccgagcacatcgatgacgagacgagaagggccctggaggcagagcaagtggaaatcacagtgggaaggttcagaggccagaaaccaacactgtgggcactactgaattccgaatacgtgacagaggagaagaagctccagctggtgaggatgtatagaacacacaccagacgggcactgcagacggtagcgcagctcatcttagagttgatcgagaagcaggaaaccagcaacaaacacctgtggttccaaggaattagacgacagatcacagcttctgaactcctcagctcagccataatcacggaggaaatgctccaggacctggaaacgggacggagcacgacgcaagagctcatggaggacgaccgcgtcaagcgctacctggagggcaccagctgcatcgcgggcgtcctggtgcccgccaaggaccagcccggccgccaggagaagatgagcatctaccaggccatgtggaagggcgtgctgcggcccggcacggccctggtgctgctggaggcgcaggcggccaccggcttcgtcatcgaccccgtgcgcaacctgaggctgtcggtggaggaggccgtggccgcgggcgtggtgggcggcgagatccaggagaagctgctgtcggccgagcgcgccgtcaccggctacaccgacccctacaccgggcagcagatctccctcttccaggccatgcagaaggacctcatcgtccgggagcacggcatccgcctgctggaggcccagatcgccacgggcggcgtcatcgaccccgtgcacagccaccgcgtgcccgtggacgtggcctaccggcgcggctacttcgacgaggagatgaaccgtgtcctggccgaccccagcgacgacaccaagggcttcttcgaccccaacacgcacgagaacctcacgtacgtgcagctgctgcgccgctgcgtgcccgacccggacaccgggctctacatgctgcagctggcaggccggggctccgccgtgcaccagctgagcgaggagctgcgctgtgccctgcgcgacgcccgcgtgacgccaggctcgggcgccctccagggccagagcgtctccgtctgggagctcctcttctaccgcgaggtgtccgaggaccggcgccaggacctgctgagcagataccgggcgggcacgctgaccgtggaggagctgggcgccaccctcacctcgctgctggcccaggcccaggcccaggcccgggccgaggccgaggccgggagcccgcgcccagacccccgggaggccctgcgtgcggccaccatggaggtcaaggtgggccgcctccgggggcgcgcggtgcccgtgtgggacgtgctggcgtccggctacgtgagcagggccgcccgggaggagctgctggccgagtttggctcggggaccctggacttgcccgcgctgacccgccggctgaccgccatcatcgaggaggccgaggaggcccccggggcccggccgcagctccaggacgcctggcgcggcccgcgggagccagggccagccgggcgaggggacggcgactcggggcgctcccagcgagagggccagggggagggcgagacccaggaggccgccgccgccgcccgccgccaggagcagaccctgcgtgatgccaccatggaggtgcagcgcgggcagttccaggggcggccggtctccgtgtgggacgtcctcttctcctcgtacctgagcgaggcccaccgagacgagctcctggcccagcacgcggccggcgccctgggcctgcccgacctcgtcgccgtcctcacccgggtcatcgaggagaccgaggagcggctcagcaaggtgtccttccgcggcctgaggcgccaggtgtccgcctccgagctgcacacgtccgggatcctgggccccgagaccctgcgggacctggcccagggcactaagacgctgcaggaggtgacggagatggactcggtcaagcgctacctggagggcaccagctgcatcgcgggcgtcctggtgcccgccaaggaccagcccggccgccaggagaagatgagcatctaccaggccatgtggaagggcgtgctgcggcccggcacggccctggtgctgctggaggcgcaggcggccaccggcttcgtcatcgaccccgtgcgcaacctgaggctgtcggtggaggaggccgtggccgcgggcgtggtgggcggcgagatccaggagaagctgctgtcggccgagcgcgccgtcaccggctacaccgacccctacaccgggcagcagatctccctcttccaggccatgcagaaggacctcatcgtccgggagcacggcatccgcctgctggaggcccagatcgccacgggcggcgtcatcgaccccgtgcacagccaccgcgtgcccgtggacgtggcctaccggcgcggctacttcgacgaggagatgaaccgcgtcctggccgaccccagcgacgacaccaagggcttcttcgaccccaacacgcacgagaacctcacgtacctgcagcttctgcagagggccaccctggaccctgagacggggctcctatttctttctctctctctacagtgactgggcttcctccgtgcagttttctgcaactctggagaagtggaggcatacttgtgtgtctgggttgtttttttttttttttttttttttgtcattctttaattttgttgttttacccattcgttatctgtggaaaacgttttaagttgtcatgtgacagaaacttttcctttgtccatcgaggtgtttcataagttttttggtgtgttttctgggtcgtctatgtgtcatatggttttacttttctctcctttttcgttttcagaacatttttctgtctgttttggattcactgcttccattttacagaatgtcactctttagactctcagtccatcatgccatcgggtactcttgttgcagtgtaatttttattacatgcggttatttccctaacgatgtgctattcacgttcatcttcaaactcattttccatcagccagtgtctactatttagtgccctggctctatttcggtcctcctccccgggctttccctggctgctgtgctggccaaaagcatgggctttattctctccattggctgctgctccaccttagaggtgtgacctcactagcgttgactgagcgagtctgttgtggagaagaactttttgtagtaatttactaggaaaaattctgaacaagtaaaatatgaaggaaactc

SEQ ID NO: 1807 - DNA, 3295 bp, Homo sapiens
accagggcacttccggcggcgctctccgcgccttatcgccaaagctgcggctctggacgcccagccgcggcgtatcccgatcacttccgggtagtgctccacgggcacgagccgcgattgggctaccgtagatggggtacttccggtgtgcaggtgctgggtccttcggcaggaggaggaagatggagcccagcaccgcggcccgggcttgggccctcttttggttgctgctgcccttgcttggcgcggtttgcgccagcggaccccgcaccttagtgctgctggacaacctcaacgtgcgggagactcattcgcttttcttccggagcctgaaggaccggggctttgagctcacattcaagaccgctgatgaccccagcctgtctctcataaagtatggggaattcctctatgacaatctcatcattttctccccttcggtagaagattttggaggcaacatcaacgtggagaccatcagtgcctttattgacggtggaggcagtgtgctggtagctgccagctccgacattggtgaccctcttcgagagctgggcagtgagtgcgggattgagtttgacgaggagaaaacggctgtcattgaccatcacaactatgacatctcagaccttggccagcatacgctcatcgtggctgacactgagaacctgctgaaggccccaaccatcgttgggaaatcatctctaaatcccatcctctttcgaggtgttgggatggtggccgatcctgataaccctttggtgctggacatcctgacgggctcttccacctcttactccttcttcccggacaagcctatcacccagtatccacatgcggtggggaagaacaccctcctcattgctgggctccaggccaggaacaatgcccgcgtcatcttcagcggctccctcgacttcttcagcgactccttcttcaactcagcagtgcagaaggcggcgcccggctcccagaggtattcccagacaggcaactatgaactagctgtggccctctcccgctgggtgttcaaggaggagggtgtcctccgtgtggggcctgtgtcccatcatcgggtgggcgagacagccccacccaatgcctacactgtcactgacctagtggagtatagcatcgtgatccagcagctctcaaatggcaaatgggtcccctttgatggcgatgacattcagctggagtttgtccgcattgatccttttgtgaggaccttcctgaagaagaaaggtggcaaatacagtgttcagttcaagttgcccgacgtgtatggtgtattccagtttaaagtggattacaaccggctaggctacacacacctgtactcttccactcaggtatccgtgcggccactccagcacacgcagtatgagcgcttcatcccctcggcctacccctactacgccagcgccttctccatgatgctggggctcttcatcttcagcatcgtcttcttgcacatgaaggagaaggagaagtccgactgaggggctagagccctctccgcacagcgtggagacggggcagggaggggggttattaggattggtggttttgttttgctttgtttaaagccgtgggaaaatggcacaactttacctctgtgggagatgcaacactgagagccaaggggtgggagttgggataatttttatataaaagaagtttttccactttgaattgctaaaagtggcatttttcctatgtgcagtcactcctctcatttctaaaatagggacgtggccaggcacggtggctcatgcctgtaatcccagcactttgggaggccgaggcaggcggctcacgaggtcaggagatcgagactatcctggtaacacggtaaaaccctgtctctactaaaagtacaaaaaattagctgggcgtggtggtgggcacctgtagtcccagctactcgggaggctgaggcaggagaaaggcatgaatccaggaggcagagcttgcagtgagctgagatcacgccattgcactccagcctgggcaacagtgttaagactctgtctcaaatataaataaataaataaataaataaaaataaagcgagatgttgccctcaaacttcacctggccccggtcctggtttgctaatggctgtgggtgggggttactgtgggtgatgactgactggatacaaaatcctaagtaagtggcttcatgaaattttgcctaggactggactgtctttcttttaactgtgaaatgatgatggttctccctaacgtctcctcaaaggatacaagaaagttgttgttgctagtagaccgaggggtgggaattactgaaatggaaaatctagatgacagtgctggggaagagaaaactagaacagctcagttgaagacaacctttactgcatgttgacgctgatttaggcaatagcttcctaaaaatcatgtataaagttagttagttagacatgaaatctcttccccaatgttgatacctgcccacaaaatattctcaccttcagagtataagaatcattcttaaagccaaatattcagttcaaggcacatacgtcatctgcagttgtaaatttgcatttaatatttcacaattcctgtaagagaggctagtcaggagggaaaccctcaagtttaaatccccacacttacttacttactgctcatccgtcactttcgctaagtgagattaataattcagtagctggtccagaacgcacagcttgggaacgcagaggcccaggcctcatgtaatttcccactcccgtaactgaacgtgctgacccatgttgatgtctgccttcatccaggtggcaaatcagacatgctacgctgcccccttcaaacgagttcctcgtgttaggggcaaaggtcacagccaaactctgccactgacagccagtgccttggcctggatcctctctgtggatgcaggcctacccctcctcagtccagcctcatctactagaccagcttggccattcacttttcagatgtctgtgagcacaggactgcagactgaactctcactcaagttcttccatttgccaagcccgaggccttttccggctaaccagccctctctgcgctgtcttgtctcctgactcccaccctcaccattcacagaccatcacgacacagaggatgccaagttcttttagtaattcaccagctccatgcagggacatcacagggctgccctccatgagcagaggaggagggctgcctggcagagcgtttcacactccaggttagccagaaagagcatcttcatttttgtttccacacaacacttctct

SEQ ID NO: 1808 - DNA, 2101 bp, Homo sapiens
accagggcacttccggcggcgctctccgcgccttatcgccaaagctgcggctctggacgcccagccgcggcgtatcccgatcacttccgggtagtgctccacgggcacgagccgcgattgggctaccgtagatggggtacttccggtgtgcaggtgctgggtccttcggcaggaggaggaagatggagcccagcaccgcggcccgggcttgggccctcttttggttgctgctgcccttgcttggcgcggtttgcgccagcggaccccgcaccttagtgctgctggacaacctcaacgtgcgggagactcattcgcttttcttccggagcctgaaggaccggggctttgagctcacattcaagaccgctgatgaccccagcctgtctctcataaagtatggggaattcctctatgacaatctcatcattttctccccttcggtagaagattttggaggcaacatcaacgtggagaccatcagtgcctttattgacggtggaggcagtgtgctggtagctgccagctccgacattggtgaccctcttcgagagctgggcagtgagtgcgggattgagtttgacgaggagaaaacggctgtcattgaccatcacaactatgacatctcagaccttggccagcatacgctcatcgtggctgacactgagaacctgctgaaggccccaaccatcgttgggaaatcatctctaaatcccatcctctttcgaggtgttgggatggtggccgatcctgataaccctttggtgctggacatcctgacgggctcttccacctcttactccttcttcccggacaagcctatcacccagtatccacatgcggtggggaagaacaccctcctcattgctgggctccaggccaggaacaatgcccgcgtcatcttcagcggctccctcgacttcttcagcgactccttcttcaactcagcagtgcagaaggcggcgcccggctcccagaggtattcccagacaggcaactatgaactagctgtggccctctcccgctgggtgttcaaggaggagggtgtcctccgtgtggggcctgtgtcccatcatcgggtgggcgagacagccccacccaatgcctacactgtcactgacctagtggagtatagcatcgtgatccagcagctctcaaatggcaaatgggtcccctttgatggcgatgacattcagctggagtttgtccgcattgatccttttgtgaggaccttcctgaagaagaaaggtggcaaatacagtgttcagttcaagttgcccgacgtgtatggtgtattccagtttaaagtggattacaaccggctaggctacacacacctgtactcttccactcaggtatccgtgcggccactccagcacacgcagtatgagcgcttcatcccctcggcctacccctactacgccagcgccttctccatgatgctggggctcttcatcttcagcatcgtcttcttgcacatgaaggagaaggagaagtccgactgaggggctagagccctctccgcacagcgtggagacggggcagggaggggggttattaggattggtggttttgttttgctttgtttaaagccgtgggaaaatggcacaactttacctctgtgggagatgcaacactgagagccaaggggtgggagttgggataatttttatataaaagaagtttttccactttgaattgctaaaagtggcatttttcctatgtgcagtcactcctctcatttctaaaatagggacgtggccaggcacggtggctcatgcctgtaatcccagcactttgggaggccgaggcaggcggctcacgaggtcaggagatcgagactatcctggctaacacggtaaaaccctgtctctactaaaagtacaaaaaattagctgggcgtggtggtgggcacctgtagtcccagctactcgggaggctgaggcaggagaaaggcatgaatccaagaggcagagcttgcagtgagctgagatcacgccattgcactccagcctgggcaacagtgttaagactctgtctcaaatataaataaataaataaataaataaataaataaataaaaataaagcgagatgttgccctc

SEQ ID NO: 1809 - DNA, 1668 bp, Homo sapiens
ccgcgccttatcgccaaagctgcggctctggacgcccagccgcggcgtatcccgatcacttccgggtagtgctccacgggcacgagccgcgattgggctaccgtagatggggtacttccggtgtgcaggtgctgggtccttcggcaggaggaggaagatggagcccagcaccgcggcccgggcttgggccctcttttggttgctgctgcccttgcttggcgcggtttgcgccagcggaccccgcaccttagtgctgctggacaacctcaacgtgcgggagactcattcgcttttcttccggagcctgaaggaccggggctttgagctcacattcaagaccgctgatgaccccagcctgtctctcataaagtatggggaattcctctatgacaatctcatcattttctccccttcggtagaagattttggaggcaacatcaacgtggagaccatcagtgcctttattgacggcggaggcagtgtgctggtagctgccagctccgacattggtgaccctcttcgagagctgggcagtgagtgcgggattgagtttgacgaggagaaaacggctgtcattgaccatcacaactatgacatctcagaccttggccagcatacgctcatcgtggctgacactgagaacctgctgaaggccccaaccatcgttgggaaatcatctctaaatcccatcctctttcgaggtgttgggatggtggccgatcctgataaccctttggtgctggacatcctgacgggctcttccacctcttactccttcttcccggacaagcctatcacccagtatccacatgcggtggggaagaacaccctcctcattgctgggctccaggccaggaacaatgcccgcgtcatcttcagcggctccctcgacttcttcagcgactccttcttcaactcagcagtgcagaaggcggcgcccggctcccagaggtattcccagacaggcaactatgaactagctgtggccctctcccgctgggtgttcaaggaggagggtgtcctccgtgtggggcctgtgtcccatcatcgggtgggcgagacagccccacccaatgcctacactgtcactgacctagtggagtatagcatcgtgatccagcagctctcaaatggcaaatgggtcccctttgatggcgatgacattcagctggagtttgtccgcattgatccttttgtgaggaccttcctgaagaagaaaggtggcaaatacagtgttcagttcaagttgcccgacgtgtatggtgtattccagtttaaagtggattacaaccggctaggctacacacacctgtactcttccactcaggtatccgtgcggccactccagcacacgcagtatgagcgcttcatcccctcggcctacccctactacgccagcgccttccccatgatgctggggctcttcatcttcagcatcgtcttcttgcacatgaaggagaaggagaagtccgactgaggggctagagccctctccgcacagcgtggagacggggcaaggaggggggttattaggattggtggttttgttttgctttgtttaaagccgtgggaaaatggcacaactttacctctgtgggagatgcaacactgagagccaaggggtgggagttgggataatttttatataaaagaagtttttccactttg

SEQ ID NO: 1810 - DNA, 1305 bp, Homo sapiens
accagggcacttccggcggcgctctccgcgccttatcgccaaagctgcggctctggacgcccagccgcggcgtatcccgatcacttccgggtagtgctccacgggcacgagccgcgattgggctaccgtagatggggtacttccggtgtgcaggtgctgggtccttcggcaggaggaggaagatggagcccagcaccgcggcccgggcttgggccctcttttggttgctgctgcccttgcttggcgcggtttgcgccagcggaccccgcaccttagtgctgctggacaacctcaacgtgcgggagactcattcgcttttcttccggagcctgaaggaccggggctttgagctcacattcaagaccgctgatgaccccagcctgtctctcataaagtatggggaattcctctatgacaatctcatcattttctccccttcggtagaagattttggaggcaacatcaacgtggagaccatcagtgcctttattgacggtggaggcagtgtgctggtagctgccagctccgacattggtgaccctcttcgagagctgggcagtgagtgcgggattgagtttgacgaggagaaaacggctgtcattgaccatcacaactatgacatctcagaccttggccagcatacgctcatcgtggctgacactgagaacctgctgaaggccccaaccatcgttgggaaatcatctctaaatcccatcccctctccgcacagcgtggagacggggcagggaggggggttattaggattggtggttttgttttgctttgtttaaagccgtgggaaaatggcacaactttacctctgtgggagatgcaacactgagagccaaggggtgggagttgggataatttttatataaaagaagtttttccactttgaattgctaaaagtggcatttttcctatgtgcagtcactcctctcatttctaaaatagggacgtggccaggcacggtggctcatgcctgtaatcccagcactttgggaggccgaggcaggcggctcacgaggtcaggagatcgagactatcctggctaacacggtaaaaccctgtctctactaaaagtacaaaaaattagctgggcgtggtggtgggcacctgtagtcccagctactcgggaggctgaggcaggagaaaggcatgaatccaagaggcagagcttgcagtgagctgagatcacgccattgcactccagcctgggcaacagtgttaagactctgtctcaaatataaataaataaataaataaataaataaataaataaaaataaagcgagatgttgccctc

SEQ ID NO: 1811 - DNA, 791 bp, Homo sapiens
atgaaatacctattgcctacggcagccgctggattgttattactcgcggcccagccggccatggcctcttctgagctgactcaggaccctgctgtgtctgtggcctcggggcagacagtcaggatcacatgccaaggagacagcctcagacattattatccaagctggtaccagcagaagccacgacaggcccctgtacttgtcttctttggtgaaaacaaccggccctcagggatcccagaccgattctctggctccgcctcaggaaacacagcttctttgaccatcgctggggcacaggcagaagatgacgctgactattattgttcttcgcgggacggcaatgatgaccgctggctattcggcggagggaccaaagtgaccgtcctgggtcagcccaaggctgccccctcggtcactctgttcccgccctcctctgaggagcttcaagccaacaaggccacactggtgtgtctcataagtgacttctacccgggagccgtgacagtggcctggaaggcagatagcagccccgtcaaggcgggagtggagaccaccacaccctccaaacaaagcaacaacaagtacgcggccagcagctatctgagcctgacgcctgagcagtggaagtcccacagaagctacagctgccaggtcacgcatgaagggagcaccgtggagaagacagtggcccctacagaatgttcggcgcgccagtcgactccattcgtttgtgaatatcaaggccaatcgtctgacctgcctcaacctcctgtcaatgctggcggcgg

SEQ ID NO: 1812 - DNA, 1442 bp, Homo sapiens
ggagccccctcagtgtgcaggcttagagggactaggctgggtgtggagctgcagcgtatccacaggccccaggatgcaggccctggtgctactcctctgcattggagccctcctcgggcacagcagctgccagaaccctgccagccccccggaggagggctccccagaccccgacagcacaggggcgctggtggaggaggaggatcctttcttcaaagtccccgtgaacaagctggcagcggctgtctccaacttcggctatgacctgtaccgggtgcgatccagcatgagccccacgaccaacgtgctcctgtctcctctcagtgtggccacggccctctcggccctctcgctgggagcggagcagcgaacagaatccatcattcaccgggctctctactatgacttgatcagcagcccagacatccatggtacctataaggagctccttgacacggtcactgccccccagaagaacctcaagagtgcctcccggatcgtctttgagaagaagctrcgcataaaatccagctttgtggcacctctggaaaagtcatatgggaccaggcccagagtcctgacgggcaaccctcgcttggacctgcaagagatcaacaactgggtgcaggcgcagatgaaagggaagctcgccaggtccacaaaggaaattcccgatgagatcagcattctccttctcggtgtggcgcacttcaaggggcagtgggtaacaaagtttgactccagaaagacttccctcgaggatttctacttggatgaagagaggaccgtgagggtccccatgatgtcggaccctaaggctgttttacgctatggcttggattcagatctcagctgcaagattgcccagctgcccttgaccggaagcatgagtatcatcttcttcctgcccctgaaagtgacccagaatttgaccttgatagaggagagcctcacctccgagttcattcatgacatagaccgagaactgaagaccgtgcaggcggtcctcactgtccccaagctgaagctgagttacgaaggcgaagtcaccaagtccctgcaggagatgaagctgcaatccttgtttgattcaccagactttagcaagatcacaggcaaacccatcaagctgactcaggtggaacaccgggctggctttgagtggaacgaggatggggcgggaaccacccccagcccagggctgcagcctgcccacctcaccttcccgctggactatcaccttaaccagcctttcatcttcgtactgagggacacagacacaggggcccttctcttcattggcaagattctggaccccaggggcccctaatatcccagtttaatattccaataccctagaagaaaacccgagggacagcagattccacaggacacgaaggctgcccctgtaaggtttcaatgcatacaataaaagagcttta

SEQ ID NO: 1813 - DNA, 1641 bp, Homo sapiens
aaggtgtgcaaatgtgtgcgccttaggcgtaatggatggtggtgcagcagtgggttaaagttaacacgagacagtgatgcaatcacagaatccaaattgagtgcaggtcgctttaagaaaggagtagctgtaatctgaagcctgctggacgctggattagaaggcagcaaaaaaagctctgtgctggctggagccccctcagtgtgcaggcttagagggactaggctgggtgtggagctgcagcgtatccacagcaggccccaggatgcaggccctggtgctactcctctgcattggagccctcctcgggcacagcagctgccagaaccctgccagccccccggaggagggctccccagaccccgacagcacaggggcgctggtggaggaggaggatcctttcttcaaagtccccgtgaacaagctggcagcggctgtctccaacttcggctatgacctgtaccgggtgcgatccagcatgagccccacgaccaacgtgctcctgtctcctctcagtgtggccacggccctctcggccctctcgctgggagcggagcagcgaacagaatccatcattcaccgggctctctactatgacttgatcagcagcccagacatccatggtacctataaggagctccttgacacggtcactgccccccagaagaacctcaagagtgcctcccggatcgtctttgagaagaagctgcgcataaaatccagctttgtggcacctctggaaaagtcatatgggaccaggcccagagtcctgacgggcaaccctcgcttggacctgcaagagatcaacaactgggtgcaggcgcagatgaaagggaagctcgccaggtccacaaaggaaattcccgatgagatcagcattctccttctcggtgtggcgcacttcaaggggcagtgggtaacaaagtttgactccagaaagacttccctcgaggatttctacttggatgaagagaggaccgtgagggtccccatgatgtcggaccctaaggctgttttacgctatggcttggattcagatctcagctgcaagattgcccagctgcccttgaccggaagcatgagtatcatcttcttcctgcccctgaaagtgacccagaatttgaccttgatagaggagagcctcacctccgagttcattcatgacatagaccgagaactgaagaccgtgcaggcggtcctcactgtccccaagctgaagctgagttatgaaggcgaagtcaccaagtccctgcaggagatgaagctgcaatccttgtttgattcaccagactttagcaagatcacaggcaaacccatcaagctgactcaggtggaacaccgggctggctttgagtggaacgaggatggggcgggaaccacccccagcccagggctgcagcctgcccacctcaccttcccgctggactatcaccttaaccagcctttcatcttcgtactgagggacacagacacaggggcccttctcttcattggcaagattctggaccccaggggcccctaatatcccagtttaatattccaataccctagaagaaaacccgagggacagcagattccacaggacacgaaggctgcccctgtaaggtttcaatgcatacaataaaagagctttatccctaa

SEQ ID NO: 1814 - DNA, 2708 bp, Homo sapiens
ctccagcctccgccggcggagcccactatgccagacagtttcgacactttgcaaagacaaagagccctagaccggagggaggaggaggaggaagaagagcggagagagaaggaagaggcgatgtgagctgggaagggggcaagtgtccgggacacccacacccctgtattctcctccgaaccccttcatgcccaaatcccggaaactccagcgtgtctccagccgtgttggtaccattttcagatttcatcttcctaaactggaaatgtcaatgagaggaaattaacacccccaagagctgcagtgagcaaatgcattgagcttgggtcaggacaattccatttggggaccagagatggacggtcactcagcctatggagatgaagaaactgaggttcagagaggttaagagactccactgaggtcacacagccgatgacagacaaccttctgtgccttcatcaagctggttgtgtacccaccatgtccctggcgacaggatgggaaagaaaaagccctaattaaggatcgtcagaaaccacagttggaggaggacggcagagacagtttccctccccgctataccaacacccttccttcgaggtcctcgctcctgagggaccctggactgtcacagagattaatgaccccttatcttctttggatgtgaaaggaaatcactggttaaagcttgatcgagagacattatcagctctttaaggattgcagaagaataggctactttattttctgaaaaggagggagttcctgctacccatcgtgggaggccaccatcaggactgcgaagatggtgaccctgcggaagaggaccctgaaagtgctcaccttcctcgtgctcttcatcttcctcacctccttcttcctgaactactcccacaccatggtggccaccacctggttccccaagcagatggtcctggagctctccgagaacctgaagagactgatcaagcacaggccttgcacctgcacccactgcatcgggcagcgcaagctctcggcctggttcgatgagaggttcaaccagaccatgcagccgctgctgaccgcccagaacgcgctcttggaggacgacacctaccgatggtggctgaggctccagcgggagaagaagcccaataacttgaatgacaccatcaaggagctgttcagagtggtgcctgggaatgtggaccctatgctggagaagaggtcggtgggctgccggcgctgcgccgttgtgggcaactcgggcaacctgagggagtcttcttatgggcctgagatagacagtcacgactttgtcctcaggatgaacaaggcgcccacggcagggtttgaagctgatgttgggaccaagaccacccaccatctggtgtaccctgagagcttccgggagctgggagataatgtcagcatgatcctggtgcccttcaagaccatcgacttggagtgggtggtgagcgccatcaccacgggcaccatttcccacacctacatcccggttcctgcaaagatcagagtgaaacaggataagatcctgatctaccacccagccttcatcaagtatgtctttgacaactggctgcaagggcacgggcgatacccatctaccggcatcctctcggtcatcttctcaatgcatgtctgcgatgaggtggacttgtacggcttcggggcagacagcaaagggaactggcaccactactgggagaacaacccatccgcgggggcttttcgcaagacgggggtgcacgatgcagactttgagtctaacgtgacggccaccttggcctccatcaataaaatccggatcttcaaggggagatgacgcagtgaagggctgaggatggacgcactgtcacacctctgcatttccagccccagcatcttgctggagccgttccatcccggagcttggaggggcagcctcaggtgtgtgcctgggcaccgctcacagcctcttgcacccagccgttggcagcatctactcagcaaggtcactaagctctgccagcgtggcagagcatgtcttggaacctgtcttgagtggggacaacgtccccccactgctgccctagagctggggagacgctgggaaaggttcaacctccacacactaaaatcattttggctcctggggcaagcttggggaatgaatgtggaagatgcctatattctgagagacaggacagtttcccaggaagatgggcagagacttgagtggcgattacctccagcacagagacgtgccaggcggtgttggcgctcggggcgagatgctgcccttctttgcacgaagcctggcctcttgcttggcgtgataaccctgtcatcttcccaaagctcatttatgagccaccagaggctcctaccccaaagattttcacagaaacttgaggccaggtgccgtggctcacacctgtaatctgaacactttgggaggccgaggcgggaggatcacttgagcccaggagttcaagaccagcctgggcaacatagtgagactcctgtctctacaaaaataaaagatttaaaaaaattagccaggcacggtggcacacacttgtagccccagctactagggaggctgaggagggaggatctcttgtgcctaggagttcgaggctgcagtgggctgtgatcacaccactgcactccagcctgggcaacagagtgagaccctgtctctgaaaaaaaaaaaaaaa

SEQ ID NO: 1815 - DNA, 3591 bp, Homo sapiens
cccgggggaaggtgttcccgagccctctcccaccctcatcccgcctcctcgcttcctcggctccagcctccgccggcggagcccactatgccagacagtttcgacactttgcaaagacaaagagccctagaccggagggaggaggaggaggaagaagagcggagagagaaggaagaggcgatgtgagctgggaagggggcaagtgtccgggacacccacacccctgtattctcctccgaaccccttcatgcccaaatcccggaaactccagcgtgtctccagccgtggtgagtgcgcgcgcggaggcgaaccctgctcggggtgcgcgggggctgcgtccgcctgagttggggctcgggcagtttcctgtggattctcggagtggaaggttgattgtctggacccgggaactgaaggggtggggaggggactaggagggtgtgacagtggagctgggactgaagaccccgggattctagtggaagacattcgaagggagaccccttccttggcagcggcgaccacccagggctttgggagaggaagaaggtcggggtggaggttcgggcttaggggtcttcggccgacactggaggagctgcctggagctctgtggggaacctacgccaagtcccgggcagcggttcccgaaagcagccccagtgacattgcacccggcgccgggctgggatctcctccgctggggccgcccgtgggaggagacctcgctgggtggccgggctcaggcgctctcgagcggatttggggtcacaggctgggacaccgcggaggccgccagtgttctggacgagcggccgtgggacagtatccggatcgagtcccccaatccgctgcaagcaggcgcagatccgggaggtggctatcggccccggggacgccgtcagagcgcgctgctccggatctgggggtgaagttgacacccgggacaagagagctgaacgcggcgtggcggacattggtaccattttcagatttcatcttcctaaactggaaatgtcaatgagaggaaattaacacccccaagagctgcagtgagcaaatgcattgagcttgggtcaggacaattccatttggggaccagagatggacggtcactcagcctatggagatgacagacaaccttctgtgccttcatcaagctggttgtgtacccaccatgtccctggcgacaggatgggaaagaaaaagccctaattaaggatcgtcagaaaccacagttggaggaggacggcagagacagtttccctccccgctataccaacacccttccttcgaggtcctcgctcctgagggaccctggactgtcacagagattaatgaccccttatcttctttggatgtgaaaggaaatcactggttaaagcttgatcgagagacattatcagctctttaaggattgcaggagaataggctactttattttctgaaaaggtaaatatatgcaagcaaagccaacatgccacgaatggcgttggtctaccacacagccgtgtctgggacacagttgggggtcatcccccagcaggagtgaagtcgagcttagcggcccttgtgtcctcccttggaattcctgccatcccttttgattgagcctccacctctgggatttttcttccatttttctcctctcttaggagggagttcctgctacccatcgtgggaggccaccatcaggactgcgaagatggtgaccctgcggaagaggaccctgaaagtgctcaccttcctcgtgctcttcatcttcctcacctccttcttcctgaactactcccacaccatggtggccaccacctggttccccaagcagatggtcctggagctctccgagaacctgaagagactgatcaagcacaggccttgcacctgcacccactgcatcgggcagcgcaagctctcggcctggttcgatgagaggttcaaccagaccatgcagccgctgctgactgcccagaacgcgctcttggaggacgacacctaccgatggtggctgaggctccagcgggagaagaagcccaataacttgaatgacaccatcaaggagctgttcagagtggtgcctgggaatgtggaccctatgctggagaagaggtcggtgggctgccggcgctgcgccgttgtgggcaactcgggcaacctgagggagtcttcttatgggcctgagatagacagtcacgactttgtcctcaggatgaacaaggcgcccacggcagggtttgaagctgatgttgggaccaagaccacccaccatctggtgtaccctgagagcttccgggagctgggagataatgtcagcatgatcctggtgcccttcaagaccatcgacttggagtgggtggtgagcgccatcaccacgggcaccatttcccacacctacatcccggttcctgcaaagatcagagtgaaacaggataagatcctgatctaccacccagccttcatcaagtatgtctttgacaactggctgcaagggcacgggcgatacccatctaccggcatcctctcggtcatcttctcaatgcatgtctgcgatgaggtggacttgtacggcttcggggcagacagcaaagggaactggcaccactactgggagaacaacccatccgcgggggcttttcgcaagacgggggtgcacgatgcagactttgagtctaacgtgacggccaccttggcctccatcaataaaatccggatcttcaaggggagatgacgcagtgaagggctgaggatggacgcactgtcacacctctgcatttccagccccagcatcttgctggagccgttccatcccggagcttggaggggcagcctcaggtgtgtgcctgggcaccgctcacagcctcttgcacccagccgttggcagcatctactcagcaaggtcactaagctctgccagcgtggcagagcatgtcttggaacctgtcttgagtggggacaacgtccccccactgctgccctagagctggggagacgctgggaaaggttcaacctccacacactaaaatcattttggctcctggggcaagcttggggaatgaatgtggaagatgcctatattctgagagacaggacagtttcccaggaagatgggcagagacttgagtggcgattacctccagcacagagacgtgccaggcggtgttggcgctcggggcgagatgctgcccttctttgcacgaagcctggcctcttgcttggcgtgataaccctgtcatcttcccaaagctcatttatgagccaccagaggctcctaccccaaagattttcacagaaacttgaggccaggtgccgtggctcacacctgtaatctgaacactttgggaggccgaggcgggaggatcacttgagcccaggagttcaagaccagcctgggcaacatagtgagactcctgtctctacaaaaataaaagatttaaaaaaattagccaggcacggtggcacacacttgtagccccagctactagggaggctgaggagggaggatctcttgtgcctaggagttcgaggctgcagtgggctgtgatcacaccactgcactccagcctgggcaacagagtgagaccctgtctctga

SEQ ID NO: 1816 - DNA, 3591 bp, Homo sapiens; identical to SEQ ID NO: 1815

SEQ ID NO: 1817 - DNA, 3591 bp, Homo sapiens; identical to SEQ ID NO: 1815

SEQ ID NO: 1818 - DNA, 3655 bp, Homo sapiens
tatgacccctttaaggcgcggccagagtcctcccgcagaaaaacgacttaaaggagacgcgtggcgcgatggcggcggccccacgcgcgggccggcggcgcgggcagccgctcctggcgctgctgcttctgctgctggcgccactgccgccgggggccccgccgggcgccgacgcctacttccccgaggagcgctggagcccggagtcgcccctgcaggcgccgcgcgtgctcatcgcgctgttggcgcgaaacgcggcccacgcgttgcccaccacgctgggcgcactcgagcggctgcggcacccgcgggagcgcacggcgctatgggtggctacggaccacaacatggataacacgtcaactgtgctgcgggagtggctggtggccgtgaagagtttgtaccattccgtggagtggcggccagcagaggagcccaggtcctacccggacgaggaaggcccgaaacactggtctgactcacgctacgagcatgtcatgaagttgcgccaggcagccctgaaatcagctcgagacatgtgggctgattacatcctgtttgtagatgcggacaacctgatcctcaaccctgacacactgagcctgctcatcgctgagaacaagacggtggtcgcccccatgctggattcccgggctgcgtactccaacttctggtgtggaatgacttcccagggctactacaagcgcacacctgcctacatccctatccgcaagcgagaccgccggggctgctttgcagttcccatggtgcactcgaccttcctgatcgacctgcggaaggcggcgtccaggaacctggccttctacccacctcaccctgactacacctggtcctttgacgacatcatcgtctttgccttctcctgcaagcaggcagaggttcagatgtatgtgtgcaacaaggaggagtacggattcttgccagtgccattgcgcgcccacagcaccctccaggatgaggccgagagcttcatgcatgtgcagctggaggtcatggtgaagcacccgcccgcagagccctcccgcttcatctcggctcccaccaagacaccggacaagatgggcttcgacgaggtcttcatgatcaacctgaggcggcggcaggaccggcgggagcgcatgctgcgggcgctgcaggcacaggagatcgagtgccggctggtggaggccgtggacggcaaagccatgaacaccagccaggtggaggcgctggggatccagatgctgcctggctaccgggacccctaccacggccggcccctcaccaagggtgagctgggctgcttcctgagccactacaacatctggaaggaggtggtggaccgggggctgcagaaatcgcttgtgtttgaggatgacctgcgttttgagatcttcttcaagagacgtctgatgaacctcatgcgggatgtggagcgggagggcctggactgggacctcatctatgtgggccggaagcggatgcaggtggagcaccccgagaaggctgtgcctcgcgtgaggaacctggtggaggccgactattcctactggaccctggcctacgtgatctccctgcaaggcgcccgcaaactgctggctgctgagccgctctccaagatgctgcctgtggacgagttcctgcccgtcatgttcgacaaacacccagtgtccgagtacaaggcccacttctccctccgcaacctgcatgccttctctgtggagccgctgctcatctaccccacacactacacaggagacgatggctatgtgagtgacaccgagacctcagtcgtatggaacaatgagcacgtcaagaccgactgggaccgcgccaagtcccagaagatgcgggagcagcaggcactgagccgtgaggccaagaactcggacgtgctccagtccccactggacagtgctgcccgggatgaactctgaggggtagcagccagaaagccaaagcagccatcggtggcccaggctccacgtgcttactgaggacatcagggccacctctggaccccttggcaggccacagagggctctcgtgtggggtggtgtccagccagctcttgctaagcaatcacgtgcacacaggcagcattaatggagtgcctactgcatgccagcaacagggcttggccctggggaattgggaggaaccaagccctcttcatctgttcatgtgcccagcatttattaagcacctgctgtatgcaaggttcccatgttacggcagtgaatgaggcataattgttccctccatcagcgattgattcagtcatcaagcagttactgatcagattaagaatcaggcactagtgatacacattcatttttaaaattcattcaaggatttattgagtgcctactgtgtgttgggtgccattccaggctctgggatttttttttttttttttttaagagtagagtctgtctctgtcacccaggctggagtgcagtggtgtgacggctcactgcagcctgcgcctcccagcgtccagcaattcttgtttctcggcctcccaagtagctgggactataggtgcgtgccatcacatctggctagtttttgtatttttagtagagacggggtttcaccatgttggccagactggtctcgaactcctgacctcaagtgatctgcccgccttggccacccaaagtgctagggttacaggcatgagccactgtgcccagcccaggctctgggaatattgagataaataagatgcttctatccatttattcaagcacatattggtcacctactgtgtgcctggcactcatgtcacaaagataagttcctgattcggtacacttactgagcacctgctgtgtgcagggagctgagctatgggatgggaatgggagtaaacaaggtacttttcacttttttctttttttcctcactgctagacggtgtgggaacttctcactcattggcttctttcccacacacctgaagagcactgactgtgtgccgggcactagtgatacaaaagagtgtgacagttgttcagtctgcattttcgatcatgggctacatgccgagtgctggggcacagagatgaacaagatcggttccttcacttcttcatgccacaagtgtttattgagcacctgtgtgccaggcctcacagactcccagttgggttgaagaatggttgactgagtttgattcttcctgtaccctcggtcgtctgagctgtgtgcagacaacatccccccaccacccaagagggagggtagctcttccgccaccaggggcaagcacaggtcctggtggccccacgccacatgttagcccccctggagggggcgccagttggagacgggggctgggtgtccctggcccactcccagtcccctgtgctttacctccttgcccttgtgtctcaggtgtggtccctgcctgcttgatgaagttgctctgttcaagcctttggtgggatcatgtgtttgggggcttttaggggacccagctgcactggggcactgcccgtggcctgggtaggacatttcccagcaagggctggaggagttgccgtgccttcagcctgaatcgaatgtcagaaccagccagcggtgcttcaccctcttggggataacttgcttagttttttaataaatgttcctggttggttttcacagca

SEQ ID NO: 1819 - DNA, 3724 bp, Homo sapiens
tatgacccctttaaggcgcggccagagtcctcccgcagaaaaacgacttaaaggagacgcgtggcgcgatggcggcggccccacgcgcgggccggcggcgcgggcagccgctcctggcgctgctgcttctgctgctggcgccactgccgccgggggccccgccgggcgccgacgcctacttccccgaggagcgctggagcccggagtcgcccctgcaggcgccgcgcgtgctcatcgcgctgttggcgcgaaacgcggcccacgcgttgcccaccacgctgggcgcactcgagcggctgcggcacccgcgggagcgcacggcgctatgggtggctacggaccacaacatggataacacgtcaactgtgctgcgggagtggctggtggccgtgaagagtttgtaccattccgtggagtggcggccagcagaggagcccaggtcctacccggacgaggaaggcccgaaacactggtctgactcacgctacgagcatgtcatgaagttgcgccaggcagccctgaaatcagctcgagacatgtgggctgattacatcctgtttgtagatgcggacaacctgatcctcaaccctgacacactgagcctgctcatcgctgagaacaagacggtggtcgcccccatgctggattcccgggctgcgtactccaacttctggtgtggaatgacttcccagggctactacaagcgcacacctgcctacatccctatccgcaagcgagaccgccggggctgctttgcagttcccatggtgcactcgaccttcctgatcgacctgcggaaggcggcgtccaggaacctggccttctacccacctcaccctgactacacctggtcctttgacgacatcatcgtctttgccttctcctgcaagcaggcaggtacgtacatgagggccactgggcctcgcctgtttttacatttgtctgttgcttccctgcccactgcagaggttcagatgtatgtgtgcaacaaggaggagtacggattcttgccagtgccattgcgcgcccacagcaccctccaggatgaggccgagagcttcatgcatgtgcagctggaggtcatggtgaagcacccgcccgcagagccctcccgcttcatctcggctcccaccaagacaccggacaagatgggcttcgacgaggtcttcatgatcaacctgaggcggcggcaggaccggcgggagcgcatgctgcgggcgctgcaggcacaggagatcgagtgccggctggtggaggccgtggacggcaaagccatgaacaccagccaggtggaggcgctggggatccagatgctgcctggctaccgggacccctaccacggccggcccctcaccaagggtgagctgggctgcttcctgagccactacaacatctggaaggaggtggtggaccgggggctgcagaaatcgcttgtgtttgaggatgacctgcgttttgagatcttcttcaagagacgtctgatgaacctcatgcgggatgtggagcgggagggcctggactgggacctcatctatgtgggccggaagcggatgcaggtggagcaccccgagaaggctgtgcctcgcgtgaggaacctggtggaggccgactattcctactggaccctggcctacgtgatctccctgcaaggcgcccgcaaactgctggctgctgagccgctctccaagatgctgcctgtggacgagttcctgcccgtcatgttcgacaaacacccagtgtccgagtacaaggcccacttctccctccgcaacctgcatgccttctctgtggagccgctgctcatctaccccacacactacacaggagacgatggctatgtgagtgacaccgagacctcagtcgtatggaacaatgagcacgtcaagaccgactgggaccgcgccaagtcccagaagatgcgggagcagcaggcactgagccgtgaggccaagaactcggacgtgctccagtccccactggacagtgctgcccgggatgaactctgaggggtagcagccagaaagccaaagcagccatcggtggcccaggctccacgtgcttactgaggacatcagggccacctctggaccccttggcaggccacagagggctctcgtgtggggtggtgtccagccagctcttgctaagcaatcacgtgcacacaggcagcattaatggagtgcctactgcatgccagcaacagggcttggccctggggaattgggaggaaccaagccctcttcatctgttcatgtgcccagcatttattaagcacctgctgtatgcaaggttcccatgttacggcagtgaatgaggcataattgttccctccatcagcgattgattcagtcatcaagcagttactgatcagattaagaatcaggcactagtgatacacattcatttttaaaattcattcaaggatttattgagtgcctactgtgtgttgggtgccattccaggctctgggatttttttttttttttttttaagagtagagtctgtctctgtcacccaggctggagtgcagtggtgtgacggctcactgcagcctgcgcctcccagcgtccagcaattcttgtttctcggcctcccaagtagctgggactataggtgcgtgccatcacatctggctagtttttgtatttttagtagagacggggtttcaccatgttggccagactggtctcgaactcctgacctcaagtgatctgcccgccttggccacccaaagtgctagggttacaggcatgagccactgtgcccagcccaggctctgggaatattgagataaataagatgcttctatccatttattcaagcacatattggtcacctactgtgtgcctggcactcatgtcacaaagataagttcctgattcggtacacttactgagcacctgctgtgtgcagggagctgagctatgggatgggaatgggagtaaacaaggtacttttcacttttttctttttttcctcactgctagacggtgtgggaacttctcactcattggcttctttcccacacacctgaagagcactgactgtgtgccgggcactagtgatacaaaagagtgtgacagttgttcagtctgcattttcgatcatgggctacatgccgagtgctggggcacagagatgaacaagatcggttccttcacttcttcatgccacaagtgtttattgagcacctgtgtgccaggcctcacagactcccagttgggttgaagaatggttgactgagtttgattcttcctgtaccctcggtcgtctgagctgtgtgcagacaacatccccccaccacccaagagggagggtagctcttccgccaccaggggcaagcacaggtcctggtggccccacgccacatgttagcccccctggagggggcgccagttggagacgggggctgggtgtccctggcccactcccagtcccctgtgctttacctccttgcccttgtgtctcaggtgtggtccctgcctgcttgatgaagttgctctgttcaagcctttggtgggatcatgtgtttgggggcttttaggggacccagctgcactggggcactgcccgtggcctgggtaggacatttcccagcaagggctggaggagttgccgtgccttcagcctgaatcgaatgtcagaaccagccagcggtgcttcaccctcttggggataacttgcttagttttttaataaatgttcctggttggttttcacagca

SEQ ID NO: 1820 - DNA, 1763 bp, Homo sapiens
tatgacccctttaaggcgcggccagagtcctcccgcagaaaaacgacttaaaggagacgcgtggcgcgatggcggcggccccacgcgcgggccggcggcgcgggcagccgctcctggcgctgctgcttctgctgctggcgccactgccgccgggggccccgccgggcgccgacgcctacttccccgaggagcgctggagcccggagtcgcccctgcaggcgccgcgcgtgctcatcgcgctgttggcgcgaaacgcggcccacgcgttgcccaccacgctgggcgcactcgagcggctgcggcacccgcgggagcgcacggcgctatgggtggctacggaccacaacatggataacacgtcaactgtgctgcgggagtggctggtggccgtgaagagtttgtaccattccgtggagtggcggccagcagaggagcccaggtcctacccggacgaggaaggcccgaaacactggtctgactcacgctacgagcatgtcatgaagttgcgccaggcagccctgaaatcagctcgagacatgtgggctgattacatcctgtttgtagatgcggacaacctgatcctcaaccctgacacactgagcctgctcatcgctgagaacaagacggtggtcgcccccatgctggattcccgggctgcgtactccaacttctggtgtggaatgacttcccagggctactacaagcgcacacctgcctacatccctatccgcaagcgagaccgccggggctgctttgcagttcccatggtgcactcgaccttcctgatcgacctgcggaaggcggcgtccaggaacctggccttctacccacctcaccctgactacacctggtcctttgacgacatcatcgtctttgccttctcctgcaagcaggcagaggttcagatgtatgtgtgcaacaaggaggagtacggattcttgccagtgccattgcgcgcccacagcaccctccaggatgaggccgagagcttcatgcatgtgcagctggaggtcatggtgaagcacccgcccgcagagccctcccgcttcatctcggctcccaccaagacaccggacaagatgggcttcgacgaggtcttcatgatcaacctgaggcggcggcaggaccggcgggagcgcatgctgcgggcgctgcaggcacaggagatcgagtgccggctggtggaggccgtggacggcaaagccatgaacaccagccaggtggaggcgctggggatccagatgctgcctggctaccgggacccctaccacggccggcccctcaccaagggtgagctgggctgcttcctgagccactacaacatctggaaggaggtggtggaccgggggctgcagaaatcgcttgtgtttgaggatgacctgcgttttgagatcttcttcaagagacgtctgatgaacctcatgcgggatgtggagcgggagggcctggactgggacctcatctatgtgggccggaagcggatgcaggtggagcaccccgagaaggctgtgcctcgcgtgaggaacctggtggaggccgactattcctactggaccctggcctacgtgatctccctgcaaggcgcccgcaaactgctggctgctgagccgctctccaagatgctgcctgtggacgagttcctgcccgtcatgttcgacaaacacccagttacaaggcccacttctccctccgcaacctgcatgccttctctgtggagccgctgctcatctaccccacacactacacaggagacgatggctatg

SEQ ID NO: 1821 - DNA, 2138 bp, Homo sapiens
ccctttttccttccgggccaatcgttagtcagagtgggcggagccgcccgcgggcacctgcgcgttaagagtgggccgcgtcgctgaggggtagcgatgcgggctccggggatgaggtcgcggccggcgggtcccgcgctgttgctgctgctgctcttcctcggagcggccgagtcggtgcgtcgggcccagcctccgcgccgctacaccccagactggccgagcctggattctcggccgctgccggcctggttcgacgaagccaagttcggggtgttcatccactggggcgtgttctcggtgcccgcctggggcagcgagtggttctggtggcactggcagggcgaggggcggccgcagtaccagcgcttcatgcgcgacaactacccgcccggcttcagctacgccgacttcggaccgcagttcactgcgcgcttcttccacccggaggagtgggccgacctcttccaggccgcgggcgccaagtatgtagttttgacgacaaagcatcacgaaggcttcacaaactggccgagtcctgtgtcttggaactggaactccaaagacgtggggcctcatcgggatttggttggtgaattgggaacagctctccggaagaggaacatccgctatggactataccactcactcttagagtggttccatccactctatctacttgataagaaaaatggcttcaaaacacagcattttgtcagtgcaaaaacaatgccagagctgtacgaccttgttaacagctataaacctgatctgatctggtctgatggggagtgggaatgtcctgatacttactggaactccacaaattttctttcatggctctacaatgacagccctgtcaaggatgaggtggtagtaaatgaccgatggggtcagaactgttcctgtcaccatggaggatactataactgtgaagataaattcaagccacagagcttgccagatcacaagtgggagatgtgcaccagcattgacaagttttcctggggctatcgtcgtgacatggcattgtctgatgttacagaagaatctgaaatcatttcggaactggttcagacagtaagtttgggaggcaactatcttctgaacattggaccaactaaagatggactgattgttcccatcttccaagaaaggcttcttgctgttgggaaatggctgagcatcaatggggaggctatctatgcctccaaaccatggcgggtgcaatgggaaaagaacacaacatctgtatggtatacctcaaagggatcggctgtttatgccatttttctgcactggccagaaaatggagtcttaaaccttgaatcccccataactacctcaactacaaagataacaatgctgggaattcaaggagatctgaagtggtccacagatccagataaaggtctcttcatctctctaccccagttgccaccctctgctgtccccgcagagtttgcttggactataaagctgacaggagtgaagtaatcatttgagtgcaagaagaaagaggcgctgctcactgttttcctgcttcagtttttctcttatagtaccatcactataatcaacgaacttctcttctccacccagagatggcttttccaacacattttaattaaaggaactgagtacattaccctgatgtctaaatggaccaaagatctgagatccattgtgattatatctgtatcaggtcagcagaagaaggaactgagcagttgaactctgagttcatcaattgtaatatttggaaattatctacaatggaatcttccctctgttctctgataacctacttgcttactcaatgcctttaagccaagtcaccctgttgcctatgggaggaggtggaaggatttggcaagctcaaccacatgctatttagttagcatcagttgtcaccaacagtctttctgcaaagggcaggagagctttgggggaaaggaaaaggcttaccaggctgctatggtcaactcttcagaaattttcagagcaatctaaaagcgccaaaattcgctatgtttacagtgatactattaagaaaatgaatgtgattctgctctgtctttttaagtatgatcaaataaaaaatttgtacatcacaatcatttctaccaaaaaaacat

SEQ ID NO: 1822 - DNA, 3678 bp, Homo sapiens
ggtctcgctctgtcacacaggctggagtgcagtggtgtgatcttggctcatcgtaacctccacctcccgggttcaagtgattctcatgcctcagcctcccgagtagctgggattacaggtggtgacttccaagagtgactccgtcggaggaaaatgactccccagtcgctgctgcagacgacactgttcctgctgagtctgctcttcctggtccaaggtgcccacggcaggggccacagggaagactttcgcttctgcagccagcggaaccagacacacaggagcagcctccactacaaacccacaccagacctgcgcatctccatcgagaactccgaagaggccctcacagtccatgcccctttccctgcagcccaccctgcttcccgatccttccctgaccccaggggcctctaccacttctgcctctactggaaccgacatgctgggagattacatcttctctatggcaagcgtgacttcttgctgagtgacaaagcctctagcctcctctgcttccagcaccaggaggagagcctggctcagggccccccgctgttagccacttctgtcacctcctggtggagccctcagaacatcagcctgcccagtgccgccagcttcaccttctccttccacagtcctccccacacggccgctcacaatgcctcggtggacatgtgcgagctcaaaagggacctccagctgctcagccagttcctgaagcatccccagaaggcctcaaggaggccctcggctgcccccgccagccagcagttgcagagcctggagtcgaaactgacctctgtgagattcatgggggacatggtgtccttcgaggaggaccggatcaacgccacggtgtggaagctccagcccacagccggcctccaggacctgcacatccactcccggcaggaggaggagcagagcgagatcatggagtactcggtgctgctgcctcgaacactcttccagaggacgaaaggccggagcggggaggctgagaagagactcctcctggtggacttcagcagccaagccctgttccaggacaagaattccagccaagtcctgggtgagaaggtcttggggattgtggtacagaacaccaaagtagccaacctcacggagcccgtggtgctcactttccagcaccagctacagccgaagaatgtgactctgcaatgtgtgttctgggttgaagaccccacattgagcagcccggggcattggagcagtgctgggtgtgagaccgtcaggagagaaacccaaacatcctgcttctgcaaccacttgacctactttgcagtgctgatggtctcctcggtggaggtggacgccgtgcacaagcactacctgagcctcctctcctacgtgggctgtgtcgtctctgccctggcctgccttgtcaccattgccgcctacctctgctccagggtgcccctgccgtgcaggaggaaacctcgggactacaccatcaaggtgcacatgaacctgctgctggccgtcttcctgctggacacgagcttcctgctcagcgagccggtggccctgacaggctctgaggctggctgccgagccagtgccatcttcctgcacttctccctgctcacctgcctttcctggatgggcctcgaggggtacaacctctaccgactcgtggtggaggtctttggcacctatgtccctggctacctactcaagctgagcgccatgggctggggcttccccatctttctggtgacgctggtggccctggtggatgtggacaactatggccccatcatcttggctgtgcataggactccagagggcgtcatctacccttccatgtgctggatccgggactccctggtcagctacatcaccaacctgggcctcttcagcctggtgtttctgttcaacatggccatgctagccaccatggtggtgcagatcctgcggctgcgcccccacacccaaaagtggtcacatgtgctgacactgctgggcctcagcctggtccttggcctgccctgggccttgatcttcttctcctttgcttctggcaccttccagcttgtcgtcctctaccttttcagcatcatcacctccttccaaggcttcctcatcttcatctggtactggtccatgcggctgcaggcccggggtggcccctcccctctgaagagcaactcagacagcgccaggctccccatcagctcgggcagcacctcgtccagccgcatctaggcctccagcccacctgcccatgtgatgaagcagagatgcggcctcgtcgcacactgcctgtggcccccgagccaggcccagccccaggccagtcagccgcagactttggaaagcccaacgaccatggagagatgggccgttgccatggtggacggactcccgggctgggcttttgaattggccttggggactactcggctctcactcagctcccacgggactcagaagtgcgccgccatgctgcctagggtactgtccccacatctgtcccaacccagctggaggcctggtctctccttacaacccctgggcccagccctcattgctgggggccaggccttggatcttgagggtctggcacatccttaatcctgtgcccctgcctgggacagaaatgtggctccagttgctctgtctctcgtggtcaccctgagggcactctgcatcctctgtcattttaacctcaggtggcacccagggcgaatggggcccagggcagaccttcagggccagagccctggcggaggagaggccctttgccaggagcacagcagcagctcgcctacctctgagcccaggccccctccctccctcagccccccagtcctccctccatcttccctggggttctcctcctctcccagggcctccttgctccttcgttcacagctgggggtccccgattccaatgctgttttttggggagtggtttccaggagctgcctggtgtctgctgtaaatgtttgtctactgcacaagcctcggcctgcccctgagccaggctcggtaccgatgcgtgggctgggctaggtccctctgtccatctgggcctttgtatgagctgcattgcccttgctcaccctgaccaagcacacgcctcagaggggccctcagcctctcctgaagccctcttgtggcaagaactgtggaccatgccagtcccgtctggtttccatcccaccactccaaggactgagactgacctcctctggtgacactggcctagagcctgacactctcctaagaggttctctccaagcccccaaatagctccaggcgccctcggccgcccatcatggttaattctgtccaacaaacacacacgggtagattgctggcctgttgtaggtggtagggacacagatgaccgacctggtcactcctcctgccaacattcagtctggtatgtgaggcgtgcgtgaagcaagaactcctggagctacagggacagggagccatcattcctgcctgggaatcctggaagacttcctgcaggagtcagcgttcaatcttgaccttgaagatgggaaggatgttctttttacgtaccaattcttttgtcttttgatattaaaaagaagtacatgttcattgtagagaatttggaaactgtagaagagaatcaagaagaaaaataaaaatcagctgttgtaatcgcctagc

SEQ ID NO: 1823 - DNA, 3678 bp, Homo sapiens; identical to SEQ ID NO: 1822

SEQ ID NO: 1824 - DNA, 3678 bp, Homo sapiens; identical to SEQ ID NO: 1822

SEQ ID NO: 1825 - DNA, 3755 bp, Homo sapiens
aacccggtccctccctctccgcactagctgtctgccctgccctgccgtaggagatgggctgggagcctcccacgctctccagctcactcggcaggcagcggggaccagggctggcaggttaagcctctgggggtggatcctgaaaggtggtccagccgcctggccctgcgtgggaccctccacctggcagcaggtggtgacttccaagagtgactccgtcggaggaaaatgactccccagtcgctgctgcagacgacactgttcctgctgagtctgctcttcctggtccaaggtgcccacggcaggggccacagggaagactttcgcttctgcagccagcggaaccagacacacaggagcagcctccactacaaacccacaccagacctgcgcatctccatcgagaactccgaagaggccctcacagtccatgcccctttccctgcagcccaccctgcttcccgatccttccctgaccccaggggcctctaccacttctgcctctactggaaccgacatgctgggagattacatcttctctatggcaagcgtgacttcttgctgagtgacaaagcctctagcctcctctgcttccagcaccaggaggagagcctggctcagggccccccgctgttagccacttctgtcacctcctggtggagccctcagaacatcagcctgcccagtgccgccagcttcaccttctccttccacagtcctccccacacggccgctcacaatgcctcggtggacatgtgcgagctcaaaagggacctccagctgctcagccagttcctgaagcatccccagaaggcctcaaggaggccctcggctgcccccgccagccagcagttgcagagcctggagtcgaaactgacctctgtgagattcatgggggacatggtgtccttcgaggaggaccggatcaacgccacggtgtggaagctccagcccacagccggcctccaggacctgcacatccactcccggcaggaggaggagcagagcgagatcatggagtactcggtgctgctgcctcgaacactcttccagaggacgaaaggccggagcggggaggctgagaagagactcctcctggtggacttcagcagccaagccctgttccaggacaagaattccagccaagtcctgggtgagaaggtcttggggattgtggtacagaacaccaaagtagccaacctcacggagcccgtggtgctcactttccagcaccagctacagccgaagaatgtgactctgcaatgtgtgttctgggttgaagaccccacattgagcagcccggggcattggagcagtgctgggtgtgagaccgtcaggagagaaacccaaacatcctgcttctgcaaccacttgacctactttgcagtgctgatggtctcctcggtggaggtggacgccgtgcacaagcactacctgagcctcctctcctacgtgggctgtgtcgtctctgccctggcctgccttgtcaccattgccgcctacctctgctccaggaggaaacctcgggactacaccatcaaggtgcacatgaacctgctgctggccgtcttcctgctggacacgagcttcctgctcagcgagccggtggccctgacaggctctgaggctggctgccgagccagtgccatcttcctgcacttctccctgctcacctgcctttcctggatgggcctcgaggggtacaacctctaccgactcgtggtggaggtctttggcacctatgtccctggctacctactcaagctgagcgccatgggctggggcttccccatctttctggtgacgctggtggccctggtggatgtggacaactatggccccatcatcttggctgtgcataggactccagagggcgtcatctacccttccatgtgctggatccgggactccctggtcagctacatcaccaacctgggcctcttcagcctggtgtttctgttcaacatggccatgctagccaccatggtggtgcagatcctgcggctgcgcccccacacccaaaagtggtcacatgtgctgacactgctgggcctcagcctggtccttggcctgccctgggccttgatcttcttctcctttgcttctggcaccttccagcttgtcgtcctctaccttttcagcatcatcacctccttccaaggcttcctcatcttcatctggtactggtccatgcggctgcaggcccggggtggcccctcccctctgaagagcaactcagacagcgccaggctccccatcagctcgggcagcacctcgtccagccgcatctaggcctccagcccacctgcccatgtgatgaagcagagattcggcctcgtcgcacactgcctgtggcccccgagcccggcccagccccaggccagtcagccgcagactttggaaagcccaacgaccatggagagatgggccgttgccatggtggacggactcccgggctgggcttttgaattggccttggggactactcggctctcactcagctcccacgggactcagaagtgcgccgccatgctgcctagggtactgtccccacatctgtcccaacccagctggaggcctggtctctccttacaacccctgggcccagccctcattgctgggggccaggccttggatcttgagggtctggcacatccttaatcctgtgcccctgcctgggacagaaatgtggctccagttgctctgtctctcgtggtcaccctgagggcactctgcatcctctgtcattttaacctcaggtggcacccagggcgaatggggcccagggcagaccttcagggccagagccctggcggaggagaggccctttgccaggagcacagcagcagctcgcctacctctgagcccaggccccctccctccctcagccccccagtcctccctccatcttccctggggttctcctcctctcccagggcctccttgctccttcgttcacagctgggggtccccgattccaatgctgttttttggggagtggtttccaggagctgcctggtgtctgctgtaaatgtttgtctactgcacaagcctcggcctgcccctgagccaggctcggtaccgatgcgtgggctgggctaggtccctctgtccatctgggcctttgtatgagctgcattgcccttgctcaccctgaccaagcacacgcctcagaggggccctcagcctctcctgaagccctcttgtggcaagaactgtggaccatgccagtcccgtctggtttccatcccaccactccaaggactgagactgacctcctctggtgacactggcctagggcctgacactctcctaagaggttctctccaagcccccaaatagctccaggcgccctcggccgcccatcatggttaattctgtccaacaaacacacacgggtagattgctggcctgttgtaggtggtagggacacagatgaccgacctggtcactcctcctgccaacattcagtctggtatgtgaggcgtgcgtgaagcaagaactcctggagctacagggacagggagccatcattcctgcctgggaatcctggaagacttcctgcaggagtcagcgttcaatcttgaccttgaagatgggaaggatgttctttttacgtaccaattcttttgtcttttgatattaaaaagaagtacatgttcattgtagagaatttggaaactgtagaagagaatcaagaagaaaaataaaaatcagctgttgtaatcacctagcaaaaaaaaaaaaaaaaaaaa

SEQ ID NO: 1826 - DNA, 3678 bp, Homo sapiens; identical to SEQ ID NO: 1822

SEQ ID NO: 1827 - DNA, 3678 bp, Homo sapiens; identical to SEQ ID NO: 1822

SEQ ID NO: 1828 - DNA, 3678 bp, Homo sapiens; identical to SEQ ID NO: 1822

SEQ ID NO: 1829 - DNA, 3678 bp, Homo sapiens; identical to SEQ ID NO: 1822

SEQ ID NO: 1830 - DNA, 3819 bp, Homo sapiens
ggaaggggaggagcaggccacacaggcacaggccggtgagggacctgcccagacctggagggtctcgctctgtcacacaggctggagtgcagtggtgtgatcttggctcatcgtaacctccacctcccgggttcaagtgattctcatgcctcagcctcccgagtagctgggattacaggtggtgacttccaagagtgactccgtcggaggaaaatgactccccagtcgctgctgcagacgacactgttcctgctgagtctgctcttcctggtccaaggtgcccacggcaggggccacagggaagactttcgcttctgcagccagcggaaccagacacacaggagcagcctccactacaaacccacaccagacctgcgcatctccatcgagaactccgaagaggccctcacagtccatgcccctttccctgcagcccaccctgcttcccgatccttccctgaccccaggggcctctaccacttctgcctctactggaaccgacatgctgggagattacatcttctctatggcaagcgtgacttcttgctgagtgacaaagcctctagcctcctctgcttccagcaccaggaggagagcctggctcagggccccccgctgttagccacttctgtcacctcctggtggagccctcagaacatcagcctgcccagtgccgccagcttcaccttctccttccacagtcctccccacacggccgctcacaatgcctcggtggacatgtgcgagctcaaaagggacctccagctgctcagccagttcctgaagcatccccagaaggcctcaaggaggccctcggctgcccccgccagccagcagttgcagagcctggagtcgaaactgacctctgtgagattcatgggggacatggtgtccttcgaggaggaccggatcaacgccacggtgtggaagctccagcccacagccggcctccaggacctgcacatccactcccggcaggaggaggagcagagcgagatcatggagtactcggtgctgctgcctcgaacactcttccagaggacgaaaggccggagcggggaggctgagaagagactcctcctggtggacttcagcagccaagccctgttccaggacaagaattccagccaagtcctgggtgagaaggtcttggggattgtggtacagaacaccaaagtagccaacctcacggagcccgtggtgctcactttccagcaccagctacagccgaagaatgtgactctgcaatgtgtgttctgggttgaagaccccacattgagcagcccggggcattggagcagtgctgggtgtgagaccgtcaggagagaaacccaaacatcctgcttctgcaaccacttgacctactttgcagtgctgatggtctcctcggtggaggtggacgccgtgcacaagcactacctgagcctcctctcctacgtgggctgtgtcgtctctgccctggcctgccttgtcaccattgccgcctacctctgctccagggtgcccctgccgtgcaggaggaaacctcgggactacaccatcaaggtgcacatgaacctgctgctggccgtcttcctgctggacacgagcttcctgctcagcgagccggtggccctgacaggctctgaggctggctgccgagccagtgccatcttcctgcacttctccctgctcacctgcctttcctggatgggcctcgaggggtacaacctctaccgactcgtggtggaggtctttggcacctatgtccctggctacctactcaagctgagcgccatgggctggggcttccccatctttctggtgacgctggtggccctggtggatgtggacaactatggccccatcatcttggctgtgcataggactccagagggcgtcatctacccttccatgtgctggatccgggactccctggtcagctacatcaccaacctgggcctcttcagcctggtgtttctgttcaacatggccatgctagccaccatggtggtgcagatcctgcggctgcgcccccacacccaaaagtggtcacatgtgctgacactgctgggcctcagcctggtccttggcctgccctgggccttgatcttcttctcctttgcttctggcaccttccagcttgtcgtcctctaccttttcagcatcatcacctccttccaaggcttcctcatcttcatctggtactggtccatgcggctgcaggcccggggtggcccctcccctctgaagagcaactcagacagcgccaggctccccatcagctcgggcagcacctcgtccagccgcatctaggcctccagcccacctgcccatgtgatgaagcagagatgcggcctcgtcgcacactgcctgtggcccccgagccaggcccagccccaggccagtcagccgcagactttggaaagcccaacgaccatggagagatgggccgttgccatggtggacggactcccgggctgggcttttgaattggccttggggactactcggctctcactcagctcccacgggactcagaagtgcgccgccatgctgcctagggtactgtccccacatctgtcccaacccagctggaggcctggtctctccttacaacccctgggcccagccctcattgctgggggccaggccttggatcttgagggtctggcacatccttaatcctgtgcccctgcctgggacagaaatgtggctccagttgctctgtctctcgtggtcaccctgagggcactctgcatcctctgtcattttaacctcaggtggcacccagggcgaatggggcccagggcagaccttcagggccagagccctggcggaggagaggccctttgccaggagcacagcagcagctcgcctacctctgagcccaggccccctccctccctcagccccccagtcctccctccatcttccctggggttctcctcctctcccagggcctccttgctccttcgttcacagctgggggtccccgattccaatgctgttttttggggagtggtttccaggagctgcctggtgtctgctgtaaatgtttgtctactgcacaagcctcggcctgcccctgagccaggctcggtaccgatgcgtgggctgggctaggtccctctgtccatctgggcctttgtatgagctgcattgcccttgctcaccctgaccaagcacacgcctcagaggggccctcagcctctcctgaagccctcttgtggcaagaactgtggaccatgccagtcccgtctggtttccatcccaccactccaaggactgagactgacctcctctggtgacactggcctagagcctgacactctcctaagaggttctctccaagcccccaaatagctccaggcgccctcggccgcccatcatggttaattctgtccaacaaacacacacgggtagattgctggcctgttgtaggtggtagggacacagatgaccgacctggtcactcctcctgccaacattcagtctggtatgtgaggcgtgcgtgaagcaagaactcctggagctacagggacagggagccatcattcctgcctgggaatcctggaagacttcctgcaggagtcagcgttcaatcttgaccttgaagatgggaaggatgttctttttacgtaccaattcttttgtcttttgatattaaaaagaagtacatgttcattgtagagaatttggaaactgtagaagagaatcaagaagaaaaataaaaatcagctgttgtaatcgcctagcaaaaaaaaaaaaaaaaaaaaaaaaaaaaaaaaaaaaaaaaaaaaaaaaaaaaaaaaaaaaaaaaaaaaaaaaaaaaaaaaa

SEQ ID NO: 1831 - DNA, 4516 bp, Homo sapiens
ccccgcagccctcccgggacacggtggacacgcttgtcccagacctgggcgccctcctgccgggagccaggactggccgcagcaggcgctgtccgggcccgtgggcggggtttcgggagggggcggagccaggcccacggccggtgtcaggttgctccggtaacggtgacgtttcgcggcgtgggcggggccagcacgcaggttgcatattttaggaagtgaggaggaggcgcgggctggagctgcggcggggtctggggcgcagagcagcggcgggaggaggcggacacgtggcaacagcggtagcagcccgggcggcggcagcaacagcggcggcggcatcggcccgagccgccggccgccctcccaccctcccgccccgcggcagccctagctccctccacttggctcccctggtcccgctcgctcggccgggagctgctctgtgcttttctctctgattctccagcgacaggacccggcgccgggcactgagcaccgccaccatggggaagggggttggacgtgataagtatgagcctgcagctgtttcagaacaaggtgataaaaagggcaaaaagggcaaaaaagacagggacatggatgaactgaagaaagaagtttctatggatgatcataaacttagccttgatgaacttcatcgtaaatatggaacagacttgagccggggattaacatctgctcgtgcagctgagatcctggcgcgagatggtcccaacgccctcactccccctcccactactcctgaatggatcaagttttgtcggcagctctttggggggttctcaatgttactgtggattggagcgattctttgtttcttggcttatagcatccaagctgctacagaagaggaacctcaaaacgataatctgtacctgggtgtggtgctatcagccgttgtaatcataactggttgcttctcctactatcaagaagctaaaagttcaaagatcatggaatccttcaaaaacatggtccctcagcaagcccttgtgattcgaaatggtgagaaaatgagcataaatgcggaggaagttgtggttggggatctggtggaagtaaaaggaggagaccgaattcctgctgacctcagaatcatatctgcaaatggctgcaaggtggataactcctcgctcactggtgaatcagaaccccagactaggtctccagatttcacaaatgaaaaccccctggagacgaggaacattgccttcttttcaaccaattgtgttgaaggcaccgcacgtggtattgttgtctacactggggatcgcactgtgatgggaagaattgccacacttgcttctgggctggaaggaggccagacccccattgctgcagaaattgaacattttatccacatcatcacgggtgtggctgtgttcctgggtgtgtctttcttcatcctttctctcatccttgagtacacctggcttgaggctgtcatcttcctcatcggtatcatcgtagccaatgtgccggaaggtttgctggccactgtcacggtctgtctgacacttactgccaaacgcatggcaaggaaaaactgcttagtgaagaacttagaagctgtggagaccttggggtccacgtccaccatctgctctgataaaactggaactctgactcagaaccggatgacagtggcccacatgtggtttgacaatcaaatccatgaagctgatacgacagagaatcagagtggtgtctcttttgacaagacttcagctacctggcttgctctgtccagaattgcaggtctttgtaacagggcagtgtttcaggctaaccaggaaaacctacctattcttaagcgggcagttgcaggagatgcctctgagtcagcactcttaaagtgcatagagctgtgctgtggttccgtgaaggagatgagagaaagatacgccaaaatcgtcgagatacccttcaactccaccaacaagtaccagttgtctattcataagaaccccaacacatcggagccccaacacctgttggtgatgaagggcgccccagaaaggatcctagaccgttgcagctctatcctcctccacggcaaggagcagcccctggatgaggagctgaaagacgcctttcagaacgcctatttggagctggggggcctcggagaacgagtcctaggtttctgccacctctttctgccagatgaacagtttcctgaagggttccagtttgacactgacgatgtgaatttccctatcgataatctgtgctttgttgggctcatctccatgattgaccctccacgggcggccgttcctgatgccgtgggcaaatgtcgaagtgctggaattaaggtcatcatggtcacaggagaccatccaatcacagctaaagctattgccaaaggtgtgggcatcatctcagaaggcaatgagaccgtggaagacattgctgcccgcctcaacatcccagtcagccaggtgaaccccagggatgccaaggcctgcgtagtacacggcagtgatctaaaggacatgacctccgagcagctggatgacattttgaagtaccacactgagatagtgtttgccaggacctcccctcagcagaagctcatcattgtggaaggctgccaaagacagggtgctatcgtggctgtgactggtgacggtgtgaatgactctccagctttgaagaaagcagacattggggttgctatggggattgctggctcagatgtgtccaagcaagctgctgacatgattcttctggatgacaactttgcctcaattgtgactggagtagaggaaggtcgtctgatctttgataacttgaagaaatccattgcttataccttaaccagtaacattcccgagatcaccccgttcctgatatttattattgcaaacattccactaccactggggactgtcaccatcctctgcattgacttgggcactgacatggttcctgccatctccctggcttatgagcaggctgagagtgacatcatgaagagacagcccagaaatcccaaaacagacaaacttgtgaatgagcggctgatcagcatggcctatgggcagattggaatgatccaggccctgggaggcttctttacttactttgtgattctggctgagaacggcttcctcccaattcacctgttgggcctccgagtggactgggatgaccgctggatcaacgatgtggaagacagctacgggcagcagtggacctatgagcagaggaaaatcgtggagttcacctgccacacagccttcttcgtcagtatcgtggtggtgcagtgggccgacttggtcatctgtaagaccaggaggaattcggtcttccagcaggggatgaagaacaagatcttgatatttggcctctttgaagagacagccctggctgctttcctttcctactgccctggaatgggtgttgctcttaggatgtatcccctcaaacctacctggtggttctgtgccttcccctactctcttctcatcttcgtatatgacgaagtcagaaaactcatcatcaggcgacgccctggcggctgggtggagaaggaaacctactattagccccccgtcctgcacgccgtggagcatcaggccacacactctgcatccgacacccaccccctctttgtgtacttcagtcttggagtttggaactctaccctggtaggaaagcaccgcagcatgtggggaagcaagacgtcctggaatgaagcatgtagctctatggggggaggggggagggctgcctgaaaaccatccatctgtggaaatgacagcggggaaggtttttatgtgcctttttgtttttgtaaaaaaggaacacccggaaagactgaaagaatacattttatatctggatttttacaaataaagatggctattataatggaatttgtctgtgccctcgtcgcttctttggtacagatgtctatgtgatctggagctgtggttttcaacatgagtccctgaccagcagtttatcagcatcacctggttgcttgctaggaaggcgggcccagacccactgagtcagaaatgcatcagcaatgtggcttaataagccctcaggtgattttgatttacattcaagtttggaaaccactggctaagaggaagcattctgcccgtgctcttttagttggagtaggtgagtttacctgacccattttttctggctgctgcctggggtgatagggctgtaactccacctgctgccttagcatctggctttttgatggaagagcacctcgcctaaaggatttccagaccctcagagtatactaaactgcagatgaggcccttctctttcagtctaaaagagacctgaagccttcctgctttccctccagagatcaccaccacatctcaagtgtctctagcccagggcttatctgagaagcagaaatctatcccacacagtctgcctgggcatgtgtgctgagaagtggttcccttccttccatataatgtgttcctaatttagcatcaatgacacaatt

SEQ ID NO: 1832 - DNA, 4212 bp, Homo sapiens
caagcgcccggggaggccatccgcaggtgggcgcggggcctggattccacagaggggcggagtccctcagtcaggcgctggctgcaatcacacccgagcgccagccccctccagcatccctgagtcccagaggagatcgccgaagcgctggaaaagccgttccgcccacgacttctggtgccgggtcggcggcgactgggggagcccagttccgagaccgtaccgcacccactgcggacctcctgggccctacatagttggacgtgataagtatgagcctgcagctgtttcagaacaaggtgataaaaagggcaaaaagggcaaaaaagacagggacatggatgaactgaagaaagaagtttctatggatgatcataaacttagccttgatgaacttcatcgtaaatatggaacagacttgagccggggattaacatctgctcgtgcagctgagatcctggcgcgagatggtcccaacgccctcactccccctcccactactcctgaatggatcaagttttgtcggcagctctttggggggttctcaatgttactgtggattggagcgattctttgtttcttggcttatagcatccaagctgctacagaagaggaacctcaaaacgataatctgtacctgggtgtggtgctatcagccgttgtaatcataactggttgcttctcctactatcaagaagctaaaagttcaaagatcatggaatccttcaaaaacatggtccctcagcaagcccttgtgattcgaaatggtgagaaaatgagcataaatgcggaggaagttgtggttggggatctggtggaagtaaaaggaggagaccgaattcctgctgacctcagaatcatatctgcaaatggctgcaaggtggataactcctcgctcactggtgaatcagaaccccagactaggtctccagatttcacaaatgaaaaccccctggagacgaggaacattgccttcttttcaaccaattgtgttgaaggcaccgcacgtggtattgttgtctacactggggatcgcactgtgatgggaagaattgccacacttgcttctgggctggaaggaggccagacccccattgctgcagaaattgaacattttatccacatcatcacgggtgtggctgtgttcctgggtgtgtctttcttcatcctttctctcatccttgagtacacctggcttgaggctgtcatcttcctcatcggtatcatcgtagccaatgtgccggaaggtttgctggccactgtcacggtctgtctgacacttactgccaaacgcatggcaaggaaaaactgcttagtgaagaacttagaagctgtggagaccttggggtccacgtccaccatctgctctgataaaactggaactctgactcagaaccggatgacagtggcccacatgtggtttgacaatcaaatccatgaagctgatacgacagagaatcagagtggtgtctcttttgacaagacttcagctacctggcttgctctgtccagaattgcaggtctttgtaacagggcagtgtttcaggctaaccaggaaaacctacctattcttaagcgggcagttgcaggagatgcctctgagtcagcactcttaaagtgcatagagctgtgctgtggttccgtgaaggagatgagagaaagatacgccaaaatcgtcgagatacccttcaactccaccaacaagtaccagttgtctattcataagaaccccaacacatcggagccccaacacctgttggtgatgaagggcgccccagaaaggatcctagaccgttgcagctctatcctcctccacggcaaggagcagcccctggatgaggagctgaaagacgcctttcagaacgcctatttggagctggggggcctcggagaacgagtcctaggtttctgccacctctttctgccagatgaacagtttcctgaagggttccagtttgacactgacgatgtgaatttccctatcgataatctgtgctttgttgggctcatctccatgattgaccctccacgggcggccgttcctgatgccgtgggcaaatgtcgaagtgctggaattaaggtcatcatggtcacaggagaccatccaatcacagctaaagctattgccaaaggtgtgggcatcatctcagaaggcaatgagaccgtggaagacattgctgcccgcctcaacatcccagtcagccaggtgaaccccagggatgccaaggcctgcgtagtacacggcagtgatctaaaggacatgacctccgagcagctggatgacattttgaagtaccacactgagatagtgtttgccaggacctcccctcagcagaagctcatcattgtggaaggctgccaaagacagggtgctatcgtggctgtgactggtgacggtgtgaatgactctccagctttgaagaaagcagacattggggttgctatggggattgctggctcagatgtgtccaagcaagctgctgacatgattcttctggatgacaactttgcctcaattgtgactggagtagaggaaggtcgtctgatctttgataacttgaagaaatccattgcttataccttaaccagtaacattcccgagatcaccccgttcctgatatttattattgcaaacattccactaccactggggactgtcaccatcctctgcattgacttgggcactgacatggttcctgccatctccctggcttatgagcaggctgagagtgacatcatgaagagacagcccagaaatcccaaaacagacaaacttgtgaatgagcggctgatcagcatggcctatgggcagattggaatgatccaggccctgggaggcttctttacttactttgtgattctggctgagaacggcttcctcccaattcacctgttgggcctccgagtggactgggatgaccgctggatcaacgatgtggaagacagctacgggcagcagtggacctatgagcagaggaaaatcgtggagttcacctgccacacagccttcttcgtcagtatcgtggtggtgcagtgggccgacttggtcatctgtaagaccaggaggaattcggtcttccagcaggggatgaagaacaagatcttgatatttggcctctttgaagagacagccctggctgctttcctttcctactgccctggaatgggtgttgctcttaggatgtatcccctcaaacctacctggtggttctgtgccttcccctactctcttctcatcttcgtatatgacgaagtcagaaaactcatcatcaggcgacgccctggcggctgggtggagaaggaaacctactattagccccccgtcctgcacgccgtggagcatcaggccacacactctgcatccgacacccaccccctctttgtgtacttcagtcttggagtttggaactctaccctggtaggaaagcaccgcagcatgtggggaagcaagacggctgcctgaaaaccatccatctgtggaaatgacagcggggaaggtttttatgtgcctttttgtttttgtaaaaaaggaacacccggaaagactgaaagaatacattttatatctggatttttacaaataaagatggctattataatggaatttgtctgtgccctcgtcgcttctttggtacagatgtctatgtgatctggagctgtggttttcaacatgagtccctgaccagcagtttatcagcatcacctggttgcttgctaggaaggcgggcccagacccactgagtcagaaatgcatcagcaatgtggcttaataagccctcaggtgattttgatttacattcaagtttggaaaccactggctaagaggaagcattctgcccgtgctcttttagttggagtaggtgagtttacctgacccattttttctggctgctgcctggggtgatagggctgtaactccacctgctgccttagcatctggctttttgatggaagagcacctcgcctaaaggatttccagaccctcagagtatactaaactgcagatgaggcccttctctttcagtctaaaagagacctgaagccttcctgctttccctccagagatcaccaccacatctcaagtgtctctagcccagggcttatctgagaagcagaaatctatcccacacagtctgcctgggcatgtgtgctgagaagtggttcccttccttccatataatgtgttcctaatttagcatcaatgacacaatt

SEQ ID NO: 1833 - DNA, 2857 bp, Homo sapiens
ccccgcagccctcccgggacacggtggacacgcttgtcccagacctgggcgccctcctgccgggagccaggactggccgcagcaggcgctgtccgggcccgtgggcggggtttcgggagggggcggagccaggcccacggccggtgtcaggttgctccggtaacggtgacgtttcgcggcgtgggcggggccagcacgcaggttgcatattttaggaagtgaggaggaggcgcgggctggagctgcggcggggtctggggcgcagagcagcggcgggaggaggcggacacgtggcaacagcggtagcagcccgggcggcggcagcaacagcggcggcggcatcggcccgagccgccggccgccctcccaccctcccgccccgcggcagccctagctccctccacttggctcccctggtcccgctcgctcggccgggagctgctctgtgcttttctctctgattctccagcgacaggacccggcgccgggcactgagcaccgccaccatggggaagggggttggacgtgataagtatgagcctgcagctgtttcagaacaaggtgataaaaagggcaaaaagggcaaaaaagacagggacatggatgaactgaagaaagaagtttctatggatgatcataaacttagccttgatgaacttcatcgtaaatatggaacagacttgagccggggattaacatctgctcgtgcagctgagatcctggcgcgagatggtcccaacgccctcactccccctcccactactcctgaatggatcaagttttgtcggcagctctttggggggttctcaatgttactgtggattggagcgattctttgtttcttggcttatagcatccaagctgctacagaagaggaacctcaaaacgataatctgtacctgggtgtggtgctatcagccgttgtaatcataactggttgcttctcctactatcaagaagctaaaagttcaaagatcatggaatccttcaaaaacatggtccctcagcaagcccttgtgattcgaaatggtgagaaaatgagcataaatgcggaggaagttgtggttggggatctggtggaagtaaaaggaggagaccgaattcctgctgacctcagaatcatatctgcaaatggctgcaaggtggataactcctcgctcactggtgaatcagaaccccagactaggtctccagatttcacaaatgaaaaccccctggagacgaggaacattgccttcttttcaaccaattgtgttgaaggcaccgcacgtggtattgttgtctacactggggatcgcactgtgatgggaagaattgccacacttgcttctgggctggaaggaggccagacccccattgctgcagaaattgaacattttatccacatcatcacgggtgtggctgtgttcctgggtgtgtctttcttcatcctttctctcatccttgagtacacctggcttgaggctgtcatcttcctcatcggtatcatcgtagccaatgtgccggaaggtttgctggccactgtcacggtctgtctgacacttactgccaaacgcatggcaaggaaaaactgcttagtgaagaacttagaagctgtggagaccttggggtccacgtccaccatctgctctgataaaactggaactctgactcagaaccggatgacagtggcccacatgtggtttgacaatcaaatccatgaagctgatacgacagagaatcagagtggtgtctcttttgacaagacttcagctacctggcttgctctgtccagaattgcaggtctttgtaacagggcagtgtttcaggctaaccaggaaaacctaccttctcttctcatcttcgtatatgacgaagtcagaaaactcatcatcaggcgacgccctggcggctgggtggagaaggaaacctactattagccccccgtcctgcacgccgtggagcatcaggccacacactctgcatccgacacccaccccctctttgtgtacttcagtcttggagtttggaactctaccctggtaggaaagcaccgcagcatgtggggaagcaagacgtcctggaatgaagcatgtagctctatggggggaggggggagggctgcctgaaaaccatccatctgtggaaatgacagcggggaaggtttttatgtgcctttttgtttttgtaaaaaaggaacacccggaaagactgaaagaatacattttatatctggatttttacaaataaagatggctattataatggaatttgtctgtgccctcgtcgcttctttggtacagatgtctatgtgatctggagctgtggttttcaacatgagtccctgaccagcagtttatcagcatcacctggttgcttgctaggaaggcgggcccagacccactgagtcagaaatgcatcagcaatgtggcttaataagccctcaggtgattttgatttacattcaagtttggaaaccactggctaagaggaagcattctgcccgtgctcttttagttggagtaggtgagtttacctgacccattttttctggctgctgcctggggtgatagggctgtaactccacctgctgccttagcatctggctttttgatggaagagcacctcgcctaaaggatttccagaccctcagagtatactaaactgcagatgaggcccttctctttcagtctaaaagagacctgaagccttcctgctttccctccagagatcaccaccacatctcaagtgtctctagcccagggcttatctgagaagcagaaatctatcccacacagtctgcctgggcatgtgtgctgagaagtggttcccttccttccatataatgtgttcctaatttagcatcaatgacacaatt

SEQ ID NO: 1834 - DNA, 3634 bp, Homo sapiens
ccccgcagccctcccgggacacggtggacacgcttgtcccagacctgggcgccctcctgccgggagccaggactggccgcagcaggcgctgtccgggcccgtgggcggggtttcgggagggggcggagccaggcccacggccggtgtcaggttgctccggtaacggtgacgtttcgcggcgtgggcggggccagcacgcaggttgcatattttaggaagtgaggaggaggcgcgggctggagctgcggcggggtctggggcgcagagcagcggcgggaggaggcggacacgtggcaacagcggtagcagcccgggcggcggcagcaacagcggcggcggcatcggcccgagccgccggccgccctcccaccctcccgccccgcggcagccctagctccctccacttggctcccctggtcccgctcgctcggccgggagctgctctgtgcttttctctctgattctccagcgacaggacccggcgccgggcactgagcaccgccaccatggggaagggggttggacgtgataagtatgagcctgcagctgtttcagaacaaggtgataaaaagggcaaaaagggcaaaaaagacagggacatggatgaactgaagaaagaagtttctatggatgatcataaacttagccttgatgaacttcatcgtaaatatggaacagacttgagccggggattaacatctgctcgtgcagctgagatcctggcgcgagatggtcccaacgccctcactccccctcccactactcctgaatggatcaagttttgtcggcagctctttggggggttctcaatgttactgtggattggagcgattctttgtttcttggcttatagcatccaagctgctacagaagaggaacctcaaaacgataatctgtacctgggtgtggtgctatcagccgttgtaatcataactggttgcttctcctactatcaagaagctaaaagttcaaagatcatggaatccttcaaaaacatggtccctcagcaagcccttgtgattcgaaatggtgagaaaatgagcataaatgcggaggaagttgtggttggggatctggtggaagtaaaaggaggagaccgaattcctgctgacctcagaatcatatctgcaaatggctgcaaggtggataactcctcgctcactggtgaatcagaaccccagactaggtctccagatttcacaaatgaaaaccccctggagacgaggaacattgccttcttttcaaccaattgtgttgaaggcaccgcacgtggtattgttgtctacactggggatcgcactgtgatgggaagaattgccacacttgcttctgggctggaaggaggccagacccccattgctgcagaaattgaacattttatccacatcatcacgggtgtggctgtgttcctgggtgtgtctttcttcatcctttctctcatccttgagtacacctggcttgaggctgtcatcttcctcatcggtatcatcgtagccaatgtgccggaaggtttgctggccactgtcacggtctgtctgacacttactgccaaacgcatggcaaggaaaaactgcttagtgaagaacttagaagctgtggagaccttggggtccacgtccaccatctgctctgataaaactggaactctgactcagaaccggatgacagtggcccacatgtggtttgacaatcaaatccatgaagctgatacgacagagaatcagagtggtgtctcttttgacaagacttcagctacctggcttgctctgtccagaattgcaggtctttgtaacagggcagtgtttcaggctaaccaggaaaacctacctattcttaagcgggcagttgcaggagatgcctctgagtcagcactcttaaagtgcatagagctgtgctgtggttccgtgaaggagatgagagaaagatacgccaaaatcgtcgagatacccttcaactccaccaacaagtaccagttgtctattcataagaaccccaacacatcggagccccaacacctgttggtgatgaagggcgccccagaaaggatcctagaccgttgcagctctatcctcctccacggcaaggagcagcccctggatgaggagctgaaagacgcctttcagaacgcctatttggagctggggggcctcggagaacgagtcctaggtttctgccacctctttctgccagatgaacagtttcctgaagggttccagtttgacactgacgatgtgaatttccctatcgataatctgtgctttgttgggctcatctccatgattgaccctccacgggcggccgttcctgatgccgtgggcaaatgtcgaagtgctggaattaagacctatgagcagaggaaaatcgtggagttcacctgccacacagccttcttcgtcagtatcgtggtggtgcagtgggccgacttggtcatctgtaagaccaggaggaattcggtcttccagcaggggatgaagaacaagatcttgatatttggcctctttgaagagacagccctggctgctttcctttcctactgccctggaatgggtgttgctcttaggatgtatcccctcaaacctacctggtggttctgtgccttcccctactctcttctcatcttcgtatatgacgaagtcagaaaactcatcatcaggcgacgccctggcggctgggtggagaaggaaacctactattagccccccgtcctgcacgccgtggagcatcaggccacacactctgcatccgacacccaccccctctttgtgtacttcagtcttggagtttggaactctaccctggtaggaaagcaccgcagcatgtggggaagcaagacgtcctggaatgaagcatgtagctctatggggggaggggggagggctgcctgaaaaccatccatctgtggaaatgacagcggggaaggtttttatgtgcctttttgtttttgtaaaaaaggaacacccggaaagactgaaagaatacattttatatctggatttttacaaataaagatggctattataatggaatttgtctgtgccctcgtcgcttctttggtacagatgtctatgtgatctggagctgtggttttcaacatgagtccctgaccagcagtttatcagcatcacctggttgcttgctaggaaggcgggcccagacccactgagtcagaaatgcatcagcaatgtggcttaataagccctcaggtgattttgatttacattcaagtttggaaaccactggctaagaggaagcattctgcccgtgctcttttagttggagtaggtgagtttacctgacccattttttctggctgctgcctggggtgatagggctgtaactccacctgctgccttagcatctggctttttgatggaagagcacctcgcctaaaggatttccagaccctcagagtatactaaactgcagatgaggcccttctctttcagtctaaaagagacctgaagccttcctgctttccctccagagatcaccaccacatctcaagtgtctctagcccagggcttatctgagaagcagaaatctatcccacacagtctgcctgggcatgtgtgctgagaagtggttcccttccttccatataatgtgttcctaatttagcatcaatgacacaatt

SEQ ID NO: 1835 - DNA, 2911 bp, Homo sapiens
attttaggaagtgaggaggaggcgcgggctggagctgcggcggggtctggggcgcagagcagcggcgggaggaggcggacacgtggcaacagcggtagcagcccgggcggcggcagcaacagcggcggcggcatcggcccgagccgccggccgccctcccaccctcccgccccgcggcagccctagctccctccacttggctcccctggtcccgctcgctcggccgggagctgctctgtgcttttctctctgattctccagcgacaggacccggcgccgggcactgagcaccgccaccatggggaagggggttggacgtgataagtatgagcctgcagctgtttcagaacaaggtgataaaaagggcaaaaagggcaaaaaagacagggacatggatgaactgaagaaagaagtttctatggatgatcataaacttagccttgatgaacttcatcgtaaatatggaacagacttgagccggggattaacatctgctcgtgcagctgagatcctggcgcgagatggtcccaacgccctcactccccctcccactactcctgaatggatcaagttttgtcggcagctctttggggggttctcaatgttactgtggattggagcgattctttgtttcttggcttatagcatccaagctgctacagaagaggaacctcaaaacgataatctgtacctgggtgtggtgctatcagccgttgtaatcataactggttgcttctcctactatcaagaagctaaaagttcaaagatcatggaatccttcaaaaacatggtccctcagcaagcccttgtgattcgaaatggtgagaaaatgagcataaatgcggaggaagttgtggttggggatctggtggaagtaaaaggaggagaccgaattcctgctgacctcagaatcatatctgcaaatggctgcaaggtggataactcctcgctcactggtgaatcagaaccccagactaggtctccagatttcacaaatgaaaaccccctggagacgaggaacattgccttcttttcaaccaattgtgttgaaggcaccgcacgtggtattgttgtctacactggggatcgcactgtgatgggaagaattgccacacttgcttctgggctggaaggaggccagacccccattgctgcagaaattgaacattttatccacatcatcacgggtgtggctgtgttcctgggtgtgtctttcttcatcctttctctcatccttgagtacacctggcttgaggctgtcatcttcctcatcggtatcatcgtagccaatgtgccggaaggtttgctggccactgtcacggtctgtctgacacttactgccaaacgcatggcaaggaaaaactgcttagtgaagaacttagaagctgtggagaccttggggtccacgtccaccatctgctctgataaaactggaactctgactcagaaccggatgacagtggcccacatgtggtttgacaatcaaatccatgaagctgatacgacagagaatcagagtggtgtctcttttgacaagacttcagctacctggcttgctctgtccagaattgcaggtctttgtaacagggcagtgtttcaggctaaccaggaaaacctacctattcttaagcgggcagttgcaggagatgcctctgagtcagcactcttaaagtgcatagagctgtgctgtggttccgtgaaggagatgagagaaagatacgccaaaatcgtcgagatacccttcaactccaccaacaagtaccagttgtctattcataagaaccccaacacatcggagccccaacacctgttggtgatgaagggcgccccagaaaggatcctagaccgttgcagctctatcctcctccacggcaaggagcagcccctggatgaggagctgaaagacgcctttcagaacgcctatttggagctggggggcctcggagaacgagtcctaggtttctgccacctctttctgccagatgaacagtttcctgaagggttccagtttgacactgacgatgtgaatttccctatcgataatctgtgctttgttgggctcatctccatgattgaccctccacgggcggccgttcctgatgccgtgggcaaatgtcgaagtgctggaattaaggtcatcatggtcacaggagaccatccaatcacagctaaagctattgccaaaggtgtgggcatcatctcagaaggcaatggacctatgagcagaggaaaatcgtggagttcacctgccacacagccttcttcgtcagtatcgtggtggtgcagtgggccgacttggtcatctgtaagaccaggaggaattcggtcttccagcaggggatgaagaacaagatcttgatatttggcctctttgaagagacagccctggctgctttcctttcctactgccctggaatgggtgttgctcttaggatgtatcccctcaaacctacctggtggttctgtgccttcccctactctcttctcatcttcgtatatgacgaagtcagaaaactcatcatcaggcgacgccctggcggctgggtggagaaggaaacctactattagccccccgtcctgcacgccgtggagcatcaggccacacactctgcatccgacacccaccccctctttgtgtacttcagtcttggagtttggaactctaccctggtaggaaagcaccgcagcatgtggggaagcaagacgtcctggaatgaagcatgtagctctatggggggaggggggagggctgcctgaaaaccatccatctgtggaaatgacagcggggaaggtttttatgtgcctttttgtttttgtaaaaaaggaacacccggaaagactgaaagaatacattttatatctggatttttacaaataaagatggctattataatggaaaaaaaaaaaaaaa

SEQ ID NO: 1836 - DNA, 3718 bp, Homo sapiens
ccccgcagccctcccgggacacggtggacacgcttgtcccagacctgggcgccctcctgccgggagccaggactggccgcagcaggcgctgtccgggcccgtgggcggggtttcgggagggggcggagccaggcccacggccggtgtcaggttgctccggtaacggtgacgtttcgcggcgtgggcggggccagcacgcaggttgcatattttaggaagtgaggaggaggcgcgggctggagctgcggcggggtctggggcgcagagcagcggcgggaggaggcggacacgtggcaacagcggtagcagcccgggcggcggcagcaacagcggcggcggcatcggcccgagccgccggccgccctcccaccctcccgccccgcggcagccctagctccctccacttggctcccctggtcccgctcgctcggccgggagctgctctgtgcttttctctctgattctccagcgacaggacccggcgccgggcactgagcaccgccaccatggggaagggggttggacgtgataagtatgagcctgcagctgtttcagaacaaggtgataaaaagggcaaaaagggcaaaaaagacagggacatggatgaactgaagaaagaagtttctatggatgatcataaacttagccttgatgaacttcatcgtaaatatggaacagacttgagccggggattaacatctgctcgtgcagctgagatcctggcgcgagatggtcccaacgccctcactccccctcccactactcctgaatggatcaagttttgtcggcagctctttggggggttctcaatgttactgtggattggagcgattctttgtttcttggcttatagcatccaagctgctacagaagaggaacctcaaaacgataatctgtacctgggtgtggtgctatcagccgttgtaatcataactggttgcttctcctactatcaagaagctaaaagttcaaagatcatggaatccttcaaaaacatggtccctcagcaagcccttgtgattcgaaatggtgagaaaatgagcataaatgcggaggaagttgtggttggggatctggtggaagtaaaaggaggagaccgaattcctgctgacctcagaatcatatctgcaaatggctgcaaggtggataactcctcgctcactggtgaatcagaaccccagactaggtctccagatttcacaaatgaaaaccccctggagacgaggaacattgccttcttttcaaccaattgtgttgaaggcaccgcacgtggtattgttgtctacactggggatcgcactgtgatgggaagaattgccacacttgcttctgggctggaaggaggccagacccccattgctgcagaaattgaacattttatccacatcatcacgggtgtggctgtgttcctgggtgtgtctttcttcatcctttctctcatccttgagtacacctggcttgaggctgtcatcttcctcatcggtatcatcgtagccaatgtgccggaaggtttgctggccactgtcacggtctgtctgacacttactgccaaacgcatggcaaggaaaaactgcttagtgaagaacttagaagctgtggagaccttggggtccacgtccaccatctgctctgataaaactggaactctgactcagaaccggatgacagtggcccacatgtggtttgacaatcaaatccatgaagctgatacgacagagaatcagagtggtgtctcttttgacaagacttcagctacctggcttgctctgtccagaattgcaggtctttgtaacagggcagtgtttcaggctaaccaggaaaacctacctattcttaagcgggcagttgcaggagatgcctctgagtcagcactcttaaagtgcatagagctgtgctgtggttccgtgaaggagatgagagaaagatacgccaaaatcgtcgagatacccttcaactccaccaacaagtaccagttgtctattcataagaaccccaacacatcggagccccaacacctgttggtgatgaagggcgccccagaaaggatcctagaccgttgcagctctatcctcctccacggcaaggagcagcccctggatgaggagctgaaagacgcctttcagaacgcctatttggagctggggggcctcggagaacgagtcctaggtttctgccacctctttctgccagatgaacagtttcctgaagggttccagtttgacactgacgatgtgaatttccctatcgataatctgtgctttgttgggctcatctccatgattgaccctccacgggcggccgttcctgatgccgtgggcaaatgtcgaagtgctggaattaaggtcatcatggtcacaggagaccatccaatcacagctaaagctattgccaaaggtgtgggcatcatctcagaaggcaatgagaccacctatgagcagaggaaaatcgtggagttcacctgccacacagccttcttcgtcagtatcgtggtggtgcagtgggccgacttggtcatctgtaagaccaggaggaattcggtcttccagcaggggatgaagaacaagatcttgatatttggcctctttgaagagacagccctggctgctttcctttcctactgccctggaatgggtgttgctcttaggatgtatcccctcaaacctacctggtggttctgtgccttcccctactctcttctcatcttcgtatatgacgaagtcagaaaactcatcatcaggcgacgccctggcggctgggtggagaaggaaacctactattagccccccgtcctgcacgccgtggagcatcaggccacacactctgcatccgacacccaccccctctttgtgtacttcagtcttggagtttggaactctaccctggtaggaaagcaccgcagcatgtggggaagcaagacgtcctggaatgaagcatgtagctctatggggggaggggggagggctgcctgaaaaccatccatctgtggaaatgacagcggggaaggtttttatgtgcctttttgtttttgtaaaaaaggaacacccggaaagactgaaagaatacattttatatctggatttttacaaataaagatggctattataatggaatttgtctgtgccctcgtcgcttctttggtacagatgtctatgtgatctggagctgtggttttcaacatgagtccctgaccagcagtttatcagcatcacctggttgcttgctaggaaggcgggcccagacccactgagtcagaaatgcatcagcaatgtggcttaataagccctcaggtgattttgatttacattcaagtttggaaaccactggctaagaggaagcattctgcccgtgctcttttagttggagtaggtgagtttacctgacccattttttctggctgctgcctggggtgatagggctgtaactccacctgctgccttagcatctggctttttgatggaagagcacctcgcctaaaggatttccagaccctcagagtatactaaactgcagatgaggcccttctctttcagtctaaaagagacctgaagccttcctgctttccctccagagatcaccaccacatctcaagtgtctctagcccagggcttatctgagaagcagaaatctatcccacacagtctgcctgggcatgtgtgctgagaagtggttcccttccttccatataatgtgttcctaatttagcatcaatgacacaatt

SEQ ID NO: 1837 - DNA, 3665 bp, Homo sapiens
ggggcgcagagcagcggcgggaggaggcggacacgtggcaacagcggtagcagcccgggcggcggcagcaacagcggcggcggcatcggcccgagccgccggccgccctcccaccctcccgccccgcggcagccctagctccctccacttggctcccctggtcccgctcgcttggccgggagctgctctgtgcttttctctctgattctccagcgacaggacccggcgccgggcactgagcaccgccaccatggggaagggggttggacgtgataagtatgagcctgcagctgtttcagaacaaggtgataaaaagggcaaaaagggcaaaaaagacagggacatggatgaactgaagaaagaagtttctatggatgatcataaacttagccttgatgaacttcatcgtaaatatggaacagacttgagccggggattaacatctgctcgtgcagctgagatcctggcgcgagatggtcccaacgccctcactccccctcccactactcctgaatggatcaagttttgtcggcagctctttggggggttctcaatgttactgtggattggagcgattctttgtttcttggcttatagcatccaagctgctacagaagaggaacctcaaaacgataatctgtacctgggtgtggtgctatcagccgttgtaatcataactggttgcttctcctactatcaagaagctaaaagttcaaagatcatggaatccttcaaaaacatggtccctcagcaagcccttgtgattcgaaatggtgagaaaatgagcataaatgcggaggaagttgtggttggggatctggtggaagtaaaaggaggagaccgaattcctgctgacctcagaatcatatctgcaaatggctgcaaggtggataactcctcgctcactggtgaatcagaaccccagactaggtctccagatttcacaaatgaaaaccccctggagacgaggaacattgccttcttttcaaccaattgtgttgaaggcaccgcacgtggtattgttgtctacactggggatcgcactgtgatgggaagaattgccacacttgcttctgggctggaaggaggccagacccccattgctgcagaaattgaacattttatccacatcatcacgggtgtggctgtgttcctgggtgtgtctttcttcatcctttctctcatccttgagtacacctggcttgaggctgtcatcttcctcatcggtatcatcgtagccaatgtgccggaaggtttgctggccactgtcacggtctgtctgacacttactgccaaacgcatggcaaggaaaaactgcttagtgaagaacttagaagctgtggagaccttggggtccacgtccaccatctgctctgataaaactggaactctgactcagaaccggatgacagtggcccacatgtggtttgacaatcaaatccatgaagctgatacgacagagaatcagagtggtgtctcttttgacaagacttcagctacctggcttgctctgtccagaattgcaggtctttgtaacagggcagtgtttcaggctaaccaggaaaacctacctattcttaagcgggcagttgcaggagatgcctctgagtcagcactcttaaagtgcatagagctgtgctgtggttccgtgaaggagatgagagaaagatacgccaaaatcgtcgagatacccttcaactccaccaacaagtaccagttgtctattcataagaaccccaacacatcggagccccaacacctgttggtgatgaagggcgccccagaaaggatcctagaccgttgcagctctatcctcctccacggcaaggagcagcccctggatgaggagctgaaagacgcctttcagaacgcctatttggagctggggggcctcggagaacgagtcctaggtttctgccacctctttctgccagatgaacagtttcctgaagggttccagtttgacactgacgatgtgaatttccctatcgataatctgtgctttgttgggctcatctccatgattgaccctccacgggcggccgttcctgatgccgtgggcaaatgtcgaagtgctggaattaaggtcatcatggtcacaggagaccatccaatcacagctaaagctattgccaaaggtgtgggcatcatctcagaaggcaatgagaccgtggaagacattgctgcccgcctcaacatcccagtcagccaggtgaaccccagggatgccaaggcctgcgtagtacacggcagtgatctaaaggacatgacctccgagcagctggatgacattttgaagtaccacactgagatagtgtttgccaggacctcccctcagcagaagctcatcattgtggaaggctgccaaagacagggtgctatcgtggctgtgactggtgacggtgtgaatgactctccagctttgaagaaagcagacattggggttgctatggggattgctggctcagatgtgtccaagcaagctgctgacatgattcttctggatgacaactttgcctcaattgtgactggagtagaggaaggtcgtctgatctttgataacttgaagaaatccattgcttataccttaaccagtaacattcccgagatcaccccgttcctgatatttattattgcaaacattccactaccactggggactgtcaccatcctctgcattgacttgggcactgacatggttcctgccatctccctggcttatgagcaggctgagagtgacatcatgaagagacagcccagaaatcccaaaacagacaaacttgtgaatgagcggctgatcagcatggcctatgggcagattggaatgatccaggccctgggaggcttctttacttactttgtgattctggctgagaacggcttcctcccaattcacctgttgggcctccgagtggactgggatgaccgctggatcaacgatgtggaagacagctacgggcagcagtggacctatgagcagaggaaaatcgtggagttcacctgccacacagccttcttcgtcagtatcgtggtggtgcagtgggccgacttggtcatctgtaagaccaggaggaattcggtcttccagcaggggatgaagaacaagatcttgatatttggcctctttgaagagacagccctggctgctttcctttcctactgccctggaatgggtgttgctcttaggatgtatcccctcaaacctacctggtggttctgtgccttcccctactctcttctcatcttcgtatatgacgaagtcagaaaactcatcatcaggcgacgccctggcggctgggtggagaaggaaacctactattagccccccgtcctgcacgccgtggagcatcaggccacacactctgcatccgacacccaccccctctttgtgtacttcagtcttggagtttggaactctaccctggtaggaaagcaccgcagcatgtggggaagcaagacgtcctggaatgaagcatgtagctctatggggggaggggggagggctgcctgaaaaccatccatctgtggaaatgacagcggggaaggtttttatgtgcctttttgtttttgtaaaaaaggaacacccggaaagactgaaagaatacattttatatctggatttttacaaataaagatggctattataatggaaaaaaaaaaaaaaa

SEQ ID NO: 1838 - DNA, 17689 bp, Homo sapiens
atgggtgccccgagcgcgtgccggacgctggtgttggctctggcggccatgctcgtggtgccgcaggcagagacccagggccctgtggagccgagctgggagaatgcagggcacaccatggatggcggtgccccgacgtcctcgcccacccggcgcgtgagctttgttccacccgtcactgtcttccccagcctgagccccctgaacccggcgcacaatgggcgggtgtgcagcacctggggtgacttccactacaagaccttcgacggcgacgtcttccgcttccctggcctttgcaactacgtgttctctgagcactgccgcgccgcctacgaggacttcaacgtccagctacgccgaggcctagtgggctccaggcctgtggtcacccgtgttgtcatcaaggcccaggggctggtgctggaggcgtccaacggctccgtcctcatcaatgggcagcgggaggagctgccttacagccgcactggcctcctggtggagcagagcggggactacatcaaggtcagcatccggctggtgctgacattcctgtggaacggagaggacagtgccctgctggagctggatcccaaatacgccaaccagacctgtggcctgtgtggggacttcaacggcctcccggccttcaacgagttctatgcccacaacgccaggctgaccccgctccagtttgggaacctgcagaagttggatgggcccacggagcagtgcccggacccgctgcccttgccggccggcaactgcacggacgaggagggcatctgccaccgcaccctgctggggccggcctttgcggagtgccacgcactggtggacagcactgcgtacctggccgcctgcgcccaggacctgtgccgctgccccacctgcccgtgtgccacctttgtggaatactcacgccagtgcgcccacgcggggggccagccgcggaactggaggtgccctgagctctgcccccggacctgccccctcaacatgcagcaccaggagtgtggctcaccctgcacggacacctgctccaacccccagcgcgcgcagctctgcgaggaccactgtgtggacggctgcttctgccccccaggcaggtcttgcacggtgctggatgacatcacgcactctggctgcctgcccctcgggcagtgcccctgcacccacggcggccgcacctacagcccgggcacctccttcaacaccacctgcagctcctgcacctgctccggggggctatggcagtgccaggacctgccgtgccctggcacctgctctgtgcagggcggggcccacatctccacctatgatgagaaactctacgacctgcatggtgactgcagctacgttctgtccaagaaatgtgccgacagcagcttcaccgtgctggctgagctgcggaagtgcggcctgacggacaacgagaactgcctgaaagcggtgacgctcagcctggacggcggggacacggccatccgggtccaagcggacggcggcgtgttcctcaactccatctacacgcagctgcccctgtcggcagccaacatcaccctgttcacaccctcgagcttcttcatcgtggtgcagacaggcctggggctgcagctgctggtgcagctggtgccactcatgcaggtgtttgtcaggctggaccccgcccaccagggccagatgtgcggcctgtgtgggaacttcaaccagaaccaggctgacgacttcacggccctcagcggggtggtggaggccacgggcgcagccttcgccaacacctggaaggcccaggctgcctgtgccaatgccaggaacagctttgaggacccctgctccctcagtgtggagaatgagaactacgcccggcactggtgctcgcgcctgaccgatcccaacagtgccttctcgcgctgccactccatcatcaaccccaagcccttccactcgaactgcatgtttgacacctgcaactgtgagcggagcgaggactgcctgtgcgccgcgctgtcctcctatgtgcacgcctgtgccgccaagggcgtacagctcagcgactggagggacggcgtctgcaccaagtacatgcagaactgccccaagtcccagcgctacgcctacgtggtggatgcctgccagcccacttgccgcggcctgagtgaggccgacgtcacctgcagcgtttccttcgtgcctgtggacggctgcacctgccccgcgggcaccttcctcaatgacgcgggcgcctgtgtgcccgcccaggagtgcccctgctacgctcacggcaccgtgctggctcctggagaggtggtgcacgacgagggcgccgtgtgttcatgtacgggtgggaagctaagctgcctgggagcctctctgcagaaaagcacagggtgtgcagcccccatggtgtacctggactgcagcaacagctcggcgggcacccctggggccgagtgcctccggagctgccacacgctggacgtgggctgtttcagcacacactgcgtgtccggctgtgtctgtcccccggggctggtgtcggatgggagtgggggctgcattgccgaggaggactgcccctgtgtgcacaacgaggccacctacaagcctggagagaccatcagggtcgactgcaacacctgcacctgcaggaaccggaggtgggagtgcagccaccggctctgcctgggcacctgcgtggcctacggggatggccacttcatcacctttgatggcgatcgctacagctttgaaggcagctgcgagtacatcttggcccaggactactgtggggacaacaccacccacgggaccttccgcatcgtcaccgagaacatcccctgtgggaccaccggcaccacctgctccaaggccatcaagctcttcgtggagagctacgagctgatcctccaagaggggacctttaaggcggtggcgagagggccgggtggggacccaccctacaagatacgctacatggggatcttcctggtcatcgagacccacgggatggccgtgtcctgggaccggaagaccagcgtgttcatccgactgcaccaggactacaagggcagggtctgcggcctgtgcgggaacttcgacgacaatgccatcaatgactttgccacgcgtagccggtccgtggtgggggacgcactggagtttgggaacagctggaagctctccccctcctgcccggacgccctggcacccaaggacccctgcacggccaaccccttccgcaagtcctgggcccagaagcagtgcagcatcctccacggccccaccttcgccgcctgccgctcccaggttgactccaccaagtactacgaggcctgcgtgaacgacgcgtgtgcctgcgactcgggtggcgactgcgagtgtttctgcacggctgtggctgcctacgcccaggcctgccacgacgcgggcctgtgtgtgtcctggcggactccggacacctgccccttgttctgtgacttctacaacccacatgggggctgtgagtggcactaccagccctgcggggcaccctgcctaaaaacctgccggaaccccagtgggcactgcctggtggacctgcctggcctggaaggctgctacccgaagtgcccacccagccagcccttcttcaatgaggaccagatgaagtgcgtggcccagtgtggctgctacgacaaggacggaaactactatgacgtcggtgcaagggtccccacagcggagaactgccagagctgtaactgcacacccagtggcatccagtgcgctcacagccttgaggcctgcacctgcacctatgaggacaggacctacagctaccaggacgtcatctacaacaccaccgatgggcttggcgcctgcttgatcgccatctgcggaagcaacggcaccatcatcaggaaggctgtggcatgtcctggaactccagccacaacgccattcaccttcaccaccgcctgggtcccccactccacgacaagcccggccctcccggtctccaccgtgtgtgtccgcgaggtctgccgctggtccagctggtacaatgggcaccgcccagagcccggcctgggaggcggagactttgagacgtttgaaaacctgaggcagagagggtaccaggtatgccctgtgctggctgacatcgagtgccgggcggcgcagcttcccgacatgccgctggaggagctgggccagcaggtggactgtgaccgcatgcgggggctgatgtgcgccaacagccaacagagtcccccgctctgtcacgactacgagctgcgggttctctgctgcgaatacgtgccctgtggcccctccccggccccaggcaccagccctcagccctccctcagtgccagcacggagcctgctgtgcctaccccaacccagaccacagcaaccgaaaagaccaccctatgggtgaccccgagcatccggtcgacggcggccctcacctcgcagactgggtccagctcaggccccgtgacggtcaccccctcggccccaggtaccaccacctgccagccccggtgtcagtggacagagtggtttgatgaggactaccccaagtctgaacaacttggaggggacgttgagtcctacgataagatcagggccgctggagggcacttatgccagcagcctaaggacatagagtgccaggccgagagcttccccaactggaccctggcacaggtggggcagaaggtgcactgtgacgtccacttcggcctggtgtgcaggaactgggagcaggagggcgtcttcaagatgtgctacaactacaggatccgggtcctctgctgcagtgacgaccactgcaggggacgtgccacaaccccgccaccgaccacagagctggagacggccaccaccaccaccacccaggccctgttctcaacgccgcagcctacgagtagcccggggctgaccagggctcccccggccagcaccacagcagtccccaccctctcagaaggactgacatcccccagatacacaagcacccttggtacagccaccacgggaggccccacgacgcctgcaggctccacagaacccactgtcccaggggtggccacatccacccttccaacacgctcagcccttccagggacgacggggagcttgggcacatggcgcccctcacagccacccacgctggccccaacaacaatggcaacctccagagctcgcccgacaggcacagccagcaccgcttccaaagagccgctgaccacgagcctggcgccaacactcacgagcgagctgtccacctctcaggccgagaccagcacgcccaggacagagacgacaatgagccccttgactaacaccaccaccagccagggcacgacccgctgtcaaccgaagtgtgagtggacagagtggtttgacgtggacttcccaacctcaggggttgcaggcggggacatggaaacttttgaaaacatcagggctgctgggggcaagatgtgctgggcaccaaagagcatagagtgccgggcggagaactaccccgaggtaagcatcgaccaggtcgggcaggtgctgacctgcagcctggagacggggctgacctgcaagaacgaagaccagacaggcaggttcaacatgtgcttcaactacaacgtgcgtgtgctttgctgtgacgactacagccactgccccagtaccccagccaccagctccacggccacgccctcctcaactccggggacgacctggatcctcacaaagccgaccacaacagccactacgactgcgtccactggatccacggccaccccgacctccaccctgagaacagctccccctcccaaagtgctgaccaccacggccaccacacccacagtcaccagctccaaagccactccctcctccagtccagggactgcaaccgcccttccagcactgagaagcacagccaccacacccacagctaccagcgttacacccatcccctcttcctccctgggcaccacctggacccgcctatcacagaccaccacacccacggccaccatgtccacagccacaccctcctccactccagagactgcccacacctccacagtgcttaccgccacggccaccacaactggggccaccggctctgtggccaccccctcctccaccccaggaacagctcacactaccaaagtgccaactaccacaaccacgggcttcacagccaccccctcctccagcccagggacggcactcacgcctccagtgtggatcagcacaaccaccacacccacaaccagaggctccacggtgaccccctcctccatcccggggaccacccacaccgccacagtgctgaccaccaccaccacaactgtggccactggttctatggcaacaccctcctctagcacacagaccagtggtactcccccatcactgaccaccacggccactacgatcacggccaccggctccaccaccaacccctcctcaactcctgggacaactcccatccccccagtgctgaccaccaccgccaccacacctgcagccaccagcaacacagtgactccctcctctgccctagggaccacccacacacccccagtgccgaacaccatggccaccacacacgggcgatccctgccccccagcagtccccacacggtgcgcacagcctggacttcggccacctcgggcatcttgggcaccacccacatcacagagccttccacggtgacttcccacaccctagcagcaaccaccggtaccacccagcactcgactccagccctttccagccctcaccctagcagcagaaccaccgagtcacccccttctccagggacgaccaccccgggccacaccacggccacctccaggaccacagccacggccacacccagcaagacccgcacctcgaccctgctgcccagcagccccacatcggcccccataaccacggtggtgaccatgggctgtgagccccagtgtgcctggtcagagtggctggactacagctaccccatgccggggccctctggcggggactttgacacctactccaacatccgtgcggccggaggggccgtctgtgagcagcccctgggcctcgagtgccgtgcccaggcccagcctggtgtccccctgcgggagttgggccaggtcgtggaatgcagcctggactttggcctggtctgcaggaaccgtgagcaggtggggaagttcaagatgtgcttcaactatgaaatccgtgtgttctgctgcaactacggccactgccccagcaccccggccaccagctctacggccatgccctcctccactccggggacgacctggatcctcacagagctgaccacaacagccactacgactgagtccactggatccacggccacccccactacagccaccgcaactgctggcaccccacatgtgagcaccacggccacgacacccacagtcaccagctccaaagccactcccttctccagtccagggactgcaaccgcccttccagcactgagaagcacagccaccacacccacagctaccagctttacagccatcccctcctcctccctgggcaccacctggacccgcctatcacagaccaccacacccacggccaccatgtccacagccacaccctcctccactccagagactgtccacacctccacagtgcttaccaccacggccaccacaaccggggccaccggctctgtggccaccccctcctccaccccaggaacagctcacactaccaaagtgctgactaccacaaccacgggcttcacagccaccccctcctccagcccagggacggcacgcacgcttccagtgtggatcagcacaaccaccacacccacaaccagaggttccacggtgaccccctcctccatcccggggaccacccacacccccacagtgctgaccaccaccaccacaactgtggccactggttctatggcaacaccctcctctagcacacagaccagtggtactcccccatcactgaccaccacggccactacgatcacggccaccggctccaccaccaacccctcctcaactccagggacaacacctatccccccagtgctgaccaccaccgccaccacacctgcagccaccagcagcacagtgactccctcctctgccctagggaccacccacacacccccagtgccgaacaccacggccaccacacacgggcgatccctgtcccccagcagtccccacacggtgcgcacagcctggacttcggccacctcaggcaccttgggcaccacccacatcacagagccttccacggggacttcccacaccccagcagcaaccaccggtaccacccagcactcgactccagccctgtccagccctcaccctagcagcaggaccaccgagtcacccccttctccagggacgaccaccccgggccacaccagggccacctccaggaccacggccacggccacacccagcaagacccgcacctcgaccctgctgcccagcagccccacatcggccccaataaccacggtggtgaccatgggctgtgagccccagtgtgcctggtcagagtggctggactacagctaccccatgccggggccctctggcggggactttgacacctactccaacatccgtgcggccggaggggccgtctgtgagcagcccctgggcctcgagtgccgtgcccaggcccagcctggtgtccccctgcgggagttgggccaggtcgtggaatgcagcctggactttggcctggtctgcaggaaccgtgagcaggtggggaagttcaagatgtgcttcaactatgaaatccgtgtgttctgctgcaactacggccactgccccagcaccccggccaccagctctacggccacgccctcctccactccagggacgacctggatcctcacagagcagaccacagcagccactacgaccgcaaccactggatccacggccatcccgtcctccaccccgggaacagctccccctcccaaagtgctgaccagcacggccaccacacccacagccaccagttccaaagccacttcctcctccagtccaaggactgcaaccacccttccagtgctgacaagcacagccaccaaatccacagctaccagctttacacccatcccctccttcacccttgggaccaccgggaccctcccagaacagaccaccacacccatggccaccatgtccacaatccacccctcctccactccggagaccacccacacctccacagtgctgaccacgaaggccaccacgacaagggccaccagttccatgtccaccccctcctccactccggggacgacctggatcctcacagagctgaccacagcagccactacaactgcagccactggccccacggccaccccgtcctccaccccagggaccacctggatcctcacagagcccagcactacagccaccgtgacggtgcccaccggatccacggccaccgcctcctccacccgggcaactgctggcaccctcaaagtgctgaccagcacggccaccacacccacagtcatcagctccagagccactccctcctccagtccagggactgcaaccgcccttccagcactgagaagcacagccaccacacccacagctaccagcgttacagccatcccctcttcctccctgggcaccgcctggacccgcctatcacagaccaccacacccacggccaccatgtccacagccacaccctcctctactccagagactgtccacacctccacagtgcttaccaccacgaccaccacaaccagggccaccggctctgtggccaccccctcctccaccccaggaacagctcacactaccaaagtgccgactaccacaaccacgggcttcacagccaccccctcctccagcccagggacggcactcacgcctccagtgtggatcagcacaaccaccacacccacaaccagaggctccacggtgaccccctcctccatcccggggaccacccacaccgccacagtgctgaccaccaccaccacaactgtggccactggttctatggcaacaccctcctctagcacacagaccagtggtactcccccatcactgaccaccacggccactacgatcacagccaccggctccaccaccaacccctcctcaactccagggacaactcccatccccccagtgctgaccaccaccgccaccacacctgcagccaccagcagcacagtgactccctcctctgccctagggaccacccacacacccccagtgccgaacaccacggccaccacacacgggcggtccctgccccccagcagtccccacacggtgcgcacagcctggacttcggccacctcgggcatcttgggcaccacccacatcacagagccttccacggtgacttcccacaccccagcagcaaccaccagtaccacccagcactcgactccagccctgtccagccctcaccctagcagcaggaccaccgagtcacccccttctccagggacgaccaccccgggccacaccaggggcacctccaggaccacagccacagccacacccagcaagacccgcacctcgaccctgctgcccagcagccccacatcggcccccataaccacggtggtgaccacgggctgtgagccccagtgtgcctggtcagagtggctggactacagctaccccatgccggggccctctggcggggactttgacacctactccaacatccgtgcggccggaggggcagtctgtgagcagcccctgggcctcgagtgccgtgcccaggcccagcctggtgtccccctgcgggagttgggccaggtcgtggaatgcagcctggactttggcctggtctgcaggaaccgtgagcaggtggggaagttcaagatgtgcttcaactatgaaatccgtgtgttctgctgcaactacggccactgccccagcaccccggccaccagctctacggccacgccctcctcaactccggggacgacctggatcctcacaaagctgaccacaacagccactacgactgagtccactggatccacggccaccccgtcctccaccccaggggcaactgctggcaccccacatgtgagcaccacggccacgacacccacagtcaccagctccaaagccactcccttctccagtccagggactgcaaccgcccttccagcactgagaagcacagccaccacacccacagctaccagctttacagccatcccctcctcctccctgggcaccacctggacccgcctatcacagaccaccacacccacggccaccatgtccacagccacaccctcctccactccagagactgcccacacctccacagtgcttaccaccacggccaccacaaccagggccaccggctctgtggccaccccctcttccaccccaggaacagctcacactaccaaagtgccgactaccacaaccacgggcttcacagtcaccccctcctccagcccagggacggcacgcacgcctccagtgtggatcagcacaaccaccacacccacaaccagtggctccacggtgaccccctcctccgtcccggggaccacccacacccccacagtgctgaccaccaccaccacaactgtggccactggttctatggcaacaccctcctctagcacacagaccagtggtactcccccatcactgatcaccacggccactacgatcacggccaccggctccaccaccaacccctcctcaactccagggacaacacctatccccccagtgctgaccaccaccgccaccacacctgcagccaccagcagcacagtgactccctcctctgccctagggaccacccacacacccccagtgccgaacaccacggccaccacacacgggcgatccctgtcccccagcagtccccacacggtgcgcacagcctggacttcggccacctcaggcaccttgggcaccacccacatcacagagccttccacggggacttcccacaccccagcagcaaccaccggtaccacccagcactcgactccagccctgtccagccctcaccctagcagcaggaccaccgagtcacccccttccccagggacgaccaccccgggccacaccacggccacctccaggaccacggccacggccacacccagcaagacccgcacctcgaccctgctgcccagcagccccacatcggcccccataaccacggtggtgaccacgggctgtgagccccagtgtgcctggtcagagtggctggactacagctaccccatgccggggccctctggcggggactttgacacctactccaacatccgtgcggccggaggggccgtctgtgagcagcccctgggcctcgagtgccgtgcccaggcccagcctggtgtccccctgggggagttgggccaggtcgtggaatgcagcctggactttggcctggtctgcaggaaccgtgagcaggtggggaagttcaagatgtgcttcaactatgaaatccgtgtgttctgctgcaactacggccactgccccagcaccccggccaccagctctacggccatgccctcctccactccggggacgacctggatcctcacagagctgaccacaacagccactacgactgcatccactggatccacggccaccccgtcctccaccccgggaacagctccccctcccaaagtgctgaccagcccggccaccacacccacagccaccagttccaaagccacttcctcctccagtccaaggactgcaaccacccttccagtgctgacaagcacagccaccaaatccacagctaccagcgttacacccatcccctcctccacccttgggaccaccgggaccctcccagaacagaccaccacacccgtggccaccatgtccacaatccacccctcctccactccggagaccacccacacctccacagtgctgaccacgaaggccaccacgacaagggccaccagttccacgtccaccccctcctccactccggggacgacctggatcctcacagagctgaccacagcagccactacaactgcagccactggccccacggccaccccgtcctccaccccagggaccacctggatcctcacagagctgaccacaacagccactacgactgcgtccactggatccacggccaccccgtcctccaccccagggaccacctggatcctcacagagccgagcactacagccaccgtgacggtgcccaccggatccacggccaccgcctcctccacccaggcaactgctggcaccccacatgtgagcaccacggccacgacacccacagtcaccagctccaaagccactccctcctccagtccagggactgcaactgcccttccagcactgagaagcacagccaccacacccacagctaccagctttacagccatcccctcctcctccctgggcaccacctggacccgcctatcacagaccaccacacccacggccaccatgtccacagccacaccctcctccactccagagactgtccacacctccacagtgcttaccgccacggccaccacaaccggggccaccggctctgtggccaccccctcctccaccccaggaacagctcacactaccaaagtgccgactaccacaaccacgggcttcacagccaccccctcctccagcccagggacggcactcacgcctccagtgtggatcagcacaaccaccacacccacaaccaccacacccacaaccagtggctccacggtgaccccctcctccatcccggggaccacccacaccgccagagtgctgaccaccaccaccacaactgtggccactggttctatggcaacaccctcctctagcacacagaccagtggtactcccccatcactgaccaccacggccactacgatcacggccaccggctccaccaccaacccctcctcaactccagggacaacacccatcaccccagtgctgaccagcacggccaccacacccgcagccaccagctccaaagccacttcctcctccagtccaaggactgcaaccacccttccagtgctgacaagcacagccacaaaatccacagctaccagctttacacccatcccctcctccaccctgtggaccacgtggaccgtcccagcacagaccaccacacccatgtccaccatgtccacaatccacacctcctctactccagagaccacccacacctccacagtgctgaccaccacagccaccatgacaagggccaccaattccacggccacaccctcctccactctggggacgacccggatcctcactgagctgaccacaacagccactacaactgcagccactggatccacggccaccctgtcctccaccccagggaccacctggatcctcacagagccgagcactatagccaccgtgatggtgcccaccggttccacggccaccgcctcctccactctgggaacagctcacacccccaaagtggtgaccaccatggccactatgcccacagccactgcctccacggttcccagctcgtccaccgtggggaccacccgcacccctgcagtgctccccagcagcctgccaaccttcagcgtgtccactgtgtcctcctcagtcctcaccaccctgagacccactggcttccccagctcccacttctctactccctgcttctgcagggcatttggacagtttttctcgcccggggaagtcatctacaataagaccgaccgagccggctgccatttctacgcagtgtgcaatcagcactgtgacattgaccgcttccagggcgcctgtcccacctccccaccgccagtgtcctccgccccgctgtcctcgccctcccctgcccctggctgtgacaatgccatccctctccggcaggtgaatgagacctggaccctggagaactgcacggtggccaggtgcgtgggtgacaaccgtgtcgtcctgctggacccaaagcctgtggccaacgtcacctgcgtgaacaagcacctgcccatcaaagtgtcggacccgagccagccctgtgacttccactatgagtgcgagtgcatctgcagcatgtggggcggctcccactattccacctttgacggcacctcttacaccttccggggcaactgcacctatgtcctcatgagagagatccatgcacgctttgggaatctcagcctctacctggacaaccactactgcacggcctctgccactgccgctgccgcccgctgcccccgcgccctcagcatccactacaagtccatggatatcgtcctcactgtcaccatggtgcatgggaaggaggagggcctgatcctgtttgaccaaattccggtgagcagcggtttcagcaagaacggcgtgcttgtgtctgtgctggggaccaccaccatgcgtgtggacattcctgccctgggcgtgagcgtcaccttcaatggccaagtcttccaggcccggctgccctacagcctcttccacaacaacaccgagggccagtgcggcacctgcaccaacaaccagagggacgactgtctccagcgggacggaaccactgccgccagttgcaaggacatggccaagacgtggctggtccccgacagcagaaaggatggctgctgggccccgactggcacaccccccactgccagccccgcagccccggtgtctagcacacccacccccaccccatgcccaccacagccgctctgtgatctgatgctgagccaggtctttgctgagtgccacaaccttgtgcccccgggcccattcttcaacgcctgcatcagcgaccactgcaggggccgccttgaggtgccctgccagagcctggaggcttacgcagagctctgccgcgcccggggagtgtgcagtgactggcgaggtgcaaccggtggcctgtgcgacctcacctgcccacccaccaaagtgtacaagccatgcggccccatacagcctgccacctgcaactctaggaaccagagcccacagctggaggggatggcggagggctgcttctgccctgaggaccagatcctcttcaacgcacacatgggcatctgcgtgcaggcctgcccctgcgtgggacccgatgggtttcctaaatttcccggggagcggtgggtcagcaactgccagtcctgcgtgtgtgacgagggttcagtgtcggtgcagtgcaagcccctgccctgtgacgcccagggtcagcccccgccgtgcaaccgtcccggcttcgtaaccgtgaccaggccccgggccgagaacccctgctgccccgagacggtgtgcgtgtgcaacacaaccacctgcccccagagcctgcctgtgtgcccgccagggcaggagtccatctgcacccaggaggagggcgactgctgtcccaccttccgctgcagacctcagctgtgttcgtacaatggcaccttctacggggttggtgcaaccttcccaggcgcccttccctgccacatgtgtacctgcctctctggggacacccaggacccaacggtgcaatgtcaggaggatgcctgcaacaatactacctgtccccagggctttgagtacaagagagtggccgggcagtgctgtggggagtgcgtccagaccgcctgcctcacgcccgatggccagccagtccagctgaatgaaacctgggtcaacagccatgtggacaactgcaccgtgtacctctgtgaggctgagggtggagtccatttgctgaccccacagcctgcatcctgcccagatgtgtccagctgcagggggagcctcaggaaaaccggctgctgctactcctgtgaggaggactcctgtcaagtccgcatcaacacgaccatcctgtggcaccagggctgcgagaccgaggtcaacatcaccttctgcgagggctcctgccccggagcgtccaagtactcagcagaggcccaggccatgcagcaccagtgcacctgctgccaggagaggcgggtccacgaggagacggtgcccttgcactgtcctaacggctcagccatcctgcacacctacacccacgtggatgagtgtggctgcacgcccttctgtgtccctgcgcccatggctcccccacacacccgtggcttcccggcccaggaggccactgctgtctgagaacgttctgcctccatccccatgctctgtccacctggagccaggatgtgcattgtctgatcatgaaaaccttgggcctcctctgcggagccccccggcctgtgtgtggcaccccgcgctccgtgctcctgctgcccaccccgtgggtgaaaccggccccagaagggtgaggggccagcaggacccctttcgggagggcgccactcaggagtcctaccctgggagagcctgtggcccaccttggccttgcccctccctgatgtcactgggacgccctggaacaaactaagcatgtgcgggcctatgtgtccctgccacggccggagcgcccgcgcagcacggattccagctggccacgtccggccgctggggcagacaggctggtccaggcaaggccagctgctgccaggaagctgcgacaggcaaggcggccgcctgtccatgcctgctgcagggtaactcagggctgaggtcgcaacggccaggtcagagaggggtcagcatcccaaagccccctctgctcaacccagcccagttttgcaaataaaccctgagcattgag

SEQ ID NO: 1839 - DNA, 1515 bp, Homo sapiens
aagtttttctcttcagtgacagacacagacatagaacattcacgatgtacttgggactgaactatgtattcatagtttttctcttaaatggtgtccagagtgaagtgaagcttgaggagtctggaggaggcttggtgcaacctggaggatccatgaaactctcttgtgctgcctctggattcacttttagtgacgcctggatggactgggtccgccagtctccagagaaggggcttgagtgggttgctgaaattggaaacaaaggtaataatcatgcaacgtactatgctgagtctgtgaaagggaggttcaccgtctcaagagatgattccaaaagtagagtctacctgcaaatgaacagcttaagagttgaagacactggcacttattactgtaccacgcggtttgcttactggggccaagggactctggtcactgtctctgcagccaaaacgacacccccatctgtctatccactggcccctggatctgctgcccaaactaactccatggtgaccctgggatgcctggtcaagggctatttccctgagccagtgacagtgacctggaactctggatccctgtccagcggtgtgcacaccttcccagctgtcctgcagtctgacctctacactctgagcagctcagtgactgtcccctccagcacctggcccagcgagaccgtcacctgcaacgttgcccacccggccagcagcaccaaggtggacaagaaaattgtgcccagggattgtggttgtaagccttgcatatgtacagtcccagaagtatcatctgtcttcatcttccccccaaagcccaaggatgtgctcaccattactctgactcctaaggtcacgtgtgttgtggtagacatcagcaaggatgatcccgaggtccagttcagctggtttgtagatgatgtggaggtgcacacagctcagacgcaaccccgggaggagcagttcaacagcactttccgctcagtcagtgaacttcccatcatgcaccaggactggctcaatggcaaggagttcaaatgcagggtcaacagtgcagctttccctgcccccatcgagaaaaccatctccaaaaccaaaggcagaccgaaggctccacaggtgtacaccattccacctcccaaggagcagatggccaaggataaagtcagtctgacctgcatgataacagacttcttccctgaagacattactgtggagtggcagtggaatgggcagccagcggagaactacaagaacactcagcccatcatggacacagatggctcttacttcgtctacagcaagctcaatgtgcagaagagcaactgggaggcaggaaatactttcacctgctctgtgttacatgagggcctgcacaaccaccatactgagaagagcctctcccactctcctggtaaatgatcccagtgtccttggagccctctggtccatcaggactctgacacctacctccacccctccctgtataaataaaagagcccagcactgccttggg

SEQ ID NO: 1840 - DNA, 2930 bp, Homo sapiens
tggccgcgactgcgcgcagacactgaccttcagcgcctcggctccagcgccatggcgccctccaggaagttcttcgttgggggaaactggaagatgaacgggcggaagcagagtctgggggagctcatcggcactctgaacgcggccaaggtgccggccgacaccggtaagccctcgccgaggaggggtctggccgggccggggccggggccggggcaggagtggcagcgccctctcccgaggccccgaggccccgaggccggtatccgcgcggacctgatgcagggctgtgggacgagggccgctggggtccgggcaggggcctcgcagccgcagccccgtcggtgcgtcgagggggcagggcggagcacatgatgccccttggactatggggcaggtaaggacgttttgggtctcctggaggaaggtggccccggggcgcgcactggggctgtgcccgccaggcgacggggttaggagcggagcccgaggctctgcgggagaccgggggaggctgggccgcgtgggcttcccgctccctgcgccctggcctcccgcgccgtgcgccgccgcacgtagccccagactcctccccttcctcgccggcgtccgcgtccccgcgccgagctgctcgggctccctgagcccccagatctgaccccttcccttcggcaacctgaacgactcccgccttccacggaagggaccgagcccgtgccaaacaggctgagcgatttgggagtgaggagccatcctaccgctttccccaacctggaaacagcaaagcgcaaggcctctgagtcagttaggtctctgccacccacgggcaaaggatgctctcctccatcctccttcctccctccaccgaaatcggagagccgcgggcctgatccaaagaggcatccccttctcgttcattccccagaggcctcaatacaaaccccaggagttggcccctctccttttgctacaaatccttgccttgcaaaggggaggtgaggatgggctattttagaagggaagcagggttgctccctggagaatgctgagtctgtgaggtgcctatgccgagaatagctcgaggaaattggagccccagctgttaaaagagcagagggcagggtgagggccgtggcctctcaggggtatctggaaggctcttcgagttgagtgcagacccagcctgggctggaaaatggacaaaggtcatcttgctggggtgaaaagggggagagcagaaccaagaagaagagggtgagggctggggggctccagggcactggttaggaattgtggggaatgaaggctttctttagtctcatccccctgtggtaccatcttgtcctcagaggtggtttgtgctccccctactgcctatatcgacttcgcccggcagaagctagatcccaagattgctgtggctgcgcagaactgctacaaagtgactaatggggcttttactggggagatcagccctggcatgatcaaagactgcggagccacgtgggtggtcctggggcactcagagagaaggcatgtctttggggagtcagatgaggttagtagccaagagagaagataagggatgtctttttccaagaaggatgtctcaccaagtctgtttctcaacagctgattgggcagaaagtggcccatgctctggcagagggactcggagtaatcgcctgcattggggagaagctagatgaaagggaagctggcatcactgagaaggttgttttcgagcagacaaaggtcatcgcaggtatctctggagaaagggacctttgagcctatccagggccacagagactcagagggtagggtcaggccctggagcctgtcttggtccccatgctgatccagaaaaggaaaaaggggagggggagtgacaatctttgcttggggcctatgacttctccagccccaaggtagatgccacctggaaatcccccaatgtccactagggggcagtaggccaccgttcttcgtactccggagaacctggctggagagctctttcttgttcacccttccctccatctgtatctctgccctgcagataacgtgaaggactggagcaaggtcgtcctggcctatgagcctgtgtgggccattggtactggcaagactgcaacaccccaacaggcccaggaagtacacgagaagctccgaggatggctgaagtccaacgtctctgatgcggtggctcagagcacccgtatcatttatggaggctctgtgactggggcaacctgcaaggagctggccagccagcctgatgtggatggcttccttgtgggtggtgcttccctcaagcccgaattcgtggacatcatcaatgccaaacaatgagccccatccatcttccctacccttcctgccaagccagggactaagcagcccagaagcccagtaactgccctttccctgcatatgcttctgatggtgtcatctgctccttcctgtggcctcatccaaactgtatcttcctttactgtttatatcttcaccctgtaatggttgggaccaggccaatcccttctccacttactataatggttggaactaaacgtcaccaaggtggcttctccttggctgagagatggaaggcgtggtgggatttgctcctgggttccctaggccctagtgagggcagaagagaaaccatcctctcccttcttacaccgtgaggccaagatcccctcagaaggcaggagtgctgccctctcccatggtgcccgtgcctctgtgctgtgtatgtgaaccacccatgtgagggaataaacctggcactaggtcttgtggtttgtctgccttcactggacttgcccagataatcttcctttttgaggcagctatataaatgatcatttgtgcaagaaaaaaaaaaaaacaagaacaggtttctataacaacatctcttacta

SEQ ID NO: 1841 - DNA, 1665 bp, Homo sapiens
tcccacagttggagaggggccctctctgccccagtgggcgatctgggctacggccaagttgccaccagctagttccgcttgaaaaccacttctggccccgtgggggactcaagtcgccaagcgagggttcccctgagcgccggagctcacaggtctcgccttgtcccgaaagccccgcaatcgaggcggaggcgaccgagcccccgactctcctagaacgttgccacaagaagggggaacgtcggaacagtgcatcatcgggcggcggccggggcggcggcaggagggcgggcggggggcagggctccgggggactgggcgggccatggcggaggacggcgaggaggcggagttccacttcgcggcgctctatataagtgggcagtggccgcgactgcgcgcagacactgaccttcagcgcctcggctccagcgccatggcgccctccaggaagttcttcgttgggggaaactggaagatgaacgggcggaagcagagtctgggggagctcatcggcactctgaacgcggccaaggtgccggccgacaccgaggtggtttgtgctccccctactgcctatatcgacttcgcccggcagaagctagatcccaagattgctgtggctgcgcagaactgctacaaagtgactaatggggcttttactggggagatcagccctggcatgatcaaagactgcggagccacgtgggtggtcctggggcactcagagagaaggcatgtctttggggagtcagatgagctgattgggcagaaagtggcccatgctctggcagagggactcggagtaatcgcctgcattggggagaagctagatgaaagggaagctggcatcactgagaaggttgttttcgagcagacaaaggtcatcgcagataacgtgaaggactggagcaaggtcgtcctggcctatgagcctgtgtgggccattggtactggcaagactgcaacaccccaacaggcccaggaagtacacgagaagctccgaggatggctgaagtccaacgtctctgatgcggtggctcagagcacccgtatcatttatggaggctctgtgactggggcaacctgcaaggagctggccagccagcctgatgtggatggcttccttgtgggtggtgcttccctcaagcccgaattcgtggacatcatcaatgccaaacaatgagccccatccatcttccctacccttcctgccaagccagggactaagcagcccagaagcccagtaactgccctttccctgcatatgcttctgatggtgtcatctgctcctttctccacttactataatggttggaactaaacgtcaccaaggtggcttctccttggctgagagatggaaggcgtggtgggatttgctcctgggttccctaggccctagtgagggcagaagagaaaccatcctctcccttcttacaccgtgaggccaagatcccctcagaaggcaggagtgctgccctctcccatggtgcccgtgcctctgtgctgtgtatgtgaaccacccatgtgagggaataaacctggcactaggtcttgtggtttgtctgccttcactggacttgcccagataatcttcctttttgaggcagctatataaatgatcatttgtgcaagaaaaaaaaaaaaacaagaacaggtttctat

SEQ ID NO: 1842 - DNA, 1761 bp, Homo sapiens
tcccacagttggagaggggccctctctgccccagtgggcgatctgggctacggccaagttgccaccagctagttccgcttgaaaaccacttctggccccgtgggggactcaagtcgccaagcgagggttcccctgagcgccggagctcacaggtctcgccttgtcccgaaagccccgcaatcgaggcggaggcgaccgagcccccgactctcctagaacgttgccacaagaagggggaacgtcggaacagtgcatcatcgggcggcggccggggcggcggcaggagggcgggcggggggcagggctccgggggactgggcgggccatggcggaggacggcgaggaggcggagttccacttcgcggcgctctatataagtgggcagtggccgcgactgcgcgcagacactgaccttcagcgcctcggctccagcgccatggcgccctccaggaagttcttcgttgggggaaactggaagatgaacgggcggaagcagagtctgggggagctcatcggcactctgaacgcggccaaggtgccggccgacaccgaggtggtttgtgctccccctactgcctatatcgacttcgcccggcagaagctagatcccaagattgctgtggctgcgcagaactgctacaaagtgactaatggggcttttactggggagatcagccctggcatgatcaaagactgcggagccacgtgggtggtcctggggcactcagagagaaggcatgtctttggggagtcagatgagctgattgggcagaaagtggcccatgctctggcagagggactcggagtaatcgcctgcattggggagaagctagatgaaagggaagctggcatcactgagaaggttgttttcgagcagacaaaggtcatcgcagataacgtgaaggactggagcaaggtcgtcctggcctatgagcctgtgtgggccattggtactggcaagactgcaacaccccaacaggcccaggaagtacacgagaagctccgaggatggctgaagtccaacgtctctgatgcggtggctcagagcacccgtatcatttatggaggctctgtgactggggcaacctgcaaggagctggccagccagcctgatgtggatggcttccttgtgggtggtgcttccctcaagcccgaattcgtggacatcatcaatgccaaacaatgagccccatccatcttccctacccttcctgccaagccagggactaagcagcccagaagcccagtaactgccctttccctgcatatgcttctgatggtgtcatctgctccttcctgtggcctcatccaaactgtatcttcctttactgtttatatcttcaccctgtaatggttgggaccaggccaatcccttctccacttactataatggttggaactaaacgtcaccaaggtggcttctccttggctgagagatggaaggcgtggtgggatttgctcctgggttccctaggccctagtgagggcagaagagaaaccatcctctcccttcttacaccgtgaggccaagatcccctcagaaggcaggagtgctgccctctcccatggtgcccgtgcctctgtgctgtgtatgtgaaccacccatgtgagggaataaacctggcactaggtcttgtggtttgtctgccttcactggacttgcccagataatcttcctttttgaggcagctatataaatgatcatttgtgcaagaaaaaaaaaaaaacaagaacaggtttctataacaacatctcttacta

SEQ ID NO: 1843 - DNA, 3345 bp, Homo sapiens
caggaagcgcagcaactcgtgtctgagcgcccggcggaaaaccgaagttggaagtgtctcttagcagcgcgcggagaagaacggggagccagcatcatggcagaacaggatgtggaaaacgatcttttggattacgatgaagaggaagagccccaggctcctcaagagagcacaccagctccccctaagaaagacatcaagggatcctacgtttccatccacagctctggcttccgggactttctgctgaagccggagctcctgcgggccatcgtggactgtggctttgagcatccttctgagggtacgccttctgggtgttatcctcttgcccaggtcctcaccaagacaagaccagccctgcccgcccagagcggtgccgcctccagtttgccgtgggtgagggaggggcccgtctgtcccgcggatcagttgtgcccagcggggcctgtggctgccctcggcagtggggcgttctgctttgaccaggcggataccccagccctgcaggtgtctgtggccttgtccggactcggcctcttctgattgccctcactgtgggcccccggtcaactggtgaggatcctgcacgggggtgcatccaggttctcgtccctcacgctctgcttctcctgcagtccagcatgagtgcattccccaggccatcctgggcatggacgtcctgtgccaggccaagtccgggatgggcaagacagcggtcttcgtgctggccaccctacagcagattgagcctgtcaacggacaggtgacggtcctggtcatgtgccacacgagggagctggccttccagatcagcaaggaatatgagcgcttttccaagtacatgcccagcgtcaaggtgagtccctcgggccagactggaccaggcgccacttggtttctgcagctttgttagcctcggctctggcccagccagcatttaccaagcttggcaggggcagctgcctttgaggtttgcggtggtttttgctccttaaaagcctgatgaattatgcatggctcccaggggcctgcgcaggtcccagcctggggctgcctttgagtggagccccgggaggctctcaggcctgccttggtcccctgaggcctcctgttcgcaggtgctgggccgtgcaggttggggccttgggccgtgtatcagcatggagcggtttcctcctcatccccataggtgtctgtgttcttcggtggtctctccatcaagaaggatgaagaagtgttgaagaagaactgtccccatgtcgtggtggggaccccgggccgcatcctggcgctcgtgcggaataggagcttcagcctaaagaatgtgaagcactttgtgctggacgagtgtgacaagatgctggagcagctgggtgagtcctctgcccttgcagccccagctgagagtcagtgactaggcgggccccatagcaggcggaaggctcttgagtgggttacatgggcggccggcaggcggggctcctgtggtgatcttggggaaagctctgctgctggcagagggatgtgctgtttctgagcccgagccgaatgggaccacggggcccaagcaagcccccgtccctcctggacgtaaaggcatgcacacatacctctgggagtatgaggcttctgccacctgttgggttggttccaggccccgcctgccctcagtgagccccgacagggccggtgggagatgggcttgtgtcctgggaggcagctgcagctctcaccccagcggctgtctctgcctcaggctcccctccctgaagcgtggctcgaggcgcacgggcacggctgctccgcgccagcgtgtaagtggattgcagctcctcccgcgcctgcgctcgctggccaccccccagcccctcaggcaccaggactggccactcccgcggctcactctgccctcgtcacggtgccactggctccctggcacaggttgggaggggtctgggtctggtctggggtgggggtcctgcatggcagacgctcatgcccacccatgtcttgccctccccacctagacatgcggcgggatgtgcaggagatcttccgcctgacaccacacgagaagcagtgcatgatgttcagcgccaccctgagcaaggacatccggcctgtgtgcaggaagttcatgcaggatgtgagtagggcgagagtggcagctttggccttccccaggggcctggagcctggggccccaggacacccgcacggcccacatggcacggaggatgctgggatgctgggagccggcggagcctcctttcctcccctcggtcttgtcaaactgggagtcaagcttggtccacacctgagtcgggccagagcttacatccagcttttgagcgatgtttactgaggtctggtgcagcaggtcctctgggaagtgtcgcacaaaggagtcgcccactggaaggttctgggcaggcgagatgcccagaggtgatccctgcccgcccctcccacctcccttcccacacagcccatggaggtgtttgtggacgacgagaccaagctcacgctgcacggcctgcagcagtactacgtcaaactcaaagacagtgagaagaaccgcaagctctttgatctcttggatgtgctggagtttaaccaggtgatacttccatcagcctgtcctggggctcaggaccttcgggaggtcactgggccacagggactgtgtggccctgactgccactccttccctcaggtgataatcttcgtcaagtcagtgcagcgctgcatggccctggcccagctcctcgtggagcagaacttcccggccatcgccatccaccggggcatggcccaggaggagcggtgagtgcgagccgcccgccaaggctgcagggagcaccaccaggagcccagtgtctgacggcctccacttgtttctcctgcaccccagcctgtcacgctatcagcagttcaaggatttccagcggcggatcctggtggccaccaatctgtttggccgggggatggacatcgagcgagtcaacatcgtctttaactacgacatgcctgaggactcggacacctacctgcaccgggtggcccgggcgggtcgctttggcaccaaaggcctagccatcacttttgtgtctgacgagaatgatgccaaaatcctcaatgacgtccaggaccggtttgaagttaatgtggcagaacttccagaggaaatcgacatctccacatacatcgagcagagccggtaaccaccacgtgccagagccgcccacccggagccgcccgcatgcagcttcacctcccctttccaggcgccactgttgagaagctagagattgtatgagaataaacttgttattatggaag

SEQ ID NO: 1844 - DNA, 1498 bp, Homo sapiens
caggaagcgcagcaactcgtgtctgagcgcccggcggaaaaccgaagttggaagtgtctcttagcagcgcgcggagaagaacggggagccagcatcatggcagaacaggatgtggaaaacgatcttttggattacgatgaagaggaagagccccaggctcctcaagagagcacaccagctccccctaagaaagacatcaagggatcctacgtttccatccacagctctggcttccgggactttctgctgaagccggagctcctgcgggccatcgtggactgtggctttgagcatccttctgaggtccagcatgagtgcattccccaggccatcctgggcatggacgtcctgtgccaggccaagtccgggatgggcaagacagcggtcttcgtgctggccaccctacagcagattgagcctgtcaacggacaggtgacggtcctggtcatgtgccacacgagggagctggccttccagatcagcaaggaatatgagcgcttttccaagtacatgcccagcgtcaaggtgtctgtgttcttcggtggtctctccatcaagaaggatgaagaagtgttgaagaagaactgtccccatgtcgtggtggggaccccgggccgcatcctggcgctcgtgcggaataggagcttcagcctaaagaatgtgaagcactttgtgctggacgagtgtgacaagatgctggagcagctggacatgcggcgggatgtgcaggagatcttccgcctgacaccacacgagaagcagtgcatgatgttcagcgccaccctgagcaaggacatccggcctgtgtgcaggaagttcatgcaggatcccatggaggtgtttgtggacgacgagaccaagctcacgctgcacggcctgcagcagtactacgtcaaactcaaagacagtgagaagaaccgcaagctctttgatctcttggatgtgctggagtttaaccaggtgataatcttcgtcaagtcagtgcagcgctgcatggccctggcccagctcctcgtggagcagaacttcccggccatcgccatccaccggggcatggcccaggaggagcgcctgtcacgctatcagcagttcaaggatttccagcggcggatcctggtggccaccaatctgtttggccgggggatggacatcgagcgagtcaacatcgtctttaactacgacatgcctgaggactcggacacctacctgcaccgggtggcccgggcgggtcgctttggcaccaaaggcctagccatcacttttgtgtctgacgagaatgatgccaaaatcctcaatgacgtccaggaccggtttgaagttaatgtggcagaacttccagaggaaatcgacatctccacatacatcgagcagagccggtaaccaccacgtgccagagccgcccacccggagccgcccgcatgcagcttcacctcccctttccaggcgccactgttgagaagctagagattgtatgagaataaacttgttattatggaag

SEQ ID NO: 1845 - DNA, 1770 bp, Homo sapiens
caggaagcgcagcaactcgtgtctgagcgcccggcggaaaaccgaagttggaagtgtctcttagcagcgcgcggagaagaacggggagccagcatcatggcagaacaggatgtggaaaacgatcttttggattacgatgaagaggaagagccccaggctcctcaagagagcacaccagctccccctaagaaagacatcaagggatcctacgtttccatccacagctctggcttccgggactttctgctgaagccggagctcctgcgggccatcgtggactgtggctttgagcatccttctgaggtccagcatgagtgcattccccaggccatcctgggcatggacgtcctgtgccaggccaagtccgggatgggcaagacagcggtcttcgtgctggccaccctacagcagattgagcctgtcaacggacaggtgacggtcctggtcatgtgccacacgagggagctggccttccagatcagcaaggaatatgagcgcttttccaagtacatgcccagcgtcaaggtgtctgtgttcttcggtggtctctccatcaagaaggatgaagaagtgttgaagaagaactgtccccatgtcgtggtggggaccccgggccgcatcctggcgctcgtgcggaataggagcttcagcctaaagaatgtgaagcactttgtgctggacgagtgtgacaagatgctggagcagctggacatgcggcgggatgtgcaggagatcttccgcctgacaccacacgagaagcagtgcatgatgttcagcgccaccctgagcaaggacatccggcctgtgtgcaggaagttcatgcaggatgtgagtagggcgagagtggcagctttggccttccccaggggcctggagcctggggccccaggacacccgcacggcccacatggcacggaggatgctgggatgctgggagccggcggagcctcctttcctcccctcggtcttgtcaaactgggagtcaagcttggtccacacctgagtcgggccagagcttacatccagcttttgagcgatgtttactgaggtctggtgcagcaggtcctctgggaagtgtcgcacaaaggagtcgcccactggaaggttctgggcaggcgagatgcccagaggtgatccctgcccgcccctcccacctcccttcccacacagcccatggaggtgtttgtggacgacgagaccaagctcacgctgcacggcctgcagcagtactacgtcaaactcaaagacagtgagaagaaccgcaagctctttgatctcttggatgtgctggacagaacttcccggccatcgccatccaccggggcatggcccaggaggagcgcctgtcacgctatcagcagttcaaggatttccagcggcggatcctggtggccaccaatctgtttggccgggggatggacatcgagcgagtcaacatcgtctttaactacgacatgcctgaggactcggacacctacctgcaccgggtggcccgggcgggtcgctttggcaccaaaggcctagccatcacttttgtgtctgacgagaatgatgccaaaatcctcaatgacgtccaggaccggtttgaagttaatgtggcagaacttccagaggaaatcgacatctccacatacatcgagcagagccggtaaccaccacgtgccagagccgcccacccggagccgcccgcatgcagcttcacctcccctttccaggcgccactgttgagaagctagagattgtatgagaataaacttgttattatggaag

SEQ ID NO: 1846 - DNA, 4561 bp, Homo sapiens
agcgcgcgccgcgtccggggccggctggtgcgcgagacgccgccgagagttgtgaagggcgcgggtggggggcgctgccggcctcgtgggtacgttcgtgccgcgtctgtcccagagctggggccgcaggagcggaggcaagaggggcactatggcagacaaagttaggaggcagaggccgaggaggcgagtctgttgggccttggtggctgtgctcttggcagacctgttggcactgagtgatacactggcagtgatgtctgtggacctgggcagtgagtccatgaaggtggccattgtcaaacctggagtgcccatggaaattgtcttgaataaggaatctcggaggaaaacaccggtgatcgtgaccctgaaagaaaatgaaagattctttggagacagtgcagcaagcatggcgattaagaatccaaaggctacgctacgttacttccagcacctcctggggaagcaggcagataacccccatgtagctctttaccaggcccgcttcccggagcacgagctgactttcgacccacagaggcagactgtgcactttcagatcagctcgcagctgcagttctcacctgaggaagtgttgggcatggttctcaattattctcgttctctagctgaagattttgcagagcagcccatcaaggatgcagtgatcaccgtgccagtcttcttcaaccaggccgagcgccgagctgtgctgcaggctgctcgtatggctggcctcaaagtgctgcagctcatcaatgacaacaccgccactgccctcagctatggtgtcttccgccggaaagatattaacaccactgcccagaatatcatgttctatgacatgggctcaggcagcaccgtatgcaccattgtgacctaccagatggtgaagactaaggaagctgggatgcagccacagctgcagatccggggagtaggatttgaccgtaccctggggggcctggagatggagctccggcttcgagaacgcctggctgggcttttcaatgagcagcgcaagggtcagagagcaaaggatgtgcgggagaacccgcgtgccatggccaagctgctgcgtgaggctaatcggctcaaaaccgtcctcagtgccaacgctgaccacatggcacagattgaaggcctgatggatgatgtggacttcaaggcaaaagtgactcgtgtggaatttgaggagttgtgtgcagacttgtttgagcgggtgcctgggcctgtacagcaggccctccagagtgccgaaatgagtctggatgagattgagcaggtgatcctggtgggttgggcccactccgggtccccagaattcaagaaggtgctgctgaaggcccgttgggcaaggaggagctggggaagaacatcaatgcagatgaagcagccgccatgggggcagtgtaccaggcagctgcgctcagcaaagcctttaaagtgaagccatttgtcgtccgagatgcagtggtctaccccatcctggtggagttcacgagggaggtggaggaggagcctgggattcacagcctgaagcacaataaacgggtactcttctctcggatggggccctaccctcaacgcaaagtcatcacctttaaccgctacagccatgatttcaacttccacatcaactacggcgacctgggcttcctggggcctgaagatcttcgggtatttggctcccagaatctgaccacagtgaagctaaaaggggtgggtgacagcttcaagaagtatcctgactacgagtccaagggcatcaaggctcacttcaacctggatgagagtggcgtgctcagtctagacagggtggagtctgtatttgagacactggtagaggacagcgcagaagaggaatctactctcaccaaacttggcaacaccatttccagcctgtttggaggcggtaccacaccagatgccaaggagaatggtactgatactgtccaggaggaagaggagagccctgcagaggggagcaaggacgagcctggggagcaggtggagctcaaggaggaagctgaggccccagtggaggatggctctcagcccccaccccctgaacctaagggagatgcaacccctgagggagaaaaggccacagaaaaagaaaatggggacaagtctgaggcccagaaaccaagtgagaaggcagaggcagggcctgagggcgtcgctccagccccagagggagagaagaagcagaagcccgccaggaagcggcgaatggtagaggagatcggggtggagctggttgttctggacctgcctgacttgccagaggataagctggctcagtcggtgcagaaacttcaggacttgacactccgagacctggagaagcaggaacgggaaaaagctgccaacagcttggaagcgttcatatttgagacccaggacaagctgtaccagcccgagtaccaggaagtgtccacagaggagcagcgtgaggagatctctgggaagctcagcgccgcatccacctggctggaggatgagggtgttggagccaccacagtgatgttgaaggagaagctggctgagctgaggaagctgtgccaagggctgttttttcgggtagaggagcgcaagaagtggcccgaacggctgtctgccctcgataatctcctcaaccattccagcatgttcctcaagggggcccggctcatcccagagatggaccagatcttcactgaggtggagatgacaacgttagagaaagtcatcaatgagacctgggcctggaagaatgcaactctggccgagcaggctaagctgcccgccacagagaagcctgtgttgctctcaaaagacattgaagctaagatgatggccctggaccgagaggtgcagtatctgctcaataaggccaagtttaccaagccccggccccggcctaaggacaagaatgggacccgggcagagccacccctcaatgccagtgccagtgaccagggggagaaggtcatccctccagcaggccagactgaagatgcagagcccatttcagaacctgagaaagtagagactggatccgagccaggagacactgagcctttggagttaggaggtcctggagcagaacctgaacagaaagaacaatcgacaggacagaagcggcctttgaagaacgacgaactataacccccacctctgttttccccattcatctccacccccttcccccaccacttctatttatttaacatcgagggttgggggaggggttggtcctgccctcggctggagttcctttctcacccctgtgatttggaggtgtggagaaggggaagggagggacagctcactggttccttctgcagtacctctgtggttaaaaatggaaactgttctcctccccagccccactccctgttccctacccatataggccctaaatttgggaaaaatcactattaatttctgaatcctttgcctgtgggtaggaagagaatggctgccagtggctgatgggtcccggtgatgggaagggtatcaggttgctggggagtttccactcttctctggtgattgttccttccctcccttcctctcccaccatgcgatgagcatcctttcaggccagtgtctgcagagcctcagttaccaggtttggtttctgagtgcctatctgtgctctttcctccctctgcgggcttctcttgctctgagcctcccttccccattcccatccagctcctttccccctgggtttccttggcttcctgcagcaaattgggcagttctctgccccttgcctaaaagcctgtacctctggattggcggaagtaaatctggaaggattctcactcgtatttcccacccctagtggccagaggagggaggggcacagtgaagaagggagcccaccacctctccgaagaggaaagccacgtagagtggttggcatggggtgccagcatcgtgcaagctctgtcataatctgcatcttcccagcagcctggtaccccaggttcctgtaactccctgcctcctcctctcttctgctgttctgctcctcccagacagagcctttccctcaccccctgaccccctgggctgaccaaaatgtgctttctactgtgagtccctatcccaagatcctggggaaaggagagaccatggtgtgaatgtagagatgccacctccctctctctgaggcaggcctgtggatgaaggaggagggtcagggctggccttcctctgtgcatcactctgctaggttgggggcccccgacccaccatacctacgcctagggagcccgtcctccagtattccgtctgtagcaggagctagggctgctgcctcagctccaagacaagaatgaacctggctgtgtcagtcattttgtcttttccttttttttttttttttgccacattggcagagatgggacctaagggtcccacccctcaccccacccccacctcttctgtatgtttgaattctttcagtagctgttgatgctggttggacaggtttgagtcaaattgtactttgctccattgttaattgagaaactgtttcaataaaatattcttttctaca

SEQ ID NO: 1847 - DNA, 4515 bp, Homo sapiens
ctcgcaccggggggcacgcagctcggcccccggtctgtccccacttgctggggcgggccgggatccgtttccgggagtgggagccgccgccttcgtcaggggcactatggcagacaaagttaggaggcagaggccgaggaggcgagtctgttgggccttggtggctgtgctcttggcagacctgttggcactgagtgatacactggcagtgatgtctgtggacctgggcagtgagtccatgaaggtggccattgtcaaacctggagtgcccatggaaattgtcttgaataaggaatctcggaggaaaacaccggtgatcgtgaccctgaaagaaaatgaaagattctttggagacagtgcagcaagcatggcgattaagaatccaaaggctacgctacgttacttccagcacctcctggggaagcaggcagataacccccatgtagctctttaccaggcccgcttcccggagcacgagctgactttcgacccacagaggcagactgtgcactttcagatcagctcgcagctgcagttctcacctgaggaagtgttgggcatggttctcaattattctcgttctctagctgaagattttgcagagcagcccatcaaggatgcagtgatcaccgtgccagtcttcttcaaccaggccgagcgccgagctgtgctgcaggctgctcgtatggctggcctcaaagtgctgcagctcatcaatgacaacaccgccactgccctcagctatggtgtcttccgccggaaagatattaacaccactgcccagaatatcatgttctatgacatgggctcaggcagcaccgtatgcaccattgtgacctaccagatggtgaagactaaggaagctgggatgcagccacagctgcagatccggggagtaggatttgaccgtaccctggggggcctggagatggagctccggcttcgagaacgcctggctgggcttttcaatgagcagcgcaagggtcagagagcaaaggatgtgcgggagaacccgcgtgccatggccaagctgctgcgtgaggctaatcggctcaaaaccgtcctcagtgccaacgctgaccacatggcacagattgaaggcctgatggatgatgtggacttcaaggcaaaagtgactcgtgtggaatttgaggagttgtgtgcagacttgtttgagcgggtgcctgggcctgtacagcaggccctccagagtgccgaaatgagtctggatgagattgagcaggtgatcctggtgggttgggcccactccgggtccccagaattcaagaaggtgctgctgaaggcccgttgggcaaggaggagctggggaagaacatcaatgcagatgaagcagccgccatgggggcagtgtaccaggcagctgcgctcagcaaagcctttaaagtgaagccatttgtcgtccgagatgcagtggtctaccccatcctggtggagttcacgagggaggtggaggaggagcctgggattcacagcctgaagcacaataaacgggtactcttctctcggatggggccctaccctcaacgcaaagtcatcacctttaaccgctacagccatgatttcaacttccacatcaactacggcgacctgggcttcctggggcctgaagatcttcgggtatttggctcccagaatctgaccacagtgaagctaaaaggggtgggtgacagcttcaagaagtatcctgactacgagtccaagggcatcaaggctcacttcaacctggatgagagtggcgtgctcagtctagacagggtggagtctgtatttgagacactggtagaggacagcgcagaagaggaatctactctcaccaaacttggcaacaccatttccagcctgtttggaggcggtaccacaccagatgccaaggagaatggtactgatactgtccaggaggaagaggagagccctgcagaggggagcaaggacgagcctggggagcaggtggagctcaaggaggaagctgaggccccagtggaggatggctctcagcccccaccccctgaacctaagggagatgcaacccctgagggagaaaaggccacagaaaaagaaaatggggacaagtctgaggcccagaaaccaagtgagaaggcagaggcagggcctgagggcgtcgctccagccccagagggagagaagaagcagaagcccgccaggaagcggcgaatggtagaggagatcggggtggagctggttgttctggacctgcctgacttgccagaggataagctggctcagtcggtgcagaaacttcaggacttgacactccgagacctggagaagcaggaacgggaaaaagctgccaacagcttggaagcgttcatatttgagacccaggacaagctgtaccagcccgagtaccaggaagtgtccacagaggagcagcgtgaggagatctctgggaagctcagcgccgcatccacctggctggaggatgagggtgttggagccaccacagtgatgttgaaggagaagctggctgagctgaggaagctgtgccaagggctgttttttcgggtagaggagcgcaagaagtggcccgaacggctgtctgccctcgataatctcctcaaccattccagcatgttcctcaagggggcccggctcatcccagagatggaccagatcttcactgaggtggagatgacaacgttagagaaagtcatcaatgagacctgggcctggaagaatgcaactctggccgagcaggctaagctgcccgccacagagaagcctgtgttgctctcaaaagacattgaagctaagatgatggccctggaccgagaggtgcagtatctgctcaataaggccaagtttaccaagccccggccccggcctaaggacaagaatgggacccgggcagagccacccctcaatgccagtgccagtgaccagggggagaaggtcatccctccagcaggccagactgaagatgcagagcccatttcagaacctgagaaagtagagactggatccgagccaggagacactgagcctttggagttaggaggtcctggagcagaacctgaacagaaagaacaatcgacaggacagaagcggcctttgaagaacgacgaactataacccccacctctgttttccccattcatctccacccccttcccccaccacttctatttatttaacatcgagggttgggggaggggttggtcctgccctcggctggagttcctttctcacccctgtgatttggaggtgtggagaaggggaagggagggacagctcactggttccttctgcagtacctctgtggttaaaaatggaaactgttctcctccccagccccactccctgttccctacccatataggccctaaatttgggaaaaatcactattaatttctgaatcctttgcctgtgggtaggaagagaatggctgccagtggctgatgggtcccggtgatgggaagggtatcaggttgctggggagtttccactcttctctggtgattgttccttccctcccttcctctcccaccatgcgatgagcatcctttcaggccagtgtctgcagagcctcagttaccaggtttggtttctgagtgcctatctgtgctctttcctccctctgcgggcttctcttgctctgagcctcccttccccattcccatccagctcctttccccctgggtttccttggcttcctgcagcaaattgggcagttctctgccccttgcctaaaagcctgtacctctggattggcggaagtaaatctggaaggattctcactcgtatttcccacccctagtggccagaggagggaggggcacagtgaagaagggagcccaccacctctccgaagaggaaagccacgtagagtggttggcatggggtgccagcatcgtgcaagctctgtcataatctgcatcttcccagcagcctggtaccccaggttcctgtaactccctgcctcctcctctcttctgctgttctgctcctcccagacagagcctttccctcaccccctgaccccctgggctgaccaaaatgtgctttctactgtgagtccctatcccaagatcctggggaaaggagagaccatggtgtgaatgtagagatgccacctccctctctctgaggcaggcctgtggatgaaggaggagggtcagggctggccttcctctgtgcatcactctgctaggttgggggcccccgacccaccatacctacgcctagggagcccgtcctccagtattccgtctgtagcaggagctagggctgctgcctcagctccaagacaagaatgaacctggctgtgtcagtcattttgtcttttccttttttttttttttttgccacattggcagagatgggacctaagggtcccacccctcaccccacccccacctcttctgtatgtttgaattctttcagtagctgttgatgctggttggacaggtttgagtcaaattgtactttgctccattgttaattgagaaactgtttcaataaaatattcttttctac

SEQ ID NO: 1848 - DNA, 4042 bp, Homo sapiens
cgagacgccgccgagaggttggtggctaatgtaacatttgcaaaccgagaggagttgtgaagggcgcgggtggggggcgctgccggcctcgtgggggcactatggcagacaaagttaggaggcagaggccgaggaggcgagtctgttgggccttggtggctgtgctcttggcagacctgttggcactgagtgatacactggcagtgatgtctgtggacctgggcagtgagtccatgaaggtggccattgtcaaacctggagtgcccatggaaattgtcttgaataaggaatctcggaggaaaacaccggtgatcgtgaccctgaaagaaaatgaaagattctttggagacagtgcagcaagcatggcgattaagaatccaaaggctacgctacgttacttccagcacctcctggggaagcaggcagataacccccatgtagctctttaccaggcccgcttcccggagcacgagctgactttcgacccacagaggcagactgtgcactttcagatcagctcgcagctgcagttctcacctgaggaagtgttgggcatggttctcaattattctcgttctctagctgaagattttgcagagcagcccatcaaggatgcagtgatcaccgtgccagtcttcttcaaccaggccgagcgccgagctgtgctgcaggctgctcgtatggctggcctcaaagtgctgcagctcatcaatgacaacaccgccactgccctcagctatggtgtcttccgccggaaagatattaacaccactgcccagaatatcatgttctatgacatgggctcaggcagcaccgtatgcaccattgtgacctaccagatggtgaagactaaggaagctgggatgcagccacagctgcagatccggggagtaggatttgaccgtaccctggggggcctggagatggagctccggcttcgagaacgcctggctgggcttttcaatgagcagcgcaagggtcagagagcaaaggatgtgcgggagaacccgcgtgccatggccaagctgctgcgtgaggctaatcggctcaaaaccgtcctcagtgccaacgctgaccacatggcacagattgaaggcctgatggatgatgtggacttcaaggcaaaagtgactcgtgtggaatttgaggagttgtgtgcagacttgtttgagcgggtgcctgggcctgtacagcaggccctccagagtgccgaaatgagtctggatgagattgagcaggtgatcctggtgggttgggcccactccgggtccccagaattcaagaaggtgctgctgaaggcccgttgggcaaggaggagctggggaagaacatcaatgcagatgaagcagccgccatgggggcagtgtaccaggcagctgcgctcagcaaagcctttaaagtgaagccatttgtcgtccgagatgcagtggtctaccccatcctggtggagttcacgagggaggtggaggaggagcctgggattcacagcctgaagcacaataaacgggtactcttctctcggatggggccctaccctcaacgcaaagtcatcacctttaaccgctacagccatgatttcaacttccacatcaactacggcgacctgggcttcctggggcctgaagatcttcgggtatttggctcccagaatctgaccacagtgaagctaaaaggggtgggtgacagcttcaagaagtatcctgactacgagtccaagggcatcaaggctcacttcaacctggatgagagtggcgtgctcagtctagacagggtggagtctgtatttgagacactggtagaggacagcgcagaagaggaatctactctcaccaaacttggcaacaccatttccagcctgtttggaggcggtaccacaccagatgccaaggagaatggtactgatactgtccaggaggaagaggagagccctgcagaggggagcaaggacgagcctggggagcaggtggagctcaaggaggaagctgaggccccagtggaggatggctctcagcccccaccccctgaacctaagggagatgcaacccctgagggagaaaaggccacagaaaaagaaaatggggacaagtctgaggcccagaaaccaagtgagaaggcagaggcagggcctgagggcgtcgctccagccccagagggagagaagaagcagaagcccgccaggaagcggcgaatggtagaggagatcggggtggagctggttgttctggacctgcctgacttgccagaggataagctggctcagtcggtgcagaaacttcaggacttgacactccgagacctggagaagcaggaacgggaaaaagctgccaacagcttggaagcgttcatatttgagacccaggacaagctgtaccagcccgagtaccaggaagtgtccacagaggagcagcgtgaggagatctctgggaagctcagcgccgcatccacctggctggaggatgagggtgttggagccaccacagtgatgttgaaggagaagctggctgagctgaggaagctgtgccaagggctgttttttcgggtagaggagcgcaagaagtggcccgaacggctgtctgccctcgataatctcctcaaccattccagcatgttcctcaagggggcccggctcatcccagagatggaccagatcttcactgaggtggagatgacaacgttagagaaagtcatcaatgagacctgggcctggaagaatgcaactctggccgagcaggctaagctgcccgccacagagaagcctgtgttgctctcaaaagacattgaagctaagatgatggccctggaccgagaggtgcagtatctgctcaataaggccaagtttaccaagccccggccccggcctaaggacaagaatgggacccgggcagagccacccctcaatgccagtgccagtgaccagggggagaaggtcatccctccagcaggccagactgaagatgcagagcccatttcagaacctgagaaagtagagactggatccgagccaggagacactgagcctttggagttaggaggtcctggagcagaacctgaacagaaagaacaatcgacaggacagaagcggcctttgaagaacgacgaactataacccccacctctgttttccccattcatctccacccccttcccccaccacttctatttatttaacatcgagggttgggggaggggttggtcctgccctcggctggagttcctttctcacccctgtgatttggaggtgtggagaaggggaagggagggacagctcactggttccttctgcagtacctctgtggttaaaaatggaaactgttctcctccccagccccactccctgttccctacccatataggccctaaatttgggaaaaatcactattaatttctgaatcctttgcctgtgggtaggaagagaatggctgccagtggctgatgggtcccggtgatgggaagggtatcaggttgctggggagtttccactcttctctggtgattgttccttccctcccttcctctcccaccatgcgatgagcatcctttcaggccagtgtctgcagagcctcagttaccaggtttggtttctgagtgcctatctgtgctctttcctccctctgcgggcttctcttgctctgagcctcccttccccattcccatccagctcctttccccctgggtttccttggcttcctgcagcaaattgggcagttctctgccccttgcctaaaagcctgtacctctggattggcggaagtaaatctggaaggattctcactcgtatttcccacccctagtggccagaggagggaggggcacagtgaagaagggagcccaccacctctccgaagaggaaagccacgtagagtggttggcatggggtgccagcatcgtgcaagctctgtcataatctgcatcttcccagcagcctggtaccccaggttcctgtaactccctgcctcctcctctcttctgctgttctgctcctcccagacagagcctttccctcaccccctgaccccctgggctgaccaaaatgtgctttcta

SEQ ID NO: 1849 - DNA, 4446 bp, Homo sapiens
gccggctggtgcgcgagacgccgccgagaggggcactatggcagacaaagttaggaggcagaggccgaggaggcgagtctgttgggccttggtggctgtgctcttggcagacctgttggcactgagtgatacactggcagtgatgtctgtggacctgggcagtgagtccatgaaggtggccattgtcaaacctggagtgcccatggaaattgtcttgaataaggaatctcggaggaaaacaccggtgatcgtgaccctgaaagaaaatgaaagattctttggagacagtgcagcaagcatggcgattaagaatccaaaggctacgctacgttacttccagcacctcctggggaagcaggcagataacccccatgtagctctttaccaggcccgcttcccggagcacgagctgactttcgacccacagaggcagactgtgcactttcagatcagctcgcagctgcagttctcacctgaggaagtgttgggcatggttctcaattattctcgttctctagctgaagattttgcagagcagcccatcaaggatgcagtgatcaccgtgccagtcttcttcaaccaggccgagcgccgagctgtgctgcaggctgctcgtatggctggcctcaaagtgctgcagctcatcaatgacaacaccgccactgccctcagctatggtgtcttccgccggaaagatattaacaccactgcccagaatatcatgttctatgacatgggctcaggcagcaccgtatgcaccattgtgacctaccagatggtgaagactaaggaagctgggatgcagccacagctgcagatccggggagtaggatttgaccgtaccctggggggcctggagatggagctccggcttcgagaacgcctggctgggcttttcaatgagcagcgcaagggtcagagagcaaaggatgtgcgggagaacccgcgtgccatggccaagctgctgcgtgaggctaatcggctcaaaaccgtcctcagtgccaacgctgaccacatggcacagattgaaggcctgatggatgatgtggacttcaaggcaaaagtgactcgtgtggaatttgaggagttgtgtgcagacttgtttgagcgggtgcctgggcctgtacagcaggccctccagagtgccgaaatgagtctggatgagattgagcaggtgatcctggtgggttgggcccactccgggtccccagaattcaagaaggtgctgctgaaggcccgttgggcaaggaggagctggggaagaacatcaatgcagatgaagcagccgccatgggggcagtgtaccaggcagctgcgctcagcaaagcctttaaagtgaagccatttgtcgtccgagatgcagtggtctaccccatcctggtggagttcacgagggaggtggaggaggagcctgggattcacagcctgaagcacaataaacgggtactcttctctcggatggggccctaccctcaacgcaaagtcatcacctttaaccgctacagccatgatttcaacttccacatcaactacggcgacctgggcttcctggggcctgaagatcttcgggtatttggctcccagaatctgaccacagtgaagctaaaaggggtgggtgacagcttcaagaagtatcctgactacgagtccaagggcatcaaggctcacttcaacctggatgagagtggcgtgctcagtctagacagggtggagtctgtatttgagacactggtagaggacagcgcagaagaggaatctactctcaccaaacttggcaacaccatttccagcctgtttggaggcggtaccacaccagatgccaaggagaatggtactgatactgtccaggaggaagaggagagccctgcagaggggagcaaggacgagcctggggagcaggtggagctcaaggaggaagctgaggccccagtggaggatggctctcagcccccaccccctgaacctaagggagatgcaacccctgagggagaaaaggccacagaaaaagaaaatggggacaagtctgaggcccagaaaccaagtgagaaggcagaggcagggcctgagggcgtcgctccagccccagagggagagaagaagcagaagcccgccaggaagcggcgaatggtagaggagatcggggtggagctggttgttctggacctgcctgacttgccagaggataagctggctcagtcggtgcagaaacttcaggacttgacactccgagacctggagaagcaggaacgggaaaaagctgccaacagcttggaagcgttcatatttgagacccaggacaagctgtaccagcccgagtaccaggaagtgtccacagaggagcagcgtgaggagatctctgggaagctcagcgccgcatccacctggctggaggatgagggtgttggagccaccacagtgatgttgaaggagaagctggctgagctgaggaagctgtgccaagggctgttttttcgggtagaggagcgcaagaagtggcccgaacggctgtctgccctcgataatctcctcaaccattccagcatgttcctcaagggggcccggctcatcccagagatggaccagatcttcactgaggtggagatgacaacgttagagaaagtcatcaatgagacctgggcctggaagaatgcaactctggccgagcaggctaagctgcccgccacagagaagcctgtgttgctctcaaaagacattgaagctaagatgatggccctggaccgagaggtgcagtatctgctcaataaggccaagtttaccaagccccggccccggcctaaggacaagaatgggacccgggcagagccacccctcaatgccagtgccagtgaccagggggagaaggtcatccctccagcaggccagactgaagatgcagagcccatttcagaacctgagaaagtagagactggatccgagccaggagacactgagcctttggagttaggaggtcctggagcagaacctgaacagaaagaacaatcgacaggacagaagcggcctttgaagaacgacgaactataacccccacctctgttttccccattcatctccacccccttcccccaccacttctatttatttaacatcgagggttgggggaggggttggtcctgccctcggctggagttcctttctcacccctgtgatttggaggtgtggagaaggggaagggagggacagctcactggttccttctgcagtacctctgtggttaaaaatggaaactgttctcctccccagccccactccctgttccctacccatataggccctaaatttgggaaaaatcactattaatttctgaatcctttgcctgtgggtaggaagagaatggctgccagtggctgatgggtcccggtgatgggaagggtatcaggttgctggggagtttccactcttctctggtgattgttccttccctcccttcctctcccaccatgcgatgagcatcctttcaggccagtgtctgcagagcctcagttaccaggtttggtttctgagtgcctatctgtgctctttcctccctctgcgggcttctcttgctctgagcctcccttccccattcccatccagctcctttccccctgggtttccttggcttcctgcagcaaattgggcagttctctgccccttgcctaaaagcctgtacctctggattggcggaagtaaatctggaaggattctcactcgtatttcccacccctagtggccagaggagggaggggcacagtgaagaagggagcccaccacctctccgaagaggaaagccacgtagagtggttggcatggggtgccagcatcgtgcaagctctgtcataatctgcatcttcccagcagcctggtaccccaggttcctgtaactccctgcctcctcctctcttctgctgttctgctcctcccagacagagcctttccctcaccccctgaccccctgggctgaccaaaatgtgctttctactgtgagtccctatcccaagatcctggggaaaggagagaccatggtgtgaatgtagagatgccacctccctctctctgaggcaggcctgtggatgaaggaggagggtcagggctggccttcctctgtgcatcactctgctaggttgggggcccccgacccaccatacctacgcctagggagcccgtcctccagtattccgtctgtagcaggagctagggctgctgcctcagctccaagacaagaatgaacctggctgtgtcagtcattttgtcttttccttttttttttttttttgccacattggcagagatgggacctaagggtcccacccctcaccccacccccacctcttctgtatgtttgaattctttcagtagctgttgatgctggttggacaggtttgagtcaaattgtactttgctccattgttaattgagaaactgtttcaataaaatattcttttctac

SEQ ID NO: 1850 - DNA, 2445 bp, Homo sapiens
gcaggtggggagcttggcccgcggtcgtggttcccgccgtcctgtgcctttaaggctctcgccgctcaccagcatttggggctcctgctgtgtcggcccccagctgacttggctttaggggtcggcgtggagggttaaagaggccccggctgggtttgcggagcagccaagcctggcaaaatcgaaagggagggctcaaagagactgtatccttaacccccaaaaagctggtctaaaaggatgggaggccagaccgctgaccgttccccactctcgacagagtccagccgtgtggagcacacgatgctgcaaacttgcatgtcatctctttcaggtgtggcatttcaagggggcttgtgtcttgaaaacagcaactgtgaggacacttgatagtcatttccttcagttctgcttttgtctccctaggtgactgtggccttcccccagatgtacctaatgcccagccagctttggaaggccgtacaagttttcccgaggatactgtaataacgtacaaatgtgaagaaagctttgtgaaaattcctggcgagaaggactcagtgatctgccttaagggcagtcaatggtcagatattgaagagttctgcaatcgtagctgcgaggtgccaacaaggctaaattctgcatccctcaaacagccttatatcactcagaattattttccagtcggtactgttgtggaatatgagtgccgtccaggttacagaagagaaccttctctatcaccaaaactaacttgccttcagaatttaaaatggtccacagcagtcgaattttgtaaaaagaaatcatgccctaatccgggagaaatacgaaatggtcagattgatgtaccaggtggcatattatttggtgcaaccatctccttctcatgtaacacagggtacaaattatttggctcgacttctagtttttgtcttatttcaggcagctctgtccagtggagtgacccgttgccagagtgcagagaaatttattgtccagcaccaccacaaattgacaatggaataattcaaggggaacgtgaccattatggatatagacagtctgtaacgtatgcatgtaataaaggattcaccatgattggagagcactctatttattgtactgtgaataatgatgaaggagagtggagtggcccaccacctgaatgcagaggaaaatctctaacttccaaggtcccaccaacagttcagaaacctaccacagtaaatgttccaactacagaagtctcaccaacttctcagaaaaccaccacaaaaaccaccacaccaaatgctcaaggtacagagactccatcagttcttcaaaaacacaccacagaaaatgtttcagctacaagaaccccaccaactcctcagaaacccaccacagtaaatgtcccagctacaatagtcacaccaacacctcagaaacccaccacaataaatgttccagctacaggagtctcatcaacacctcaaagacacaccatagtaaatgtttcagctacaggaaccctaccaactcttcagaaacccaccagagcaaatgattcagccaccaaatccccagcagcagctcagacatctttcatatcaaaaaccctatctacaaagaccccttctgcagctcagaatcccatgatgacaaatgcttctgctacacaggccacactaacagcccaaaaattcaccacagcaaaagttgcatttacgcagagtccttcagcagcacgtaagtccactaatgtacattccccagtgactaatggtctcaagagtacacaaagattcccttctgctcatattacagcaacacggagtacacctgtttccaggacaaccaagcattttcatgaaacaaccccaaataaaggaagtggaaccacttcaggtactacccgtcttctatctgggcacacgtgtttcacgttgacaggtttgcttgggacgctagtaaccatgggcttgctgacttagccaaagaagagttaagaagaaaatacacacaagtatacagactgttcctagtttcttagacttatctgcatattggataaaataaatgcaattgtgctcttcatttaggatgctttcattgtctttaagatgtgttaggaatgtcaacagagcaaggagaaaaaaggcagtcctggaatcacattcttagcacacctacacctcttgaaaatagaacaacttgcagaattgagagtgattcctttcctaaaagtgtagtgatttttttccacaagatctgtaatgttatttccacttataaaggaaataaaaaatgaaaaacattatttggatatcaaaagcaaataaaaacccaattcagtctcttctaagcaaaattgctaaagagagatgaaccacattataaagtaatctttggctgtaaggcattttcatctttccttcgggttggcaaaatatttta

SEQ ID NO: 1851 - DNA, 2640 bp, Homo sapiens
tatgacgccggagccctctgaccgcacctctgaccacaacaaacccctactccacccgtcttgtttgtcccacccttggtgacgcagagccccagcccagaccccgcccaaagcactcatttaactggtattgcggagccacgaggcttctgcttactgcaactcgctccggccgctgggcgtagctgcgactcggcggagtcccggcggcgcgtccttgttctaacccggcgcgccatgaccgtcgcgcggccgagcgtgcccgcggcgctgcccctcctcggggagctgccccggctgctgctgctggtgctgttgtgcctgccggccgtgtggggtgactgtggccttcccccagatgtacctaatgcccagccagctttggaaggccgtacaagttttcccgaggatactgtaataacgtacaaatgtgaagaaagctttgtgaaaattcctggcgagaaggactcagtgatctgccttaagggcagtcaatggtcagatattgaagagttctgcaatcgtagctgcgaggtgccaacaaggctaaattctgcatccctcaaacagccttatatcactcagaattattttccagtcggtactgttgtggaatatgagtgccgtccaggttacagaagagaaccttctctatcaccaaaactaacttgccttcagaatttaaaatggtccacagcagtcgaattttgtaaaaagaaatcatgccctaatccgggagaaatacgaaatggtcagattgatgtaccaggtggcatattatttggtgcaaccatctccttctcatgtaacacagggtacaaattatttggctcgacttctagtttttgtcttatttcaggcagctctgtccagtggagtgacccgttgccagagtgcagagaaatttattgtccagcaccaccacaaattgacaatggaataattcaaggggaacgtgaccattatggatatagacagtctgtaacgtatgcatgtaataaaggattcaccatgattggagagcactctatttattgtactgtgaataatgatgaaggagagtggagtggcccaccacctgaatgcagaggaaaatctctaacttccaaggtcccaccaacagttcagaaacctaccacagtaaatgttccaactacagaagtctcaccaacttctcagaaaaccaccacaaaaaccaccacaccaaatgctcaagcaacacggagtacacctgtttccaggacaaccaagcattttcatgaaacaaccccaaataaaggaagtggaaccacttcaggtactacccgtcttctatctgggcacacgtgtttcacgttgacaggtttgcttgggacgctagtaaccatgggcttgctgacttagccaaagaagagttaagaagaaaatacacacaagtatacagactgttcctagtttcttagacttatctgcatattggataaaataaatgcaattgtgctcttcatttaggatgctttcattgtctttaagatgtgttaggaatgtcaacagagcaaggagaaaaaaggcagtcctggaatcacattcttagcacacctacacctcttgaaaatagaacaacttgcagaattgagagtgattcctttcctaaaagtgtaagaaagcatagagatttgttcgtatttagaatgggatcacgaggaaaagagaaggaaagtgatttttttccacaagatctgtaatgttatttccacttataaaggaaataaaaaatgaaaaacattatttggatatcaaaagcaaataaaaacccaattcagtctcttctaagcaaaattgctaaagagagatgaaccacattataaagtaatctttggctgtaaggcattttcatctttccttcgggttggcaaaatattttaaaggtaaaacatgctggtgaaccaggggtgttgatggtgataagggaggaatatagaatgaaagactgaatcttcctttgttgcacaaatagagtttggaaaaagcctgtgaaaggtgtcttctttgacttaatgtctttaaaagtatccagagatactacaatattaacataagaaaagattatatattatttctgaatcgagatgtccatagtcaaatttgtaaatcttattcttttgtaatatttatttatatttatttatgacagtgaacattctgattttacatgtaaaacaagaaaagttgaagaagatatgtgaagaaaaatgtatttttcctaaatagaaataaatgatcccattttttggtatcatgtagtatgtgaaatttattcttaaacgtgactactttatttctaaataagaaattccctacctgcttcctacaagcagttcagaatgccatgccttggttgtcctagtgtgaataattttcagctactttaaaattatattgtactttctcaagcatgtcatatcctttcctattagagtatctatattacttgttactgatttacctgaaggcaatctgattaatttctaggtttttaccatattcttgtcatcttgccaattacattttaagtgttagactagactaagatgtactagttgtatagaatataactagatttattatggcaatgtttattttgtcattttgcttcatctg

SEQ ID NO: 1852 - DNA, 2367 bp, Homo sapiens
gcaggtggggagcttggcccgcggtcgtggttcccgccgtcctgtgcctttaaggctctcgccgctcaccagcatttggggctcctgctgtgtcggcccccagctgacttggctttaggggtcggcgtggagggttaaagaggccccggctgggtttgcggagcagccaagcctggcaaaatcgaaagggagggctcaaagagactgtatccttaacccccaaaaagctggtctaaaaggatgggaggccagaccgctgaccgttccccactctcgacagagtccagccgtgtggagcacacgatgctgcaaacttgcatgtcatctctttcaggtgtggcatttcaagggggcttgtgtcttgaaaacagcaactgtgaggacacttgatagtcatttccttcagttctgcttttgtctccctaggtgactgtggccttcccccagatgtacctaatgcccagccagctttggaaggccgtacaagttttcccgaggatactgtaataacgtacaaatgtgaagaaagctttgtgaaaattcctggcgagaaggactcagtgatctgccttaagggcagtcaatggtcagatattgaagagttctgcaatcgtagctgcgaggtgccaacaaggctaaattctgcatccctcaaacagccttatatcactcagaattattttccagtcggtactgttgtggaatatgagtgccgtccaggttacagaagagaaccttctctatcaccaaaactaacttgccttcagaatttaaaatggtccacagcagtcgaattttgtaaaaagaaatcatgccctaatccgggagaaatacgaaatggtcagattgatgtaccaggtggcatattatttggtgcaaccatctccttctcatgtaacacagggtacaaattatttggctcgacttctagtttttgtcttatttcaggcagctctgtccagtggagtgacccgttgccagagtgcagagaaatttattgtccagcaccaccacaaattgacaatggaataattcaaggggaacgtgaccattatggatatagacagtctgtaacgtatgcatgtaataaaggattcaccatgattggagagcactctatttattgtactgtgaataatgatgaaggagagtggagtggcccaccacctgaatgcagaggaaaatctctaacttccaaggtcccaccaacagttcagaaacctaccacagtaaatgttccaactacagaagtctcaccaacttctcagaaaaccaccacaaaaaccaccacaccaaatgctcaaggtacagagactccatcagttcttcaaaaacacaccacagaaaatgtttcagctacaagaaccccaccaactcctcagaaacccaccacagtaaatgtcccagctacaatagtcacaccaacacctcagaaacccaccacaataaatgttccagctacaggagtctcatcaacacctcaaagacacaccatagtaaatgtttcagctacaggaaccctaccaactcttcagaaacccaccagagcaaatgattcagccaccaaatccccagcagcagctcagacatctttcatatcaaaaaccctatctacaaagaccccttctgcagctcagaatcccatgatgacaaatgcttctgctacacaggccacactaacagcccaaaaattcaccacagcaaaagttgcatttacgcagagtccttcagcagcaccaacacggagtacacctgtttccaggacaaccaagcattttcatgaaacaaccccaaataaaggaagtggaaccacttcaggtactacccgtcttctatctgggcacacgtgtttcacgttgacaggtttgcttgggacgctagtaaccatgggcttgctgacttagccaaagaagagttaagaagaaaatacacacaagtatacagactgttcctagtttcttagacttatctgcatattggataaaataaatgcaattgtgctcttcatttaggatgctttcattgtctttaagatgtgttaggaatgtcaacagagcaaggagaaaaaaggcagtcctggaatcacattcttagcacacctacacctcttgaaaatagaacaacttgcagaattgagagtgattcctttcctaaaagtgtagtgatttttttccacaagatctgtaatgttatttccacttataaaggaaataaaaaatgaaaaacattatttggatatcaaaagcaaataaaaacccaattcagtctcttctaagcaaaattgctaaagagagatgaaccacattataaagtaatctttggctgtaaggcattttcatctttccttcgggttggcaaaatatttta

SEQ ID NO: 1853 - DNA, 1935 bp, Homo sapiens
gcaggtggggagcttggcccgcggtcgtggttcccgccgtcctgtgcctttaaggctctcgccgctcaccagcatttggggctcctgctgtgtcggcccccagctgacttggctttaggggtcggcgtggagggttaaagaggccccggctgggtttgcggagcagccaagcctggcaaaatcgaaagggagggctcaaagagactgtatccttaacccccaaaaagctggtctaaaaggatgggaggccagaccgctgaccgttccccactctcgacagagtccagccgtgtggagcacacgatgctgcaaacttgcatgtcatctctttcaggtgtggcatttcaagggggcttgtgtcttgaaaacagcaactgtgaggacacttgatagtcatttccttcagttctgcttttgtctccctaggtgactgtggccttcccccagatgtacctaatgcccagccagctttggaaggccgtacaagttttcccgaggatactgtaataacgtacaaatgtgaagaaagctttgtgaaaattcctggcgagaaggactcagtgatctgccttaagggcagtcaatggtcagatattgaagagttctgcaatcgtagctgcgaggtgccaacaaggctaaattctgcatccctcaaacagccttatatcactcagaattattttccagtcggtactgttgtggaatatgagtgccgtccaggttacagaagagaaccttctctatcaccaaaactaacttgccttcagaatttaaaatggtccacagcagtcgaattttgtaaaaagaaatcatgccctaatccgggagaaatacgaaatggtcagattgatgtaccaggtggcatattatttggtgcaaccatctccttctcatgtaacacagggtacaaattatttggctcgacttctagtttttgtcttatttcaggcagctctgtccagtggagtgacccgttgccagagtgcagagaaatttattgtccagcaccaccacaaattgacaatggaataattcaaggggaacgtgaccattatggatatagacagtctgtaacgtatgcatgtaataaaggattcaccatgattggagagcactctatttattgtactgtgaataatgatgaaggagagtggagtggcccaccacctgaatgcagaggaaaatctctaacttccaaggtcccaccaacagttcagaaacctaccacagtaaatgttccaactacagaagtctcaccaacttctcagaaaaccaccacaaaaaccaccacaccaaatgctcaagcaacacggagtacacctgtttccaggacaaccaagcattttcatgaaacaaccccaaataaaggaagtggaaccacttcaggtactacccgtcttctatctgggcacacgtgtttcacgttgacaggtttgcttgggacgctagtaaccatgggcttgctgacttagccaaagaagagttaagaagaaaatacacacaagtatacagactgttcctagtttcttagacttatctgcatattggataaaataaatgcaattgtgctcttcatttaggatgctttcattgtctttaagatgtgttaggaatgtcaacagagcaaggagaaaaaaggcagtcctggaatcacattcttagcacacctacacctcttgaaaatagaacaacttgcagaattgagagtgattcctttcctaaaagtgtagtgatttttttccacaagatctgtaatgttatttccacttataaaggaaataaaaaatgaaaaacattatttggatatcaaaagcaaataaaaacccaattcagtctcttctaagcaaaattgctaaagagagatgaaccacattataaagtaatctttggctgtaaggcattttcatctttccttcgggttggcaaaatatttta

SEQ ID NO: 1854 - DNA, 1809 bp, Homo sapiens
gcaggtggggagcttggcccgcggtcgtggttcccgccgtcctgtgcctttaaggctctcgccgctcaccagcatttggggctcctgctgtgtcggcccccagctgacttggctttaggggtcggcgtggagggttaaagaggccccggctgggtttgcggagcagccaagcctggcaaaatcgaaagggagggctcaaagagactgtatccttaacccccaaaaagctggtctaaaaggatgggaggccagaccgctgaccgttccccactctcgacagagtccagccgtgtggagcacacgatgctgcaaacttgcatgtcatctctttcaggtgtggcatttcaagggggcttgtgtcttgaaaacagcaactgtgaggacacttgatagtcatttccttcagttctgcttttgtctccctaggtgactgtggccttcccccagatgtacctaatgcccagccagctttggaaggccgtacaagttttcccgaggatactgtaataacgtacaaatgtgaagaaagctttgtgaaaattcctggcgagaaggactcagtgatctgccttaagggcagtcaatggtcagatattgaagagttctgcaatcgtagctgcgaggtgccaacaaggctaaattctgcatccctcaaacagccttatatcactcagaattattttccagtcggtactgttgtggaatatgagtgccgtccaggttacagaagagaaccttctctatcaccaaaactaacttgccttcagaatttaaaatggtccacagcagtcgaattttgtaaaaagaaatcatgccctaatccgggagaaatacgaaatggtcagattgatgtaccaggtggcatattatttggtgcaaccatctccttctcatgtaacacagggtacaaattatttggctcgacttctagtttttgtcttatttcaggcagctctgtccagtggagtgacccgttgccagagtgcagagaaatttattgtccagcaccaccacaaattgacaatggaataattcaaggggaacgtgaccattatggatatagacagtctgtaacgtatgcatgtaataaaggattcaccatgattggagagcactctatttattgtactgtgaataatgatgaaggagagtggagtggcccaccacctgaatgcagagcaacacggagtacacctgtttccaggacaaccaagcattttcatgaaacaaccccaaataaaggaagtggaaccacttcaggtactacccgtcttctatctgggcacacgtgtttcacgttgacaggtttgcttgggacgctagtaaccatgggcttgctgacttagccaaagaagagttaagaagaaaatacacacaagtatacagactgttcctagtttcttagacttatctgcatattggataaaataaatgcaattgtgctcttcatttaggatgctttcattgtctttaagatgtgttaggaatgtcaacagagcaaggagaaaaaaggcagtcctggaatcacattcttagcacacctacacctcttgaaaatagaacaacttgcagaattgagagtgattcctttcctaaaagtgtagtgatttttttccacaagatctgtaatgttatttccacttataaaggaaataaaaaatgaaaaacattatttggatatcaaaagcaaataaaaacccaattcagtctcttctaagcaaaattgctaaagagagatgaaccacattataaagtaatctttggctgtaaggcattttcatctttccttcgggttggcaaaatatttta

SEQ ID NO: 1855 - DNA, 1970 bp, Homo sapiens
gcaggtggggagcttggcccgcggtcgtggttcccgccgtcctgtgcctttaaggctctcgccgctcaccagcatttggggctcctgctgtgtcggcccccagctgacttggctttaggggtcggcgtggagggttaaagaggccccggctgggtttgcggagcagccaagcctggcaaaatcgaaagggagggctcaaagagactgtatccttaacccccaaaaagctggtctaaaaggatgggaggccagaccgctgaccgttccccactctcgacagagtccagccgtgtggagcacacgatgctgcaaacttgcatgtcatctctttcaggtgtggcatttcaagggggcttgtgtcttgaaaacagcaactgtgaggacacttgatagtcatttccttcagttctgcttttgtctccctaggtgactgtggccttcccccagatgtacctaatgcccagccagctttggaaggccgtacaagttttcccgaggatactgtaataacgtacaaatgtgaagaaagctttgtgaaaattcctggcgagaaggactcagtgatctgccttaagggcagtcaatggtcagatattgaagagttctgcaatcgtagctgcgaggtgccaacaaggctaaattctgcatccctcaaacagccttatatcactcagaattattttccagtcggtactgttgtggaatatgagtgccgtccaggttacagaagagaaccttctctatcaccaaaactaacttgccttcagaatttaaaatggtccacagcagtcgaattttgtaaaaagaaatcatgccctaatccgggagaaatacgaaatggtcagattgatgtaccaggtggcatattatttggtgcaaccatctccttctcatgtaacacagggtacaaattatttggctcgacttctagtttttgtcttatttcaggcagctctgtccagtggagtgacccgttgccagagtgcagagaaatttattgtccagcaccaccacaaattgacaatggaataattcaaggggaacgtgaccattatggatatagacagtctgtaacgtatgcatgtaataaaggattcaccatgattggagagcactctatttattgtactgtgaataatgatgaaggagagtggagtggcccaccacctgaatgcagaggaaaatctctaacttccaaggtcccaccaacagttcagaaacctaccacagtaaatgttccaactacagaagtctcaccaacttctcagaaaaccaccacaaaaaccaccacaccaaatgctcaaggtacagagactccatcagttcttcaaaaacacaccacagaaaatgtttcagctacaagaaccccaccaactcctcagaaacccaccacagtaaatgtcccagctacaatagtcacaccaacacctcagaaacccaccacaataaatgttccagctacaggagtctcatcaacacctcaaagacacaccatagtaaatgtttcagctacaggaaccctaccaactcttcagaaacccaccagagcaaatgattcagccaccaaatccccagcagcagctcagacatctttcatatcaaaaaccctatctacaaagaccccttctgcagctcagaatcccatgatgacaaatgcttctgctacacaggccacactaacagcccaaaaattcaccacagcaaaagttgcatttacgcagagtccttcagcagcacgtaagtccactaatgtacattccccagtgactaatggtctcaagagtacacaaagattcccttctgctcatattacagcaacacggagtacacctgtttccaggacaaccaagcattttcatgaaacaaccccaaataaaggaagtggaaccacttcaggtactacccgtcttctatctgctcttataatgcacatgagagcaacaaagtactcaatgttgtgtttgaccatt

SEQ ID NO: 1856 - DNA, 1964 bp, Homo sapiens
tatgacgccggagccctctgaccgcacctctgaccacaacaaacccctactccacccgtcttgtttgtcccacccttggtgacgcagagccccagcccagaccccgcccaaagcactcatttaactggtattgcggagccacgaggcttctgcttactgcaactcgctccggccgctgggcgtagctgcgactcggcggagtcccggcggcgcgtccttgttctaacccggcgcgccatgaccgtcgcgcggccgagcgtgcccgcggcgctgcccctcctcggggagctgccccggctgctgctgctggtgctgttgtgcctgccggccgtgtggggtgactgtggccttcccccagatgtacctaatgcccagccagctttggaaggccgtacaagttttcccgaggatactgtaataacgtacaaatgtgaagaaagctttgtgaaaattcctggcgagaaggactcagtgatctgccttaagggcagtcaatggtcagatattgaagagttctgcaatcgtagctgcgaggtgccaacaaggctaaattctgcatccctcaaacagccttatatcactcagaattattttccagtcggtactgttgtggaatatgagtgccgtccaggttacagaagagaaccttctctatcaccaaaactaacttgccttcagaatttaaaatggtccacagcagtcgaattttgtaaaaagaaatcatgccctaatccgggagaaatacgaaatggtcagattgatgtaccaggtggcatattatttggtgcaaccatctccttctcatgtaacacagggtacaaattatttggctcgacttctagtttttgtcttatttcaggcagctctgtccagtggagtgacccgttgccagagtgcagagaaatttattgtccagcaccaccacaaattgacaatggaataattcaaggggaacgtgaccattatggatatagacagtctgtaacgtatgcatgtaataaaggattcaccatgattggagagcactctatttattgtactgtgaataatgatgaaggagagtggagtggcccaccacctgaatgcagaggaaaatctctaacttccaaggtcccaccaacagttcagaaacctaccacagtaaatgttccaactacagaagtctcaccaacttctcagaaaaccaccacaaaaaccaccacaccaaatgctcaagcaacacggagtacacctgtttccaggacaaccaagcattttcatgaaacaaccccaaataaaggaagtggaaccacttcaggtactacccgtcttctatctggttctcgtcctgtcacccaggctggtatgcggtggtgtgatcgtagctcactgcagtctcgaactcctgggttcaagcgatccttccacttcagcctcccaagtagctggtactacagggcacacgtgtttcacgttgacaggtttgcttgggacgctagtaaccatgggcttgctgacttagccaaagaagagttaagaagaaaatacacacaagtatacagactgttcctagtttcttagacttatctgcatattggataaaataaatgcaattgtgctcttcatttaggatgctttcattgtctttaagatgtgttaggaatgtcaacagagcaaggagaaaaaaggcagtcctggaatcacattcttagcacacctacacctcttgaaaatagaacaacttgcagaattgagagtgattcctttcctaaaagtgtagtgatttttttccacaagatctgtaatgttatttccacttataaaggaaataaaaaatgaaaaacattatttggatatcaaaagcaaataaaaacccaattcagtctcttctaagcaaaattgctaaagagagatgaaccacattataaagtaatctttggctgtaaggcattttcatctttccttcgggttggcaaaatatttta

SEQ ID NO: 1857 - DNA, 1964 bp, Homo sapiens; identical to SEQ ID NO: 1856

SEQ ID NO: 1858 - DNA, 1846 bp, Homo sapiens
tatgacgccggagccctctgaccgcacctctgaccacaacaaacccctactccacccgtcttgtttgtcccacccttggtgacgcagagccccagcccagaccccgcccaaagcactcatttaactggtattgcggagccacgaggcttctgcttactgcaactcgctccggccgctgggcgtagctgcgactcggcggagtcccggcggcgcgtccttgttctaacccggcgcgccatgaccgtcgcgcggccgagcgtgcccgcggcgctgcccctcctcggggagctgccccggctgctgctgctggtgctgttgtgcctgccggccgtgtggggtgactgtggccttcccccagatgtacctaatgcccagccagctttggaaggccgtacaagttttcccgaggatactgtaataacgtacaaatgtgaagaaagctttgtgaaaattcctggcgagaaggactcagtgatctgccttaagggcagtcaatggtcagatattgaagagttctgcaatcgtagctgcgaggtgccaacaaggctaaattctgcatccctcaaacagccttatatcactcagaattattttccagtcggtactgttgtggaatatgagtgccgtccaggttacagaagagaaccttctctatcaccaaaactaacttgccttcagaatttaaaatggtccacagcagtcgaattttgtaaaaagaaatcatgccctaatccgggagaaatacgaaatggtcagattgatgtaccaggtggcatattatttggtgcaaccatctccttctcatgtaacacagggtacaaattatttggctcgacttctagtttttgtcttatttcaggcagctctgtccagtggagtgacccgttgccagagtgcagagaaatttattgtccagcaccaccacaaattgacaatggaataattcaaggggaacgtgaccattatggatatagacagtctgtaacgtatgcatgtaataaaggattcaccatgattggagagcactctatttattgtactgtgaataatgatgaaggagagtggagtggcccaccacctgaatgcagaggaaaatctctaacttccaaggtcccaccaacagttcagaaacctaccacagtaaatgttccaactacagaagtctcaccaacttctcagaaaaccaccacaaaaaccaccacaccaaatgctcaagcaacacggagtacacctgtttccaggacaaccaagcattttcatgaaacaaccccaaataaaggaagtggaaccacttcaggtactacccgtcttctatctgggcacacgtgtttcacgttgacaggtttgcttgggacgctagtaaccatgggcttgctgacttagccaaagaagagttaagaagaaaatacacacaagtatacagactgttcctagtttcttagacttatctgcatattggataaaataaatgcaattgtgctcttcatttaggatgctttcattgtctttaagatgtgttaggaatgtcaacagagcaaggagaaaaaaggcagtcctggaatcacattcttagcacacctacacctcttgaaaatagaacaacttgcagaattgagagtgattcctttcctaaaagtgtagtgatttttttccacaagatctgtaatgttatttccacttataaaggaaataaaaaatgaaaaacattatttggatatcaaaagcaaataaaaacccaattcagtctcttctaagcaaaattgctaaagagagatgaaccacattataaagtaatctttggctgtaaggcattttcatctttccttcgggttggcaaaatatttta

SEQ ID NO: 1859 - DNA, 1636 bp, Homo sapiens
gcaggtggggagcttggcccgcggtcgtggttcccgccgtcctgtgcctttaaggctctcgccgctcaccagcatttggggctcctgctgtgtcggcccccagctgacttggctttaggggtcggcgtggagggttaaagaggccccggctgggtttgcggagcagccaagcctggcaaaatcgaaagggagggctcaaagagactgtatccttaacccccaaaaagctggtctaaaaggatgggaggccagaccgctgaccgttccccactctcgacagagtccagccgtgtggagcacacgatgctgcaaacttgcatgtcatctctttcaggtgtggcatttcaagggggcttgtgtcttgaaaacagcaactgtgaggacacttgatagtcatttccttcagttctgcttttgtctccctaggtgactgtggccttcccccagatgtacctaatgcccagccagctttggaaggccgtacaagttttcccgaggatactgtaataacgtacaaatgtgaagaaagctttgtgaaaattcctggcgagaaggactcagtgatctgccttaagggcagtcaatggtcagatattgaagagttctgcaatcgtagctgcgaggtgccaacaaggctaaattctgcatccctcaaacagccttatatcactcagaattattttccagtcggtactgttgtggaatatgagtgccgtccaggttacagaagagaaccttctctatcaccaaaactaacttgccttcagaatttaaaatggtccacagcagtcgaattttgtaaaaagaaatcatgccctaatccgggagaaatacgaaatggtcagattgatgtaccaggtggcatattatttggtgcaaccatctccttctcatgtaacacagggtacaaattatttggctcgacttctagtttttgtcttatttcaggcagctctgtccagtggagtgacccgttgccagagtgcagagaaatttattgtccagcaccaccacaaattgacaatggaataattcaaggggaacgtgaccattatggatatagacagtctgtaacgtatgcatgtaataaaggattcaccatgattggagagcactctatttattgtactgtgaataatgatgaaggagagtggagtggcccaccacctgaatgcagaggaaaatctctaacttccaaggtcccaccaacagttcagaaacctaccacagtaaatgttccaactacagaagtctcaccaacttctcagaaaaccaccacaaaaaccaccacaccaaatgctcaagcaacacggagtacacctgtttccaggacaaccaagcattttcatgaaacaaccccaaataaaggaagtggaaccacttcaggtcagttgacactgttcaggtttactgagtatggatctaatgtgctatggtggaaatatgaacttgaccaagattgcaggattaaatggtctctaatttattgtagccagggtttttcatactaatactttttactttatttggaagcggacttggattgtactagggcaaatctttaaaaaaagaaacatttacaataatagagaaaaagactgtggccccattaaaaaaatgctaaattaagattggt

SEQ ID NO: 1860 - DNA, 1964 bp, Homo sapiens; identical to SEQ ID NO: 1856

SEQ ID NO: 1861 - DNA, 1970 bp, Homo sapiens; identical to SEQ ID NO: 1855

SEQ ID NO: 1862 - DNA, 2445 bp, Homo sapiens; identical to SEQ ID NO: 1850

SEQ ID NO: 1863 - DNA, 4702 bp, Homo sapiens
aacttctctccgtaaaagatgttgcccacttgccatttctaggccaggaggaagagattggaactctggagagtctttcttgttttgtctcagggtgtctttacatttggcaatctccgtcctacagagggctggaaaagccctgcgggagacggcatatccaccacccgctgctgggtcggccctgcagctgtgtgcacccgagaactgccaaagaagctgggtcttggcgcggcgggacgggccaatcagaagaagtttggccctctgcagtttccgtccgctcactaggaggcgctgcggcagcgacggcggcgtcggcggcggccggggctgtcgcgggttggggcggttgggctggcagctgaggctcgtggccatggagtggggttctgagtcggctgctgtgaggcggcaccgcgtcggagtagagcgtcgagagggagcggcggccgcgccaccgccggagagggaggcccgagcgcaggagcctctggtggatgggtgcagcggcggcgggaggacgcggaagaggagccccgggggtagcggcggcgcgagcaggggcgcggggaccgggctgtctgaggtgcgcgccgcgctggggctcgcgctctacctgatcgcgctgcggacgctggtgcagctctcgctgcagcagctcgtgctacgcggggccgctggacaccgcggggagttcgacgcgctccaagccaggtaccggccgctccctcctggcacggcccgcgcgtccgtttgcggctcctgcgcaggctccggggcaccgcacctgtgtgcacccgcccctgccggaccgctgggactcgctgacccctcccaggctgcacgtggggtggggtgaccttgcttgtccttcttctggggtctgaattgccgggacttggggcttgcctgtccccggttaagctcgtggtgcagattggggttgccagggattatcttgaacacataacctccattggccccaggactacaggaagtccagaaaatgaaattctgaccgtgcactaccttttggaacagattaaactgattgaagtgcaaagcaacagccttcataagatttcagtagatgtacaacggcccacaggctcttttagcattgatttcttgggaggttttacaagctattatgacaacatcaccaatgttgtggtaaagctggaacccagagatggagcccagcatgctgtcttggctaattgtcattttgactcagtagcaaactcaccaggtgccagtgatgatgcagttagctgctcagtgatgctggaagtccttcgcgtcttgtcaacatcttcagaagccttgcatcatgctgtcatatttctctttaatggtgctgaggaaaatgtcttgcaagccagtcatggtttcattactcagcacccctgggctagcttgattcgtgcattcattaacctagaggcagcaggtgtaggagggaaagaacttgtattccaaacaggtcctgaaaatccttggttggttcaagcttatgtttcagcagctaaacacccttttgcttctgtggtggctcaggaggtttttcagagtggaatcattccttcagatactgactttcgtatctacagggattttgggaacattccaggaatagacttagcttttattgagaatggatacatttatcacaccaagtatgacacagcggacagaattctaacagattccattcagagagcaggtgacaacattttagcagttcttaagcatctagctacatctgatatgctggctgctgcttctaagtatcgacatggaaacatggtcttctttgatgtgctgggcctgtttgtcattgcctacccctctcgtattggctcaatcataaactacatggtggtaatgggtgttgttttgtacctgggcaaaaaatttttgcagcccaaacataagactggtaactacaagaaggacttcttgtgtggacttggcatcactttgatcagctggttcactagccttgttaccgttctcattatagcagtgttcatctctcttattggacagtctctctcatggtataaccacttctatgtctccgtttgtctgtatggaactgcaactgtagccaaaataatacttatacatactcttgcgaaaagattttattacatgaatgccagtgcccagtatctgggagaagtattttttgacatttcgctgtttgtccattgctgttttcttgttaccctcacttaccaaggactttgctcggcgtttattagtgctgtctgggtagcattcccattgctcacaaagctctgtgtgcataaggacttcaagcagcatggtgcccaaggaaaatttattgctttttaccttttggggatgtttattccttatctttatgcattgtacctcatctgggcagtatttgagatgtttacccctatcctcgggagaagtggttctgaaatcccacctgatgttgtgctggcatccattttggctggctgtacaatgattctctcgtcctattttattaacttcatctaccttgccaagagcacaaaaaaaaccatgctaactttaactttggtatgtgcaattacattcctccttgtttgcagtggaacattttttccatatagctccaatcctgctaatccgaagccaaagagagtgtttcttcagcatatgactagaacattccatgacttggaaggaaatgcagttaaacgggactctggaatatggatcaatgggtttgattatactggaatttctcacataacccctcacattcctgagatcaatgatagtatccgagctcactgtgaggagaatgcacctctttgtggttttccttggtatcttccagtgcactttctgatcaggaaaaactggtatcttcctgccccagaagtttctccaagaaatcctcctcatttccgactcatatccaaagaacagacaccttgggattctataaaattgacttttgaagcaacaggaccaagccatatgtccttctatgttcgagcccacaaagggtcaacactttctcagtggtctcttggcaatggcaccccagtcacaagtaaaggaggagactactttgtcttttactcccatggactccaggcctctgcatggcagttctggatagaagtgcaggtttcagaagaacatcctgaaggaatggtcaccgtggccattgctgcccactatctgtctggggaagacaagagatcccctcaactggatgctctgaaggaaaagttcccagattggacatttccctctgcctgggtgtgcacctacgatctctttgtattttaatcttgtggatgagctctaagtacatgcccagtggatactccatgtgacatggtttctccctatgttacgtggatgtttgtaacgtaagtcaatgaattttaatgatcatatgttcaaagagctttctgggttaacgcttttcagggccaagcactataagggtttagctgtggcgcagtgatgcatggcctgttgacacttgaaaatgccagtcttttggcacttcagcacatgtgggtactgccactacacacacgtcattttatatgaccttaaggacaaagccaacaatccacttcaatagctgcccctttaggatcaagaaagatgtacactgtcagagcattgttaatgagacaaaagttgtttccaatttaagccccaaaaccatttgttgtattagtggatggtgggtaaaatatcattcactgaggtaatgattccccttgagaatataactctgtgtaggtcactggaaagtgattgccatagggctgggagagaagcattgcactcttgaggctgtagcctgtgtcaagctgtttcttcaggcagcctctcaaatgtgctttgtctctctgtgctgaggcctggaccctgtgctgagctggtgactcactgtcctgacaagtggacacacagatgcactgctgtgctgctttcctgaggtggttttctatgcctgttttcctctgaaacatgtctgttacccctctccatcttaccaagttgaaaaggggaatatttggccacatacccctctggttttcgtaggttcttttggttcagaatattgtttgtgccagtacatgaccttaacttccttcctcagagcactgagctgccatctgggctattctggggtagaaggaaggctgggagtggtgggaattttataaatatttattctcttttctttgtttcataggagtcttgtgttatacaaggttagtccttcatggtataatcttactgatgcactgggcctatctttttgttttccagccagttgaatagattagtttttctcagtaacttactatccagcagactggctttcctgagacttgaggttgtggcttatactggaatgagaccactgtacgtgtaggtggttcagatcctgcgtaatggcagcatgaggacttaaaaggtggttttcattttgaagatggctatgtagcttgtaaggtgtatcacagcagtacctctcatggctttttggttccagcagtgagggcattggtgagatcaatggtaaactgtgaagctgtagaaggagtgtttgtcaatttcttgtcactggtttgctgacttactgaggattaattgttgccttacaatgttactgaaataaactgtttaatatact

SEQ ID NO: 1864 - DNA, 4702 bp, Homo sapiens; identical to SEQ ID NO: 1863

SEQ ID NO: 1865 - DNA, 5355 bp, Homo sapiens
ggccggggctgtcgcgggttggggcggttgggctggcagctgaggctcgtggccatggagtggggttctgagtcggctgctgtgaggcggcaccgcgtcggagtagagcgtcgagagggagcggcggccgcgccaccgccggagagggaggcccgagcgcaggagcctctggtggatgggtgcagcggcggcgggaggacgcggaagaggagccccgggggtagcggcggcgcgagcaggggcgcggggaccgggctgtctgaggtgcgcgccgcgctggggctcgcgctctacctgatcgcgctgcggacgctggtgcagctctcgctgcagcagctcgtgctacgcggggccgctggacaccgcggggagttcgacgcgctccaagccagggattatcttgaacacataacctccattggccccaggactacaggaagtccagaaaatgaaattctgaccgtgcactaccttttggaacagattaaactgattgaagtgcaaagcaacagccttcataagatttcagtagatgtacaacggcccacaggctcttttagcattgatttcttgggaggttttacaagctattatgacaacatcaccaatgttgtggtaaagctggaacccagagatggagcccagcatgctgtcttggctaattgtcattttgactcagtagcaaactcaccaggtgccagtgatgatgcagttagctgctcagtgatgctggaagtccttcgcgtcttgtcaacatcttcagaagccttgcatcatgctgtcatatttctctttaatggtgctgaggaaaatgtcttgcaagccagtcatggtttcattactcagcacccctgggctagcttgattcgtgcattcattaacctagaggcagcaggtgtaggagggaaagaacttgtattccaaacaggtcctgaaaatccttggttggttcaagcttatgtttcagcagctaaacacccttttgcttctgtggtggctcaggaggtttttcagagtggaatcattccttcagatactgactttcgtatctacagggattttgggaacattccaggaatagacttagcttttattgagaatggatacatttatcacaccaagtatgacacagcggacagaattctaacagattccattcagagagcaggtgacaacattttagcagttcttaagcatctagctacatctgatatgctggctgctgcttctaagtatcgacatggaaacatggtcttctttgatgtgctgggcctgtttgtcattgcctacccctctcgtattggctcaatcataaactacatggtggtaatgggtgttgttttgtacctgggcaaaaaatttttgcagcccaaacataagactggtaactacaagaaggacttcttgtgtggacttggcatcactttgatcagctggttcactagccttgttaccgttctcattatagcagtgttcatctctcttattggacagtctctctcatggtataaccacttctatgtctccgtttgtctgtatggaactgcaactgtagccaaaataatacttatacatactcttgcgaaaagattttattacatgaatgccagtgcccagtatctgggagaagtattttttgacatttcgctgtttgtccattgctgttttcttgttaccctcacttaccaaggactttgctcggcgtttattagtgctgtctgggtagcattcccattgctcacaaagctctgtgtgcataaggacttcaagcagcatggtgcccaaggaaaatttattgctttttaccttttggggatgtttattccttatctttatgcattgtacctcatctgggcagtatttgagatgtttacccctatcctcgggagaagtggttctgaaatcccacctgatgttgtgctggcatccattttggctggctgtacaatgattctctcgtcctattttattaacttcatctaccttgccaagagcacaaaaaaaaccatgctaactttaactttggtatgtgcaattacattcctccttgtttgcagtggaacattttttccatatagctccaatcctgctaatccgaagccaaagagagtgtttcttcagcatatgactagaacattccatgacttggaaggaaatgcagttaaacgggactctggaatatggatcaatgggtttgattatactggaatttctcacataacccctcacattcctgagatcaatgatagtatccgagctcactgtgaggagaatgcacctctttgtggttttccttggtatcttccagtgcactttctgatcaggaaaaactggtatcttcctgccccagaagtttctccaagaaatcctcctcatttccgactcatatccaaagaacagacaccttgggattctataaaattgacttttgaagcaacaggaccaagccatatgtccttctatgttcgagcccacaaagggtcaacactttctcagtggtctcttggcaatggcaccccagtcacaagtaaaggaggagactactttgtcttttactcccatggactccaggcctctgcatggcagttctggatagaagtgcaggtttcagaagaacatcctgaaggaatggtcaccgtggccattgctgcccactatctgtctggggaagacaagagatcccctcaactggatgctctgaaggaaaagttcccagattggacatttccctctgcctgggtgtgcacctacgatctctttgtattttaatcttgtggatgagctctaagtacatgcccagtggatactccatgtgacatggtttctccctatgttacgtggatgtttgtaacgtaagtcaatgaattttaatgatcatatgttcaaagagctttctgggttaacgcttttcagggccaagcactataagggtttagctgtggcgcagtgatgcatggcctgttgacacttgaaaatgccagtcttttggcacttcagcacatgtgggtactgccactacacacacgtcattttatatgaccttaaggacaaagccaacaatccacttcaatagctgcccctttaggatcaagaaagatgtacactgtcagagcattgttaatgagacaaaagttgtttccaatttaagccccaaaaccatttgttgtattagtggatggtgggtaaaatatcattcactgaggtaatgattccccttgagaatataactctgtgtaggtcactggaaagtgattgccatagggctgggagagaagcattgcactcttgaggctgtagcctgtgtcaagctgtttcttcaggcagcctctcaaatgtgctttgtctctctgtgctgaggcctggaccctgtgctgagctggtgactcactgtcctgacaagtggacacacagatgcactgctgtgctgctttcctgaggtggttttctatgcctgttttcctctgaaacatgtctgttacccctctccatcttaccaagttgaaaaggggaatatttggccacatacccctctggttttcgtaggttcttttggttcagaatattgtttgtgccagtacatgaccttaacttccttcctcagagcactgagctgccatctgggctattctggggtagaaggaaggctgggagtggtgggaattttataaatatttattctcttttctttgtttcataggagtcttgtgttatacaaggttagtccttcatggtataatcttactgatgcactgggcctatctttttgttttccagccagttgaatagattagtttttctcagtaacttactatccagcagactggctttcctgagacttgaggttgtggcttatactggaatgagaccactgtacgtgtaggtggttcagatcctgcgtaatggcagcatgaggacttaaaaggtggttttcattttgaagatggctatgtagcttgtaaggtgtatcacagcagtacctctcatggctttttggttccagcagtgagggcattggtgagatcaatggtaaactgtgcaagctttctttttatcattaggaaatgtgaaacgttggacaaattttgagttttaacaaggacaaaaagttgaaagaaaaggcacagttaacaaaaaagggtggctagatttatcttgggtgatggaggaaatgagagaggaatgctcttgaaaggtggtctgtggatctgtctgaatagaaagagcacagtaagtatgcattgccggagaaaacgtccttgaagctgcttgtctcatgtgtatgatgtgctttttaaatcatgcccctcgttgcctgcctaatctgtgactccctaaaaactaactgggcccatgtagatggggctgcaaccagagctgaataacatgttaggctcacacatgcatcagcactgcacactggaatcattgctcttcctggactttgtagaaatcagtctcaagtgcttcaagagtctggctcctgctacttttatctgtcaggtagcacataaggtttgcagggtttatattttgtatagaatcacagttgtggagaaaaagtaataatttctcaatgaattttaaaaatgggcctattttctatccccgtggttcatctgatataattagtgttccctgtgaattccccccctctatgggaaggatgcctttactctttatcagtaataaattatgactgttttcatattgccttagggttatttccctgtgtaaaccattgtcttttgttttggttttctttagcattatgaagctttggtattgtacaaggtcagtagtaagatgctcactagtctcagggcttgtgtaatattctgggaggtcatttaaatgccagaaatggtcaagcaattatacacagtatttatgactctgttaagcataccgtttgtctgtcacattagtagattctgagattaaaaaaaatttttaaagagtgatcatttaaataatttctaaaagggtcttttcaagctctaacaaagtcactaacaaatgcattattttctacagaattagatgttagtagtacagtactgcatattcagggaaaaagtgtgaggaattgatttcaaaatagttcgttcttgtgtttgacctaagaatgattgtcgcatgaagtgtttgtttttacagtttagcatatataaacaaacatgataggattccttaagatgttaccacccagggggccacaagccagcctgctgtctcaggaagctgtagaaggagtgtttgtcaatttcttgtcactggtttgctgacttactgaggattaattgttgccttacaatgttactgaaataaactgtttaatataaaaaaaaaaaaaaa

SEQ ID NO: 1866 - DNA, 4416 bp, Homo sapiens
agtgtgcgctcttcaggacagcagaggtcggttggaggtctgcattctctgccgacttgggccccaacttccccatcaggtcactgctccctcctctgaggtctggacaaaggacaaggctgtagggacctagactgtcctagacggggaggacatctatcctcagtggtctttccagcagtttgtttggagctgctcatcctgatcttttggctgactctggcagagggaaagtcagatttgaggcctgagctctaacaggcatccagagaggaaggaagggcccaccccgtgacatcagtgaaacggaagcaccctgcaggtgacatcactgttgctcagggcaacgcctccaccctaaggcggacggggaggtgaaaaatcggcctcaagtgtgagacgcatgttgaagggaagggacatagaaggtgtaacgttcacaggaaagctccaaccatggccatggggctcttccgcgtgtgtctggtggtggtgacggccatcatcaaccacccgctgctgttcccgcgggagaacgccacagtccccgagaacgaggaggagatcatccgcaagatgcaggcgcaccaggagaagctgcagctggagcagttgcgcctggaggaggaggtggctcggctggcggccgaaaaggaggcactggagcaggtggcggaggagggcaggcagcagaacgagacacgcgtggcctgggacctctggagcaccctctgcatgatcctcttcctgatgatcgaggtgtggcggcaggaccaccaggaggggccctcacctgagtgcctgggcggtgaggaggatgagctgcctgggctggggggcgcccccttgcagggcctcaccctgcccaacaaggccacgcttggccacttttatgagcgctgcatccggggggccacggccgatgcagcccgtacccgggagttcctggaaggcttcgtggatgacttgctggaagccctgaggagcctctgcaaccgggacaccgacatggaggtggaggacttcattggcgtggacagcatgtacgagaactggcaggtggacaggccactgctgtgccaccttttcgtgcccttcacaccccccgagccctaccgcttccacccagagctctggtgctccggccgctcagtgcccctggatcgccagggctacggccagatcaaggtggtccgcgccgatggggacacattgagctgcatctgcggcaagaccaagctcggggaagacatgctgtgtctcctgcacggcaggaacagcatggcgcctccctgcggcgacatggagaacctgctgtgtgccacagattccctgtacctggacacgatgcaggtcatgaagtggttccagacggccctcaccagagcctggaagggcatcgcccacaagtacgagttcgacctggcctttggccagctggacagcccggggtccctgaagatcaagttccgttcagggaagttcatgcccttcaacctgattcctgtgatccagtgtgatgactcggacctgtactttgtctcccaccttcccagggagccctctgagggcaccccagcctccagcacagactggctcctgtcctttgctgtctatgagcgacacttcctcaggacgacactaaaggcactgcccgagggcgcctgccacctcagctgcctgcagatagcatccttcctgctctccaagcagagccgcctgaccggtcccagcgggctcagcagctaccacctgaagacggccctactgcacctcctactcctccggcaggccgccgactggaaggcggggcagctggacgctcgtctgcacgagttgctgtgcttcctggagaagagcttgctccagaagaagctccaccacttcttcatcggcaaccgcaaggtgcctgaggccatgggactccctgaggccgtgctcagggccgagcccctcaacctcttccggcccttcgtcctgcagcgaagcctttaccgtaagacactggactccttctatgagatgctcaagaatgccccagcgctcattagcgagtattccctacatgtcccctcagaccagcctaccccaaaaagctgacgtcttttacagaatgtgggatcctcgagctaagatgagggcatccctcacgttcacacccctggtggcatctgccagccctgttctggggacaaggcgggctttcgtgggagccgtgctcagcctgccaggaagccaagccctacagtgcagaggaaacagaatttcaacgggaagctggtttgcttcataccattgggatctgctggtaaagctgttatttgggtttagggactgatcccttgcagtttacttctggatcaccatgaatggccaagatggtggcagaacacgctgtggaccctgagttagagacaatgcaaatgttggattgggtgtaattctttttgaatcccagatccagtctgtacttgaatatgagcagaggatctacaagaatgctgacagggaaccgtgttaagacccagcacccctattcccaggagcttctggcctgaccatctgcagccaaagcactaacagggacagatatgggaatgtccacctttgatccgcatcctgcacaatagtggtcccaccatggctgccacttttttatactatttggagaaaagaccttgtataaattcgaggcccgaatgactaacgtctctgtcacacggaaatgggtacttggtggcatagagaaacacaattagccactttttcagctacacttctcactcagctgcaccctacacttctcactcaggtgcacccccttctgctgtcctttccccaacgtactgggtcccgagcgtggtgggtatttgccacactgggtgccagctcagcagccccccacctctctttattctctccaaagctggtctttctgactatcattgtggtagggggaggacagatgctaaaggtggaagctgacctggagaaagagacacacggggtgactgtggcaaaggacagctggaaaagaaactctatcacttcttcattggcaaccacaaggcacctgaggccatggcactcccagaggctgtgcgcagagccaagcctctcaacctcttctggccctgcgtcctgcagcgaagtctctgctgtaagacagtagactccttcgatgaggtgctcaaaaatgctacccggggtggtggtgtctggcttgcagtctggcccagttcagagaaagttgcagagatcaggggccaaggatgtcatagccccaggttgtcctcagggtcccaatcctagggcagggtgtgcatggaagcaagaactatggaaacctagctccagtctgcaggctctgagcccctagttcctcactccagcggggctccctcactgcacagaacccaccccttctgtgtgggcactgctgaccacacagatgacccagacccaaagagcctggcagaagctctgtggttggagctgggctccgtctccaggtctggttcagggggatcaggaaggctcttttccacctgtggcttcactggccctttgagatttcctatctcaccgttacttcagttacccttgcagggggccagggagtcaagaatataccgtgttcctccagggtttaagccggccatgccttcccgagagcataaccaacttgacaggggtgcccagttaccccacaaactgaaggaaggagatccttcccccgtccccaggagtgctctcaaccagcctcagaaagcttgagaagatggaccctttgcccaccagggttaattcctggtggggcagctcggctgtgatcagggcaaccaaacctataggaagccttccagtgtgagctggaattagactgaacatgtgcttgggcctgcctctccctagacgcagttgcggggcactccagggaatgaaccagctcaagtgtgtccctaacagcagcctggagctacccccaatccctcacagcctgaccctcctcattccatcagatgcatttgtagaatcggggcaaatttccttatttatttatggcccatgcctttccccctcttcatcctgatcccgttttgctttgaagagaccccagtaaccaaaaaacagcctccagaagccaaaaccatgcctggatctcccatagcttctcctttgcttccaggagaaagttcactgaaaaaaaaatatcttctggcttcttgtgtgtacagagacaacagaactcggtggggaaacgggaatcttttctgcaccaaagctgcttctaaagcagaaagcagtggggctcttggtgtttcatgctgccttatttatattaaaggaagaattaaatcttgcaaggagtagaaatggtcactgtttgtttttaacttcaggaaatctgtgagg

SEQ ID NO: 1867 - DNA, 4416 bp, Homo sapiens; identical to SEQ ID NO: 1866

SEQ ID NO: 1868 - DNA, 5189 bp, Homo sapiens
agcgcagtgcggataaacaggaagcgggcggtggaggcagcagcagagggagagctcggggcttggaggggaaacagcggaagacctaagattatcgggagggcagcagaggcagagaacgaggacaggacccttggccgtcttcttccagggaacgagaggtcacagcctcgctctccgcttaggcttctggcgccccagcttaaagccgaggctgcggctgacaaagggctcgcgccggtgccgccgcccttctcatccgggcattcgggtccctgcggagagggagggggaagggcagagggggaggggaaggagccggaggggcgcacacttggagctgaagccctctccagggctccgggccggtgccccaacggacagaggtcgaggaggacccgcagaggtggcagcggccgggggcaggaggatggtgcagaaggagagtcaagcgacgttggaggagcgggagagcgagctcagctccaaccctgccgcctctgcgggggcatcgctggagccgccggcagctccggcacccggagaagacaaccccgccggggctgggggagcggcggtggccggggctgcaggaggggctcggcggttcctctgcggtgtggtggaaggattttatggaagaccttgggttatggaacagagaaaagaactctttagaaggctccagaaatgggaattaaatacatacttgtatgccccaaaagatgactacaaacataggatgttttggcgagagatgtattcagtggaggaagctgagcaacttatgactctcatctctgctgcacgagaatatgagatagagttcatctatgcgatctcacctggattggatatcactttttctaaccccaaggaagtatccacattgaaacgtaaattggaccaggtttctcagtttgggtgcagatcatttgctttgctttttgatgatatagaccataatatgtgtgcagcagacaaagaggtattcagttcttttgctcatgcccaagtctccatcacaaatgaaatctatcagtacctaggagagccagaaactttcctcttctgtcccacagaatactgtggcactttctgttatccaaatgtgtctcagtctccatatttaaggactgtgggtgaaaagcttctacctggaattgaagtgctttggacaggtcccaaagttgtttctaaagaaattccagtagagtccatcgaagaggtttctaagattattaagagagctccagtaatctgggataacattcatgctaatgattatgatcagaagagactgtttctgggcccgtacaaaggaagatccacagaactcatcccacggttaaaaggagtcctcactaatccaaattgtgaatttgaagccaactacgttgctatccacacccttgccacctggtacaaatcaaacatgaatggagtgagaaaagatgtagtgatgactgacagtgaagatagtactgtgtccatccagataaaattagaaaatgaaggcagtgatgaagatattgaaactgatgtactctatagtccacagatggctctaaagctagcattaacagaatggttgcaagagtttggtgtgcctcatcaatacagcagtaggcaagttgcacacagtggagctaaagcaagtgtagttgatgggactcctttagttgcagcaccctctttaaatgccacaaccgtagtaacaacagtttatcaggagcccattatgagccagggagcagccttgagtggtgagcctactactctgaccaaggaagaagaaaagaaacagcctgatgaagaacccatggacatggtggtggaaaaacaagaagaaacggaccacaagaatgacaatcaaatactgagtgaaattgttgaagcgaaaatggcagaggaattgaaaccaatggacactgataaagagagcatagctgaatcaaaatccccagagatgtccatgcaagaagattgtattagtgacattgcccccatgcaaactgatgaacagacaaacaaggagcagtttgtgccaggtccaaatgaaaagcctttgtacactgcggaaccagtgaccctggaggatttgcagttacttgctgatctattctaccttccttacgagcatggacccaaaggagcacagatgttacgggaatttcaatggcttcgagcaaatagtagtgttgtcagtgtcaattgcaaaggaaaagactctgaaaaaattgaagaatggcggtcacgagcagccaagtttgaagagatgtgtggactagtgatgggaatgttcactcggctctccaattgtgccaacaggacaattctttatgacatgtactcctatgtttgggatatcaagagtataatgtctatggtgaagtcttttgtacagtggttagggtgtcgtagtcattcttcagcacaattcttaattggagaccaagaaccctgggcctttagaggtggtctagcaggagagttccagcgtttgctgccaattgatggggcaaatgatctcttttttcagccacctccactgactcctacctccaaagtttatactatcagaccttattttcctaaggatgaggcatccgtgtacaagatttgcagagaaatgtatgacgatggagtgggtttaccctttcaaagtcagcctgatcttattggagacaagttagtaggagggctgctttccctcagcctggattactgctttgtcctagaagatgaagatggcatatgtggttatgccttgggcactgtagatgtgaccccctttattaaaaaatgtaaaatttcctggatccccttcatgcaggagaagtataccaagccaaatggtgacaaggaactctctgaggctgagaaaataatgttgagtttccatgaagaacaggaagtactgccagaaactttccttgctaatttcccttctctgataaagatggacattcacaaaaaagtaactgacccaagtgtggccaaaagcatgatggcttgcctcctgtcttcactgaaggctaatggctcccggggagctttctgtgaagtgagaccagatgataaaagaattctggaattttacagcaagttaggatgttttgaaattgcaaaaatggaaggatttccaaaggatgtggttatacttggtcggagcctgtgacatttgttgacactgtgaactgtccaaaagtctcttaactgcaccttgtgaatggtagttgaggtcttcatacagttcagcctctagaatggtaacaaatcagccaattggattcgaaacaaagaagactatgtaaaactcacccatcacactttgagactactcactggttggaagaatatagtattgcagcaaatcctgtatgaaagagagatgtgggcttcctttttgagtcttgtgttaggtgctgagaccttttacatgggcttatacagggagagagtcttcaataaatgtagtcagcactattttctgcatccagtgtggttgcgtttctcacctgagagtaatcaagataacatctgtcatcttccttggtttattgagtgaaatgcctctcagtcttaggggacatggcagagatgaaagaaagaaagagtgggtttcagaagtgtcagggtggagtgattccaagtgggatggttgtggcattagtttaagctgaataaataatttcaatttggggcagttattctgctttttgtaaagccgtggccaattgtctcctgtaatgactgttggttcaggcatgttgtactttgtagggacaaatgtgcatttgtttgtggcaaaagcctacaattgacaaacttgtaaatttctttgtatataaactagctgtaacctgactatcctttgtgtttactgtttttgtaaatttttttcctctataaatgaaagggtgttggttcagaatggcactttgaataatgtaaaccagtgaaaagtggattttctttacttttgtctttgggtttggggttgtttttgttctttttgaagttttattatttttaaagtgcctcccacctaggcgtaggccatgaccatttggggtacgagagcctaattttgtaggacttaatctgttgaaaagtgcagttacttctggaaattaacctcaatattaggtcagcatgtgaaatgttggatttgacatgtcaggtagggttcagggactgattggtcccatttgccctcaggtcagttgtttaatctcaagacctgttactactgattttattaaatcagagtctttaattcttgcatgtttgtatctaatttctgaacgaatgagcacactttaaccagttatttacagttacctttttcctttaaccggattgtgaaagcttcatgtattttaatttagattctgtgtttttaagggttctgagcatgaagctggcagatagtcggcaggactcattttttcatcatggctggctgatttctccatagattgataacagtattttgttatcttgcttctctgtagttttgcatcagctgtttaactttgagctgagtgaggggagaggggtaaagagaaagaaacttaagttttctttcacagaactccaccattgtgggctttgagagagccctaaagcattgtacctagtggtacctagtgacttccaaccaaagcctttgagtatgcactaaataggtgagaagaaaggagagaaggtttttaggttagaaacctttaaccgatagaaggatatggtatgttgtaaagctggaaccaagtttgcatttttgagggcttgagatgaagggaagactcttaccagatagtaagacagctgagttttcctcagttttctcgtcttaacactagtggacaattctagcattttgtttggaggatttcagagttaacctcatggaattcaggattttttagcaagtttgcttttggttttatcttggcttttagtaatcatgttggctggtctggtcacaggtgactgtgaaacagatgccctggtcttgctttcatcactctaggatcatgaagtgctatgctatttcctggttatgaatattaaggttggaattacatttttattgattgtttggatcagagctcagttcctgtagaaaacgaactgtaaaagaccatgcaagaggcaaaataaaacttgaagtgaatgcttgt

SEQ ID NO: 1869 - DNA, 5189 bp, Homo sapiens; identical to SEQ ID NO: 1868

SEQ ID NO: 1870 - DNA, 3289 bp, Homo sapiens
agcgcagtgcggataaacaggaagcgggcggtggaggcagcagcagagggagagctcggggcttggaggggaaacagcggaagacctaagattatcgggagggcagcagaggcagagaacgaggacaggacccttggccgtcttcttccagggaacgagaggtcacagcctcgctctccgcttaggcttctggcgccccagcttaaagccgaggctgcggctgacaaagggctcgcgccggtgccgccgcccttctcatccgggcattcgggtccctgcggagagggagggggaagggcagagggggaggggaaggagccggaggggcgcacacttggagctgaagccctctccagggctccgggccggtgccccaacggacagaggtcgaggaggacccgcagaggtggcagcggccgggggcaggaggatggtgcagaaggagagtcaagcgacgttggaggagcgggagagcgagctcagctccaaccctgccgcctctgcgggggcatcgctggagccgccggcagctccggcacccggagaagacaaccccgccggggctgggggagcggcggtggccggggctgcaggaggggctcggcggttcctctgcggtgtggtggaaggattttatggaagaccttgggttatggaacagagaaaagaactctttagaaggctccagaaatgggaattaaatacatacttgtatgccccaaaagatgactacaaacataggatgttttggcgagagatgtattcagtggaggaagctgagcaacttatgactctcatctctgctgcacgagaatatgagatagagttcatctatgcgatctcacctggattggatatcactttttctaaccccaaggaagtatccacattgaaacgtaaattggaccaggtttctcagtttgggtgcagatcatttgctttgctttttgatgatatagaccataatatgtgtgcagcagacaaagaggtattcagttcttttgctcatgcccaagtctccatcacaaatgaaatctatcagtacctaggagagccagaaactttcctcttctgtcccacagaatactgtggcactttctgttatccaaatgtgtctcagtctccatatttaaggactgtgggtgaaaagcttctacctggaattgaagtgctttggacaggtcccaaagttgtttctaaagaaattccagtagagtccatcgaagaggtttctaagattattaagagagctccagtaatctgggataacattcatgctaatgattatgatcagaagagactgtttctgggcccgtacaaaggaagatccacagaactcatcccacggttaaaaggagtcctcactaatccaaattgtgaatttgaagccaactacgttgctatccacacccttgccacctggtacaaatcaaacatgaatggagtgagaaaagatgtagtgatgactgacagtgaagatagtactgtgtccatccagataaaattagaaaatgaaggcagtgatgaagatattgaaactgatgtactctatagtccacagatggctctaaagctagcattaacagaatggttgcaagagtttggtgtgcctcatcaatacagcagtaggcaagttgcacacagtggagctaaagcaagtgtagttgatgggactcctttagttgcagcaccctctttaaatgccacaaccgtagtaacaacagtttatcaggagcccattatgagccagggagcagccttgagtggtgagcctactactctgaccaaggaagaagaaaagaaacagcctgatgaagaacccatggacatggtggtggaaaaacaagaagaaacggaccacaagaatgacaatcaaatactgagtgaaattgttgaagcgaaaatggcagaggaattgaaaccaatggacactgataaagagagcatagctgaatcaaaatccccagagatgtccatgcaagaagattgtattagtgacattgcccccatgcaaactgatgaacagacaaacaaggagcagtttgtgccaggtccaaatgaaaagcctttgtacactgcggaaccagtgaccctggaggatttgcagttacttgctgatctattctaccttccttacgagcatggacccaaaggagcacagatgttacgggaatttcaatggcttcgagcaaatagtagtgttgtcagtgtcaattgcaaaggaaaagactctgaaaaaattgaagaatggcggtcacgagcagccaagtttgaagagatgtgtggactagtgatgggaatgttcactcggctctccaattgtgccaacaggacaattctttatgacatgtactcctatgtttgggatatcaagagtataatgtctatggtgaagtcttttgtacagtggttaggtaggtgcaccaggaataatctcttctcctcaaatatattgtccctttaaaaaaaattatcccacagggagaaaaacatttagggaattggcacatttccaagtctcttcaattcgttgcctaggtttctttcaaaaataggcattattgaagacttgagatgcaagtcttagtaaatacatcaagcacattaatttttctcccttgggctaattcagcataagtatcttaaaaggaaccctgtataccacttttatctgatttggagatgagacactatgaaatgtgactccacaagctttctgctgcttgctgtgtcttgataacattaatgctatgtttaacagaacaattgctgaaatgacctaaagggcctggcaagaggaagccatcctcccagccctgtgcgcatgcgagctttagtgtaaggctattctggtgctattcagtattatttcacgtggctttttctttatccttctaccaagtattggttttaccaggggatagaaattgtaatcccctaaacatctctgctacattaaatggacttttgtatgtctcctttgaacactgattttttttttttaaattgtcaaacttggtaaaaagcaccagcatggccaagtttctctagggacttcatttcattttcaggttttcaatccagctataaggaatatgtaatggacttatatacagcacacagcaggcagcaaggctgactgacatgtcatagttttcatagtagtcacaaatactatgatgggtttcatggtcttggttgtgaaatagatatctgaaacaccgtgagcttagaataaaaagtagtagtgagattttccactttctgcctgtatacctttgagctctta

SEQ ID NO: 1871 - DNA, 5147 bp, Homo sapiens
aggcagcagcagagggagagctcggggcttggaggggaaacagcggaagacctaagattatcgggagggcagcagaggcagagaacgaggacaggacccttggccgtcttcttccagggaacgagaggtcacagcctcgctctccgcttatgcttctggcgccccagcttaaagccgaggctgcggctgacaaagggctcgcgccggtgccgccgcccttctcatccgggcattcgggtccctgcgagaaggagggggaaggacagagggggaggggaaggagccggaggggcgcacacttggagctgaagccctctccagggctccgggccggtgccccaacggacagaggtcgaggaggacccgcagaggtggcagcggccgggggcaggaggatggtgcagaaggagagtcaagcgacgttggaggagcgggagagcgagctcagctccaaccctgccgcctctgcgggggcatcgctggagccgccggcagctccggcacccggagaagacaaccccgccggggctgggggagcggcggtggccggggctgcaggaggggctcggcggttcctctgcggtgtggtggaaggattttatggaagaccttgggttatggaacagagaaaagaactctttagaaggctccagaaatgggaattaaatacatacttgtatgccccaaaagatgactacaaacataggatgttttggcgagagatgtattcagtggaggaagctgagcaacttatgactctcatctctgctgcacgagaatatgagatagagttcatctatgcgatctcacctggattggatatcactttttctaaccccaaggaagtatccacattgaaacgtaaattggaccaggtttctcagtttgggtgcagatcatttgctttgctttttgatgatatagaccataatatgtgtgcagcagacaaagaggtattcagttcttttgctcatgcccaagtctccatcacaaatgaaatctatcagtacctaggagagccagaaactttcctcttctgtcccacagaatactgtggcactttctgttatccaaatgtgtctcagtctccatatttaaggactgtgggtgaaaagcttctacctggaattgaagtgctttggacaggtcccaaagttgtttctaaagaaattccagtagagtccatcgaagaggtttctaagattattaagagagctccagtaatctgggataacattcatgctaatgattatgatcagaagagactgtttctgggcccgtacaaaggaagatccacagaactcatcccacggttaaaaggagtcctcactaatccaaattgtgaatttgaagccaactacgttgctatccacacccttgccacctggtacaaatcaaacatgaatggagtgagaaaagatgtagtgatgactgacagtgaagatagtactgtgtccatccagataaaattagaaaatgaaggcagtgatgaagatattgaaactgatgtactctatagtccacagatggctctaaagctagcattaacagaatggttgcaagagtttggtgtgcctcatcaatacagcagtaggcaagttgcacacagtggagctaaagcaagtgtagttgatgggactcctttagttgcagcaccctctttaaatgccacaaccgtagtaacaacagtttatcaggagcccattatgagccagggagcagccttgagtggtgagcctactactctgaccaaggaagaagaaaagaaacagcctgatgaagaacccatggacatggtggtggaaaaacaagaagaaacggaccacaagaatgacaatcaaatactgagtgaaattgttgaagcgaaaatggcagaggaattgaaaccaatggacactgataaagagagcatagctgaatcaaaatccccagagatgtccatgcaagaagattgtattagtgacattgcccccatgcaaactgatgaacagacaaacaaggagcagtttgtgccaggtccaaatgaaaagcctttgtacactgcggaaccagtgaccctggaggatttgcagttacttgctgatctattctaccttccttacgagcatggacccaaaggagcacagatgttacgggaatttcaatggcttcgagcaaatagtagtgttgtcagtgtcaattgcaaaggaaaagactctgaaaaaattgaagaatggcggtcacgagcagccaagtttgaagagatgtgtggactagtgatgggaatgttcactcggctctccaattgtgccaacaggacaattctttatgacatgtactcctatgtttgggatatcaagagtataatgtctatggtgaagtcttttgtacagtggttagggtgtcgtagtcattcttcagcacaattcttaattggagaccaagaaccctgggcctttagaggtggtctagcaggagagttccagcgtttgctgccaattgatggggcaaatgatctcttttttcagccacctccactgactcctacctccaaagtttatactatcagaccttattttcctaaggatgaggcatccgtgtacaagatttgcagagaaatgtatgacgatggagtgggtttaccctttcaaagtcagcctgatcttattggagacaagttagtaggagggctgctttccctcagcctggattactgctttgtcctagaagatgaagatggcatatgtggttatgccttgggcactgtagatgtgaccccctttattaaaaaatgtaaaatttcctggatccccttcatgcaggagaagtataccaagccaaatggtgacaaggaactctctgaggctgagaaaataatgttgagtttccatgaagaacaggaagtactgccagaaactttccttgctaatttcccttctctgataaagatggacattcacaaaaaagtaactgacccaagtgtggccaaaagcatgatggcttgcctcctgtcttcactgaaggctaatggctcccggggagctttctgtgaagtgagaccagatgataaaagaattctggaattttacagcaagttaggatgttttgaaattgcaaaaatggaaggatttccaaaggatgtggttatacttggtcggagcctgtgacatttgttgacactgtgaactgtccaaaagtctcttaactgcaccttgtgaatggtagttgaggtcttcatacagttcagcctctagaatggtaacaaatcagccaattggattcgaaacaaagaagactatgtaaaactcacccatcacactttgagactactcactggttggaagaatatagtattgcagcaaatcctgtatgaaagagagatgtgggcttcctttttgagtcttgtgttaggtgctgagaccttttacatgggcttatacagggagagagtcttcaataaatgtagtcagcactattttctgcatccagtgtggttgcgtttctcacctgagagtaatcaagataacatctgtcatcttccttggtttattgagtgaaatgcctctcagtcttaggggacatggcagagatgaaagaaagaaagagtgggtttcagaagtgtcagggtggagtgattccaagtgggatggttgtggcattagtttaagctgaataaataatttcaatttggggcagttattctgctttttgtaaagccgtggccaattgtctcctgtaatgactgttggttcaggcatgttgtactttgtagggacaaatgtgcatttgtttgtggcaaaagcctacaattgacaaacttgtaaatttctttgtatataaactagctgtaacctgactatcctttgtgtttactgtttttgtaaatttttttcctctataaatgaaagggtgttggttcagaatggcactttgaataatgtaaaccagtgaaaagtggattttctttacttttgtctttgggtttggggttgtttttgttctttttgaagttttattatttttaaagtgcctcccacctaggcgtaggccatgaccatttggggtacgagagcctaattttgtaggacttaatctgttgaaaagtgcagttacttctggaaattaacctcaatattaggtcagcatgtgaaatgttggatttgacatgtcaggtagggttcagggactgattggtcccatttgccctcaggtcagttgtttaatctcaagacctgttactactgattttattaaatcagagtctttaattcttgcatgtttgtatctaatttctgaacgaatgagcacactttaaccagttatttacagttacctttttcctttaaccggattgtgaaagcttcatgtattttaatttagattctgtgtttttaagggttctgagcatgaagctggcagatagtcggcaggactcattttttcatcatggctggctgatttctccatagattgataacagtattttgttatcttgcttctctgtagttttgcatcagctgtttaactttgagctgagtgaggggagaggggtaaagagaaagaaacttaagttttctttcacagaactccaccattgtgggctttgagagagccctaaagcattgtacctagtggtacctagtgacttccaaccaaagcctttgagtatgcactaaataggtgagaagaaaggagagaaggtttttaggttagaaacctttaaccgatagaaggatatggtatgttgtaaagctggaaccaagtttgcatttttgagggcttgagatgaagggaagactcttaccagatagtaagacagctgagttttcctcagttttctcgtcttaacactagtggacaattctagcattttgtttggaggatttcagagttaacctcatggaattcaggattttttagcaagtttgcttttggttttatcttggcttttagtaatcatgttggctggtctggtcacaggtgactgtgaaacagatgcccctggtcttgctttcatcactctaggatcatgaagtgctatgctatttcctggttatgaatattaaggttggaattacatttttattgattgtttggatcagagctcagttcctgtagaaaacgaactgtaaaagaccatgcaagaggcaaaataaaacttgaagtgg

SEQ ID NO: 1872 - DNA, 5189 bp, Homo sapiens; identical to SEQ ID NO: 1868

SEQ ID NO: 1873 - DNA, 3478 bp, Homo sapiens
cgtggcgggttgtggtaggtcgtggtctgaggccggtacagctgcgcgtctgcgggaataggtgcagcgggcccttggcgggggactctgagggaggagctggggacggcgaccctaggagagttctttggggtgactttcaagatggactctactctaacagcaagtgaaatccggcagcgatttatagatttcttcaagaggaacgagcatacgtatgttcactcgtctgccaccatcccattggatgaccccactttgctctttgccaatgcaggcatgaaccagtttaaacccattttcctgaacacaattgacccatctcaccccatggcaaagctgagcagagctgccaatacccagaagtgcatccgggctgggggcaaacataatgacctggacgatgtgggcaaggatgtctatcatcacaccttcttcgagatgctgggctcttggtcttttggagattactttaaggaattggcatgtaagatggctctggaactcctcacccaagagtttggcattcccattgaaagactttatgttacttactttggcggggatgaagcagctggcttagaagcagatctggaatgcaaacagatctggcaaaatttggggctggatgacaccaaaatcctcccaggcaacatgaaggataacttctgggagatgggtgacacgggcccctgtggtccttgcagtgagatccactacgaccggattggtggtcgggacgccgcacatcttgtcaaccaggacgaccctaatgtgctggagatctggaaccttgtgttcatccagtataacagggaagctgatggcattctgaaacctcttcccaagaaaagcattgacacagggatgggcctggaacgactggtatctgtgctgcagaataagatgtccaactatgacactgacctttttgtcccttactttgaagccattcagaagggcacaggtgcccgaccatacactgggaaagttggtgctgaggatgccgatgggattgacatggcctaccgggtgctggctgaccacgctcggaccatcactgtggcactggctgatggtggccggcctgacaacacagggcgtggatatgtgttgagacggattctccgccgagctgtccgatacgcccatgaaaagctcaatgccagcaggggcttctttgctacgttagtggatgttgtcgtccagtccctgggagatgcatttcctgagctgaagaaggacccagacatggtgaaggacatcattaatgaagaagaggtgcagtttctcaagactctcagcagagggcgtcgcatcctggacaggaaaattcagagcctgggagacagcaagaccattcccggagacactgcttggctcctctatgacacctatgggtttccagtggatctgactggactgattgctgaagagaagggcctggtggtagacatggatggctttgaagaggagaggaaactggcccagctgaaatcacagggcaagggagctggtggggaagacctcattatgctggacatttacgctatcgaagagctccgggcacggggtctggaggtcacagatgattccccaaagtacaattaccatttggactccagtggtagctatgtatttgagaacacagtggctacggtgatggctctgcgcagggagaagatgttcgtggaagaggtgtccacaggccaggagtgtggagtggtgctggacaagacctgtttctatgctgagcaaggaggccagatctatgacgaaggctacctggtgaaggtggatgacagcagtgaagataaaacagagtttacagtgaagaatgctcaggtccgaggagggtatgtgctacacattggaaccatctacggtgacctgaaagtgggggatcaggtctggctgtttattgatgagccccgacgaagacccatcatgagcaaccacacagctacgcacattctgaacttcgccctgcgctcagtgcttggggaagctgaccagaaaggctcattggttgctcctgaccgcctcagatttgactttactgccaagggagccatgtccacccaacagatcaagaaggctgaagagattgctaatgagatgattgaggcagccaaggccgtctatacccaggattgccccctggcagcagcgaaagccatccagggcctacgggctgtgtttgatgagacctatcctgaccctgtgcgagtcgtctccattggggtcccggtgtccgagttgctggatgacccctctgggcctgctggctccctgacttctgttgagttctgtgggggaacgcacctgcggaactcgagtcatgcaggagcttttgtgatcgtgacggaagaagccattgccaagggtatccggaggattgtggctgtcacaggtgccgaggcccagaaggccctcaggaaagcagagagcttgaagaaatgtctctctgtcatggaagccaaagtgaaggctcagactgctccaaacaaggatgtgcagagggagatcgctgaccttggagaggccctggccactgcagtcatcccccagtggcagaaggatgaattgcgggagactctcaaatccctaaagaaggtcatggatgacttggaccgagccagcaaagccgatgtccagaaacgagtgttagagaagacgaagcagttcatcgacagcaaccccaaccagcctcttgtcatcctggagatggagagcggcgcctcagccaaggccctgaatgaagccttgaagctcttcaagatgcactcccctcagacttctgccatgctcttcacggtggacaatgaggctggcaagatcacgtgcctgtgtcaagttccccagaatgcagccaatcggggcttaaaagccagcgagtgggtgcagcaggtgtcaggcttgatggacggtaaaggtggtggcaaggatgtgtctgcacaggccacaggcaagaacgttggctgcctgcaggaggcgctgcagctggccacttccttcgcccagctgcgcctcggggatgtaaagaactgagtggggaaggaggaggctcccactggatccatccgtccagccaagagctcttcatctgctacaagaacatttgaatcttgggacctttaaagagcccctcctaacccagcagtaactggaacacacttgggagcagtcctatgtctcagtgccccttaaatttctgccctgagccctccacgtcagtgccatcggtctagaaccactaaccccgcattgctgttgatcgtcacgctcgcatctatagataacggctctccagacctgagctttccgcgtcagcaagtaggaatcgtttttgctgcagagaataaaaggaccacgtgcaatacttaatgccgcatgatctctatccctcttcccaataggggctggctcttttgacagcctttggcgtctgtagaataaatgctgtggctcctgctgg

SEQ ID NO: 1874 - DNA, 3478 bp, Homo sapiens; identical to SEQ ID NO: 1873

SEQ ID NO: 1875 - DNA, 3344 bp, Homo sapiens
ggtacagctgcgcgtctgcgggaataggtgcagcgggcccttggcgggggactctgagggaggagctggggacggcgaccctaggagagttctttggggtgactttcaagatggactctactctaacagcaagtgaaatccggcagcgatttatagatttcttcaagaggaacgagcatacgtatgttcactcgtctgccaccatcccattggatgaccccactttgctctttgccaatgcaggcatgaaccagtttaaacccattttcctgaacacaattgacccatctcaccccatggcaaagctgagcagagctgccaatacccagaagtgcatccgggctgggggcaaacataatgacctggacgatgtgggcaaggatgtctatcatcacaccttcttcgagatgctgggctcttggtcttttggagattactttaaggaattggcatgtaagatggctctggaactcctcacccaagagtttggcattcccattgaaagactttatgttacttactttggcggggatgaagcagctggcttagaagcagatctggaatgcaaacagatctggcaaaatttggggctggatgacaccaaaatcctcccaggcaacatgaaggataacttctgggagatgggtgacacgggcccctgtggtccttgcagtgagatccactacgaccggattggtggtcgggacgccgcacatcttgtcaaccaggacgaccctaatgtgctggagatctggaaccttgtgttcatccagtataacagggaagctgatggcattctgaaacctcttcccaagaaaagcattgacacagggatgggcctggaacgactggtatctgtgctgcagaataagatgtccaactatgacactgacctttttgtcccttactttgaagccattcagaagggcacaggtgcccgaccatacactgggaaagttggtgctgaggatgccgatgggattgacatggcctaccgggtgctggctgaccacgctcggaccatcactgtggcactggctgatggtggccggcctgacaacacagggcgtggatatgtgttgagacggattctccgccgagctgtccgatacgcccatgaaaagctcaatgccagcaggggcttctttgctacgttagtggatgttgtcgtccagtccctgggagatgcatttcctgagctgaagaaggacccagacatggtgaaggacatcattaatgaagaagaggtgcagtttctcaagactctcagcagagggcgtcgcatcctggacaggaaaattcagagcctgggagacagcaagaccattcccggagacactgcttggctcctctatgacacctatgggtttccagtggatctgactggactgattgctgaagagaagggcctggtggtagacatggatggctttgaagaggagaggaaactggcccagctgaaatcacagggcaagggagctggtggggaagacctcattatgctggacatttacgctatcgaagagctccgggcacggggtctggaggtcacagatgattccccaaagtacaattaccatttggactccagtggtagctatgtatttgagaacacagtggctacggtgatggctctgcgcagggagaagatgttcgtggaagaggtgtccacaggccaggagtgtggagtggtgctggacaagacctgtttctatgctgagcaaggaggccagatctatgacgaaggctacctggtgaaggtggatgacagcagtgaagataaaacagagtttacagtgaagaatgctcaggtccgaggagggtatgtgctacacattggaaccatctacggtgacctgaaagtgggggatcaggtctggctgtttattgatgagccccgacgaagacccatcatgagcaaccacacagctacgcacattctgaacttcgccctgcgctcagtgcttggggaagctgaccagaaaggctcattggttgctcctgaccgcctcagatttgactttactgccaagggagccatgtccacccaacagatcaagaaggctgaagagattgctaatgagatgattgaggcagccaaggccgtctatacccaggattgccccctggcagcagcgaaagccatccagggcctacgggctgtgtttgatgagacctatcctgaccctgtgcgagtcgtctccattggggtcccggtgtccgagttgctggatgacccctctgggcctgctggctccctgacttctgttgagttctgtgggggaacgcacctgcggaactcgagtcatgcaggagcttttgtgatcgtgacggaagaagccattgccaagggtatccggaggattgtggctgtcacaggtgccgaggcccagaaggccctcaggaaagcagagagcttgaagaaatgtctctctgtcatggaagccaaagtgaaggctcagactgctccaaacaaggatgtgcagagggagatcgctgaccttggagaggccctggccactgcagtcatcccccagtggcagaaggatgaattgcgggagactctcaaatccctaaagaaggtcatggatgacttggaccgagccagcaaagccgatgtccagaaacgagtgttagagaagacgaagcagttcatcgacagcaaccccaaccagcctcttgtcatcctggagatggagagcggcgcctcagccaaggccctgaatgaagccttgaagctcttcaagatgcactcccctcagacttctgccatgctcttcacggtggacaatgaggctggcaagatcacgtgcctgtgtcaagttccccagaatgcagccaatcggggcttaaaagccagcgagtgggtgcagcaggtgtcaggcttgatggacggtaaaggtggtggcaaggatgtgtctgcacaggccacaggcaagaacgttggctgcctgcaggaggcgctgcagctggccacttccttcgcccagctgcgcctcggggatgtaaagaactgagtggggaaggaggaggctcccactggatccatccgtccagccaagagctcttcatctgctacaagaacatttgaatcttgggacctttaaagagcccctcctaacccagcagtaactggaacacacttgggagcagtcctatgtctcagtgccccttaaatttctgccctgagccctccacgtcagtgccatcggtctagaaccactaaccccgcattgctgttgatcgtcacgctcgcatctatagataacggctctccagacctgagctttccgcgtcagcaagtaggaatcgtttttgctgcagagaataaaaggaccacgtgc

SEQ ID NO: 1876 - DNA, 1861 bp, Homo sapiens
tgtgaggacaaagaccagggccaggcccagggcggagcctccgcggccccgacgcagggactcggcctaggcggaggacggggcggagcgcggccggcaccatcgagccgggaagatggcaccgcccacggagctgctggccaggccggagcgaggcagcgcgcccggctcccgcgccatggggcggctggtggctgtgggcttgctggggatcgcgctggcgctcctgggcgagaggcttctggcactcagaaatcgacttaaagcctccagagaagtagaatctgtagaccttccacactgccacctgattaaaggaattgaagctggctctgaagatattgacatacttcccaatggtctggctttttttagtgtgggtctaaaattcccaggactccacagctttgcaccagataagcctggaggaatactaatgatggatctaaaagaagaaaaaccaagggcacgggaattaagaatcagtcgtgggtttgatttggcctcattcaatccacatggcatcagcactttcatagacaacgatgacacagtttatctctttgttgtaaaccacccagaattcaagaatacagtggaaatttttaaatttgaagaagcagaaaattctctgttgcatctgaaaacagtcaaacatgagcttcttccaagtgtgaatgacatcacagctgttggaccggcacatttctatgccacaaatgaccactacttctctgatcctttcttaaagtatttagaaacatacttgaacttacactgggcaaatgttgtttactacagtccaaatgaagttaaagtggtagcagaaggatttgattcagcaaatgggatcaatatttcacctgatgataagtatatctatgttgctgacatattggctcatgaaattcatgttttggaaaaacacactaatatgaatttaactcagttgaaggtacttgagctggatacactggtggataatttatctattgatccttcctcgggggacatctgggtaggctgtcatcctaatggccagaagctcttcgtgtatgacccgaacaatcctccctcgtcagaggttctccgcatccagaacattctatctgagaagcctacagtgactacagtttatgccaacaatgggtctgttctccaaggaagttctgtagcctcagtgtatgatgggaagctgctcataggcactttataccacagagccttgtattgtgaactctaaattgtacttttggcatgaaagtgcgataacttaacaattaattttctatgaattgctaattctgagggaatttaaccagcaacattgacccagaaatgtatggcatgtgtagttaattttattccagtaaggaacggcccttttagttcttagagcacttttaacaaaaaaggaaaatgaacaggttctttaaaatgccaagcaagggacagaaaagaaagctgctttcgaataaagtgaatacattttgcacaaagtaagcctcacctttgccttccaactgccagaacatggattccactgaaatagagtgaattatatttccttaaaatgtgagtgacctcacttctggcactgtgactactatggctgtttagaactactgataacgtattttgatgttttgtacttacatctttgtttaccattaaaaagttggagttatattaaagactaactaaaatcccagttttgtctgtgtttaattctgaaggcatatggctaggagaaatgggaaagcagctgcttccttatggagtttggataggcaagcatggccatattaatttctcttgtggaaagctgaaagtgaatggactcttaatttgaaacaacaac

SEQ ID NO: 1877 - DNA, 1861 bp, Homo sapiens; identical to SEQ ID NO: 1876

SEQ ID NO: 1878 - DNA, 1825 bp, Homo sapiens
tgtgaggacaaagaccagggccaggcccagggcggagcctccgcggccccgacgcagggactcggcctaggcggaggacggggcggagcgcggccggcaccatcgagccgggaagatggcaccgcccacggagctgctggccaggccggagcgaggcagcgcgcccggctcccgcgccatggggcggctggtggctgtgggcttgctggggatcgcgctggcgctcctgggcgagaggcttctggcactcagaaatcgacttaaagcctccagagaagtagaatctgtagaccttccacactgccacctgattaaaggaattgaagctggctctgaagatattgacatacttcccaatggtctggctttttttagtgtgggtctaaaattcccaggactccacagctttgcaccagataagcctggaggaatactaatgatggatctaaaagaagaaaaaccaagggcacgggaattaagaatcagtcgtgggtttgatttggcctcattcaatccacatggcatcagcactttcatagacaacgaattcaagaatacagtggaaatttttaaatttgaagaagcagaaaattctctgttgcatctgaaaacagtcaaacatgagcttcttccaagtgtgaatgacatcacagctgttggaccggcacatttctatgccacaaatgaccactacttctctgatcctttcttaaagtatttagaaacatacttgaacttacactgggcaaatgttgtttactacagtccaaatgaagttaaagtggtagcagaaggatttgattcagcaaatgggatcaatatttcacctgatgataagtatatctatgttgctgacatattggctcatgaaattcatgttttggaaaaacacactaatatgaatttaactcagttgaaggtacttgagctggatacactggtggataatttatctattgatccttcctcgggggacatctgggtaggctgtcatcctaatggccagaagctcttcgtgtatgacccgaacaatcctccctcgtcagaggttctccgcatccagaacattctatctgagaagcctacagtgactacagtttatgccaacaatgggtctgttctccaaggaagttctgtagcctcagtgtatgatgggaagctgctcataggcactttataccacagagccttgtattgtgaactctaaattgtacttttggcatgaaagtgcgataacttaacaattaattttctatgaattgctaattctgagggaatttaaccagcaacattgacccagaaatgtatggcatgtgtagttaattttattccagtaaggaacggcccttttagttcttagagcacttttaacaaaaaaggaaaatgaacaggttctttaaaatgccaagcaagggacagaaaagaaagctgctttcgaataaagtgaatacattttgcacaaagtaagcctcacctttgccttccaactgccagaacatggattccactgaaatagagtgaattatatttccttaaaatgtgagtgacctcacttctggcactgtgactactatggctgtttagaactactgataacgtattttgatgttttgtacttacatctttgtttaccattaaaaagttggagttatattaaagactaactaaaatcccagttttgtctgtgtttaattctgaaggcatatggctaggagaaatgggaaagcagctgcttccttatggagtttggataggcaagcatggccatattaatttctcttgtggaaagctgaaagtgaatggactcttaatttgaaacaacaac

SEQ ID NO: 1879 - DNA, 3551 bp, Homo sapiens
ggcggctgtgcaccgccatctttgccggtggcggtaagaacacgctgtgtgctaagacctgacggctagcgctgctttggctactgcacgccccgctgtaaggggcccgctgtctccagaagaactggatattctttgttacaattatggcagacaaattaacaagaattgctattgtcaaccacgacaaatgcaaacctaagaaatgtcgacaggagtgcaaaaagagttgccctgtggttcggatgggaaaattgtgcatagaagttacaccccagagcaaaatagcatggatttctgaaactctctgtattggttgtggtatttgtattaagaaatgtccctttggcgccttatcaattgtcaatttgccaagcaacttggaaaaagaaacaacacatcgctactgtgccaatgccttcaagcttcacaggttgcctatccctcgtccaggtgaagttttgggattagttggaactaatggtattggaaagtcaactgcactaaaaattttagcaggaaaacaaaagccaaaccttggaaagtatgatgatccacctgattggcaagagattttgacttatttccgtggatctgaattacaaaattactttaccaagattctcgaagatgacctaaaagccattatcaaacctcaatatgtagaccaaattcccaaggctgcaaaggggacagtgggctctattctggaccgaaaagatgaaacaaagacacaggcaattgtatgtcagcagcttgatttaactcaccttaaagaacgaaatgtcgaagatctttcaggaggagagttgcagagatttgcttgtgctgtcgtttgcatacaaaaggctgatatttttatgtttgatgaaccttctagttacctcgatgtcaagcaacgtttaaaggctgccattacgattcgatctctaataaatccagatagatatatcattgtggtggagcatgatctaagtgtattagactatctctctgacttcatctgctgtctatatggggtaccgagtgcttatggtgttgtcacgatgccttttagtgtaagagaaggcataaatatatttttggatggctatgttccaacagagaacctgaggttcagggatgcgtcgcttgtttttaaggtagctgagacagcaaatgaagaagaagttaaaaagatgtgcatgtataaatatcccgggatgaagaaaaagatgggagagttcgagctagcaattgtagctggagagttcacggactctgagatcatggtgatgctgggggagaatggtacaggtaaaactacatttatcagaatgcttgctggaaggcttaaaccagatgaaggaggagaagtgccagttctaaatgtcagttataagccacagaaaatcagtcccaaatcaacaggaagtgttcgccagttactgcatgaaaagatcagagatgcttacacgcatccgcagtttgtgactgatgtaatgaagcccctacagattgaaaacatcattgaccaagaggtacagacattgtctggtggtgaacttcagcgagtagctttagctctttgtttgggcaaacctgctgacgtctatttgattgatgaaccttctgcatatttggattctgagcaaagattaatggcagctcgggtcgtcaaacgtttcattctccatgcaaagaagacagcttttgttgtagaacatgacttcatcatggccacctatctagcagatcgcgtcatcgtttttgatggtgttccatcaaagaacacagttgcaaacagtcctcagactcttttggctggcatgaacaaatttttgtctcagctcgaaattacattcagaagagaccccaacaactacaggccacgaataaataagctcaattcaatcaaggatgtagaacaaaagaagagtggaaactactttttcttggatgattagattgagtctgaacttataagccatttacttactgggatttttatcatataaaactttaatcaggttttatggccccacatactctggagcttgaagtatgattttcttaatgtgacatcaaaaagccagttgtcttgtaaattgttgtttaagaactattttgttcttaagattaaacctctgtgcatactacatgaacatggagacatttcagattatcagttacctccagattttcacaatctacggggagattttcagttgtatattatattcatgtaccaaatgcttcctggtgttgcccatctttaaaatcttggataaaatctgtacttacctgtttgctaagtgtaccagtataacagaactgcccccttctaaaaagccagtcacagacttgctgccaaagtctgatacataagcatcagggctatatttgctacttgtgttcagtgtgtgcttccaaggaacagtgtctgctacaaacaccattgttggaagatgttgatgaccaacttatgcattgtttttaatgagtttttggtgcttttgaacatctgtcaaaatttatttcagtgccctaatttaactttttttttttagttcttacattctataacaacattcacagtaatgttacttttataaatatataatcactgatcaagattagggaggaggcatttctgaagactatttgcttcctgcagaactataggcttgggctggggagatggttcagtcagtaagtacaagctgcacgctcatgaggaccatatttgagactttagtagaagtgaagtccagcagatccctaaagcccactggcctgccagcctaacacagtctatgagcacattcagtagaaggtcctgtcttaaaagctaagtggacagtaattgaggaagacactctggcaccaacacacacacacaaaacccaaccgatacagtctttatagttggtgcctaagtatctggattttagggtttcggttttaattttgttttgagacagcttgtcgtcctatagcccaagctggcctcaaattaggtatccaaggacaaccttgaatttctcagcccactacctaggcttggattacacagtgctgaggatcaaacccagggctttgtgtgtgctaggcaagcactctaacaactgagctacatccccagccctacatatttagactccagagtcttctgttgagcaaccaaggacaacctaaaacaacttctccagtgagtgcagggaaatagcaatacaaagtgtccattgctgcagtgcatactcatttgttggatacaaaggacattatccacattttactaatatgccaaactggaattatgaggaaggtggattacaatgaacagggcaggcagaacaggaaaattagaaagtatttgacaagactttagaactttaaataataggtctgattaatttgcagacaatgatagaaagtttgttttgactgatacccattaggctttctaaaaatgaatttatataatccataaatatgtatctgttgtaaaggaacacaaagtatatggaataaaatctccctttatcagtttctgaaaaaaaaaaaaaaaa

SEQ ID NO: 1880 - DNA, 3896 bp, Homo sapiens
gtgcggcggctgggcaccgccattttggccggtggccgtgagaacacgctgtgtggctgaaaagtgaaggcaagagctgatttggcctctgtgctcccctccgcaaggggatcgttttctccagagctggatattctttcgcccagttatggcagacaagttaacgagaattgctattgtcaaccatgacaaatgtaaacctaagaaatgtcgacaggaatgcaaaaagagttgtcctgtagttcgaatgggaaaattatgcatagaggttacaccccagagcaaaatagcatggatttccgaaactctttgtattggttgtggtatctgtattaagaaatgcccctttggcgccttatcaattgtcaatctaccaagcaacttggaaaaagaaaccacacatcgatattgtgccaatgccttcaaacttcacaggttgcctatccctcgtccaggtgaagttttgggattagttggaactaatggtattggaaagtcaactgctttaaaaattttagcaggaaaacaaaagccaaaccttggaaagtacgatgatcctcctgactggcaggagattttgacttatttccgtggatctgaattacaaaattactttacaaagattctagaagatgacctaaaagccatcatcaaacctcaatatgtagaccagattcctaaggctgcaaaggggacagtgggatctattttggaccgaaaagatgaaacaaagacacaggcaattgtatgtcagcagcttgatttaacccacctaaaagaacgaaatgttgaagatctttcaggaggagagttgcagagatttgcttgtgctgtcgtttgcatacagaaagctgatattttcatgtttgatgagccttctagttacctagatgtcaagcagcgtttaaaggctgctattactatacgatctctaataaatccagatagatatatcattgtggtggaacatgatctaagtgtattagactatctctccgacttcatctgctgtttatatggtgtaccaagcgcctatggagttgtcactatgccttttagtgtaagagaaggcataaacatttttttggatggctatgttccaacagaaaacttgagattcagagatgcatcacttgtttttaaagtggctgagacagcaaatgaagaagaagttaaaaagatgtgtatgtataaatatccaggaatgaagaaaaaaatgggagaatttgagctagcaattgtagctggagagtttacagattctgaaattatggtgatgctgggggaaaatggaacgggtaaaacgacatttatcagaatgcttgctggaagacttaaacctgatgaaggaggagaagtaccagttctaaatgtcagttataagccacagaaaattagtcccaaatcaactggaagtgttcgccagttactacatgaaaagataagagatgcttatactcacccacaatttgtgaccgatgtaatgaagcctctgcaaattgaaaacatcattgatcaagaggtgcagacattatctggtggtgaactacagcgagtagctttagccctttgcttgggcaaacctgctgatgtctatttaattgatgaaccatctgcatatttggattctgagcaaagactgatggcagctcgagttgtcaaacgtttcatactccatgcaaaaaagacagcctttgttgtggaacatgacttcatcatggccacctatctagcggatcgcgtcatcgtttttgatggtgttccatctaagaacacagttgcaaacagtcctcaaacccttttggctggcatgaataaatttttgtctcagcttgaaattacattcagaagagatccaaacaactataggccacgaataaacaaacttaattcaattaaggatgtagaacaaaagaagagtggaaactactttttcttggatgattagactgactctgagaatattgataagccatttattaaaaggagtatttactagaattttttgtcatataaaacttgaatcaggattttatgccccacatactctggaacttgaagtataatatacttaatataacataaaaagccagttgggttctaaattgtagttgaaacacagaaaatgccacttttctgttcctgaagaggctcttttgtgcataatattctaaaatgaagacatttcaagctatacaaattacttccaagttttcatgatgtatgggaagattttcagtaggtgtattatattcacggtaccaaatgctgaccagtgttgctccattttttaaatcttgaaaagggtttctgtacttacctggtttgccaagtatgccagtgtaatgaaactgcccttattttaaaagccagtcaaagattccactgattgacatttgataaataaacatcaggattatgtttattgtttgttttcagtctttgcactatattaccagtatatggtttccgaggaagattatctactgcaaaacaccactgttggaaaaataggtatttttaaattgtttttaatcttttttggtgcttttaaacatgtttagcaaaaaccaattcagttccattccccgcaaaaaacccctaactttactctgaactttttttgtttttgcattccatgaggttctgtattcagtcattctctaggtaatgtcatttttgtacacatatatttatataatcactgattgagatttaggaaaaagcatttctaaagaatatttgcttcccttagaactacagactcgaaatctttaaagatggtgcctaagcatctatgtattttttttaagttccacagatttttctgttgggcagccaaggattataaaccacttccctaaaggcaacattaatgcaaaagtccccagatggcaatacaaagtatcccctggtaccacatatattcatttgtgagtttggatatagagcacattatctaaaccattttgtagttccaaaaacccatctaaatttcttgagttcctgaattttgaacaggattacctggagcctggagccactttaagttgtacttctgactaaactggaattatgagtgaggaagagtgtttactaaataaatgactggggcaagcaaaattgaggaggaaattagaaactgtttgacaaactttaagagctacttgaaataacagaagtcttgattaatatgcaaataatggctagaaagtatggtttaactggaccctattatgccttttaaaaataatttcagtaacccataaatacatgttgtaaaaaattcaaatatacagaatggaataaaaaaatgatctccctttattaccctcccaaaggttaccagcgtttgaatttaataatgtatattctttcatgcttttttctgtgcacttacctaagtgtgaatatgtaaagggtttgttttgtatacaaatgggattatactaaaataagtaatgcctatttttaaggataggttaaatttgtgaatgatcatttcaaatatattgaataaaataagcaaaagctattgttatttactgatcctggattgtcttaaagaaagtacttgtgatataagagcacagttctacttactgctaatgacagaatatgtattaaacgtattttcatgtaaatgaaatctttaaaatatgtatcttaaaattttacatagcaacagaaaggcctacaattgctaacacaagaaaaatacttataaaatcagtataaaatcaatgcagatgttagcaaaagaatgagactacttcatatgtcctaattggaaaaagtctcaaatacttaaaaaaacaaaaaactggaacagtttattatactaccatttttgtgaaaatatacaaaatattgaaataaaggaatactcaagaaac

SEQ ID NO: 1881 - DNA, 4194 bp, Homo sapiens
tgacccaccggccttgaggaaagcgcaaacgtaaaaaaagattgaaaccggagaggcgaatgcatctgtttacgctaggaccacgctcgacgtcggagaaaagcccacacactcacagtttccagacctggctgcttgccgaaactcagattctcggcacctccagcagctggcttcgccaacggcgttgaacaagggtcgcagctcaatgacgtcatatctccctacctacctccagggttccgcctcacgctctatgtcgcgcgcgcgcactacgtcctatggcttgcgcgtgcggcggctgggcaccgccattttggccggtggccgtgagaacacgctgtgtggctgaaaagtgaaggcaagagctgatttggcctctgtgctcccctccgcaaggggatcgttttctccagaagagctggatattctttcgcccagttatggcagacaagttaacgagaattgctattgtcaaccatgacaaatgtaaacctaagaaatgtcgacaggaatgcaaaaagagttgtcctgtagttcgaatgggaaaattatgcatagaggttacaccccagagcaaaatagcatggatttccgaaactctttgtattggttgtggtatctgtattaagaaatgcccctttggcgccttatcaattgtcaatctaccaagcaacttggaaaaagaaaccacacatcgatattgtgccaatgccttcaaacttcacaggttgcctatccctcgtccaggtgaagttttgggattagttggaactaatggtattggaaagtcaactgctttaaaaattttagcaggaaaacaaaagccaaaccttggaaagtacgatgatcctcctgactggcaggagattttgacttatttccgtggatctgaattacaaaattactttacaaagattctagaagatgacctaaaagccatcatcaaacctcaatatgtagaccagattcctaaggctgcaaaggggacagtgggatctattttggaccgaaaagatgaaacaaagacacaggcaattgtatgtcagcagcttgatttaacccacctaaaagaacgaaatgttgaagatctttcaggaggagagttgcagagatttgcttgtgctgtcgtttgcatacagaaagctgatattttcatgtttgatgagccttctagttacctagatgtcaagcagcgtttaaaggctgctattactatacgatctctaataaatccagatagatatatcattgtggtggaacatgatctaagtgtattagactatctctccgacttcatctgctgtttatatggtgtaccaagcgcctatggagttgtcactatgccttttagtgtaagagaaggcataaacatttttttggatggctatgttccaacagaaaacttgagattcagagatgcatcacttgtttttaaagtggctgagacagcaaatgaagaagaagttaaaaagatgtgtatgtataaatatccaggaatgaagaaaaaaatgggagaatttgagctagcaattgtagctggagagtttacagattctgaaattatggtgatgctgggggaaaatggaacgggtaaaacgacatttatcagaatgcttgctggaagacttaaacctgatgaaggaggagaagtaccagttctaaatgtcagttataagccacagaaaattagtcccaaatcaactggaagtgttcgccagttactacatgaaaagataagagatgcttatactcacccacaatttgtgaccgatgtaatgaagcctctgcaaattgaaaacatcattgatcaagaggtgcagacattatctggtggtgaactacagcgagtagctttagccctttgcttgggcaaacctgctgatgtctatttaattgatgaaccatctgcatatttggattctgagcaaagactgatggcagctcgagttgtcaaacgtttcatactccatgcaaaaaagacagcctttgttgtggaacatgacttcatcatggccacctatctagcggatcgcgtcatcgtttttgatggtgttccatctaagaacacagttgcaaacagtcctcaaacccttttggctggcatgaataaatttttgtctcagcttgaaattacattcagaagagatccaaacaactataggccacgaataaacaaacttaattcaattaaggatgtagaacaaaagaagagtggaaactactttttcttggatgattagactgactctgagaatattgataagccatttattaaaaggagtatttactagaattttttgtcatataaaacttgaatcaggattttatgccccacatactctggaacttgaagtataatatacttaatataacataaaaagccagttgggttctaaattgtagttgaaacacagaaaatgccacttttctgttcctgaagaggctcttttgtgcataatattctaaaatgaagacatttcaagctatacaaattacttccaagttttcatgatgtatgggaagattttcagtaggtgtattatattcacggtaccaaatgctgaccagtgttgctccattttttaaatcttgaaaagggtttctgtacttacctggtttgccaagtatgccagtgtaatgaaactgcccttattttaaaagccagtcaaagattccactgattgacatttgataaataaacatcaggattatgtttattgtttgttttcagtctttgcactatattaccagtatatggtttccgaggaagattatctactgcaaaacaccactgttggaaaaataggtatttttaaattgtttttaatcttttttggtgcttttaaacatgtttagcaaaaaccaattcagttccattccccgcaaaaaacccctaactttactctgaactttttttgtttttgcattccatgaggttctgtattcagtcattctctaggtaatgtcatttttgtacacatatatttatataatcactgattgagatttaggaaaaagcatttctaaagaatatttgcttcccttagaactacagactcgaaatctttaaagatggtgcctaagcatctatgtattttttttaagttccacagatttttctgttgggcagccaaggattataaaccacttccctaaaggcaacattaatgcaaaagtccccagatggcaatacaaagtatcccctggtaccacatatattcatttgtgagtttggatatagagcacattatctaaaccattttgtagttccaaaaacccatctaaatttcttgagttcctgaattttgaacaggattacctggagcctggagccactttaagttgtacttctgactaaactggaattatgagtgaggaagagtgtttactaaataaatgactggggcaagcaaaattgaggaggaaattagaaactgtttgacaaactttaagagctacttgaaataacagaagtcttgattaatatgcaaataatggctagaaagtatggtttaactggaccctattatgccttttaaaaataatttcagtaacccataaatacatgttgtaaaaaattcaaatatacagaatggaataaaaaaatgatctccctttattaccctcccaaaggttaccagcgtttgaatttaataatgtatattctttcatgcttttttctgtgcacttacctaagtgtgaatatgtaaagggtttgttttgtatacaaatgggattatactaaaataagtaatgcctatttttaaggataggttaaatttgtgaatgatcatttcaaatatattgaataaaataagcaaaagctattgttatttactgatcctggattgtcttaaagaaagtacttgtgatataagagcacagttctacttactgctaatgacagaatatgtattaaacgtattttcatgtaaatgaaatctttaaaatatgtatcttaaaattttacatagcaacagaaaggcctacaattgctaacacaagaaaaatacttataaaatcagtataaaatcaatgcagatgttagcaaaagaatgagactacttcatatgtcctaattggaaaaagtctcaaatacttaaaaaaacaaaaaactggaacagtttattatactaccatttttgtgaaaatatacaaaatattgaaataaaggaatactcaagaaacaga

SEQ ID NO: 1882 - DNA, 1018 bp, Homo sapiens
cccccccgcccgtgggaccaagaaagggatgtgacagatgaggctgctgtcatttgtggtgttggctctatttgctgtcactcaagcagaggaaggagccaggcttttggcttccaaatcactgctgaacagatacgccgtggagggacgagacctgaccttgcagtacaacatctacaatgttggctcaagtgctgcattagacgtggaactatctgatgattccttccctccagaagactttggcattgtgtctggaatgctcaatgtcaaatgggaccggattgcccctgctagcaatgtctcccacactgtggtcctgcgccctctcaaggctggttatttcaacttcacctcggcaacaattacttacctggcccaggaggatgggcccgttgtgattggctctaccagtgcacctggacagggaggaatcctggctcagcgggagtttgacaggcgattctcccctcattttctggactgggcagcctttggggtcatgacccttccctccatcggcatccccctgctattgtggtactccagcaagaggaaatatgacactcccaaaacgaagaagaactgattggggcttccacagccctcctctcccaagaaatccaggctcctctcccaagaaatccaggtgctttccagactccaaagggtatcttaaatgcaatctcttctctcttagcccttggccactttctcctggatggttccatcgtgaagccataaacaggaatgcctttggcaatagccttgagcctagagggccctctgatgccccactgaggtgctgttggtttattgctggcaacgtgaattctctcaggggtctaggaggggcattttggagactgcctgacaccacccctatcccctgcctccccctctcagaagagggtggaagatgaaatgaaagctatgggactcttggaggatacccagtgtctattctgggttagagaagtgcttactaaggggttttctaataaaaacaaatgccaca

SEQ ID NO: 1883 - DNA, 1045 bp, Homo sapiens
ctgtctttgtggctccggaaaggcgtttggggtgccaacgatgaggctgctgtcatttgtggtgttggctctatttgctgtcactcaagcagaggaaggagccaggcttttggcttccaaatcactgctgaacagatacgccgtggagggacgagacctgaccttgcagtacaacatctacaatgttggctcaagtgctgcattagacgtggaactatctgatgattccttccctccagaagactttggcattgtgtctggaatgctcaatgtcaaatgggaccggattgcccctgctagcaatgtctcccacactgtggtcctgcgccctctcaaggctggttatttcaacttcacctcggcaacaattacttacctggcccaggaggatgggcccgttgtgattggctctaccagtgcacctggacagggaggaatcctggctcagcgggagtttgacaggcgattctcccctcattttctggactgggcagcctttggggtcatgacccttccctccatcggcatccccctgctattgtggtactccagcaagaggaaatatgacactcccaaaacgaagaagaactgattggggcttccacagccctcctctcccaagaaatccaggctcctctcccaagaaatccaggtgctttccagactccaaagggtatcttaaatgcaatctcttctctcttagcccttggccactttctcctggatcctgccctgctctcagccatagtgaaggaccagccctaggagtctgcgagagcctccttggttccatcgtgaagccataaacaggaatgcctttggcaatagccttgagcctagagggccctctgatgccccactgaggtgctgttggtttattgctggcaacgtgaattctctcaggggtctaggaggggcattttggagactgcctgacaccacccctatcccctgcctccccctctcagaagagggtggaagatgaaatgaaagctatgggactcttggaggatacccagtgtctattctgggttagagaagtgct

SEQ ID NO: 1884 - DNA, 1018 bp, Homo sapiens; identical to SEQ ID NO: 1882

SEQ ID NO: 1885 - DNA, 4370 bp, Homo sapiens
taatgacgggaggaagaaaggcacaagcgctgagaaactgcaaaggctgtgggattggggttaccagagggtgcagtgacaatggggtaggagtggggtgctagtcagaaagttcagagtaggggtggttggaggcagcgttgagaaggagcaagaagtgtcagggtggtgatggcgtcttagaagatctccaggttttgggagaagatgggtgtatgggttaccacaataggactagactaatacaagggttcagtctattgtgccacgttcttccaggaggataaactccggagccaatgaactggagccaagtgggagagtccgcctctaagggattaaagggtctcctttcactaatcgatctcgccctattcctttcgttgattggctgagaattccaatccgtcgaggaagcgtagcgttgcggccaattgacgtggcgttactaggcgtgtcgcatcactgaggcgggagccaggccgcaagcgaatttcctgattggctgtgatctgcgggttgctggggagaggcgcggagaggcgggcgagagtccgcagggcaggcgctgattggctgaggtgggagcagcttcccttccgatgattcggctcttctcggctcagtctcagcgaagcgtctgcgaccgtcgtttgagtcgtcgctgccgctgccgctgccactgccactgccacctcgcggatcaggagccagcgttgttcgcccgacgcctcgctgccggtgggaggaagcgagagggaagccgcttgcgggtttgtcgccgctgctcgcccaccgcctggaagagccgagccccggcccagtcggtcgcttgccaccgctcgtagccgttacccgcgggccgccacagccgccggccgggagaggcgcgcgccatggcttctggagccgattcaaaaggtgatgacctatcaacagccattctcaaacagaagaaccgtcccaatcggttaattgttgatgaagccatcaatgaggacaacagtgtggtgtccttgtcccagcccaagatggatgaattgcagttgttccgaggtgacacagtgttgctgaaaggaaagaagagacgagaagctgtttgcatcgtcctttctgatgatacttgttctgatgagaagattcggatgaatagagttgttcggaataaccttcgtgtacgcctaggggatgtcatcagcatccagccatgccctgatgtgaagtacggcaaacgtatccatgtgctgcccattgatgacacagtggaaggcattactggtaatctcttcgaggtataccttaagccgtacttcctggaagcgtatcgacccatccggaaaggagacatttttcttgtccgtggtgggatgcgtgctgtggagttcaaagtggtggaaacagatcctagcccttattgcattgttgctccagacacagtgatccactgcgaaggggagcctatcaaacgagaggatgaggaagagtccttgaatgaagtagggtatgatgacattggtggctgcaggaagcagctagctcagataaaggagatggtggaactgcccctgagacatcctgccctctttaaggcaattggtgtgaagcctcctagaggaatcctgctttacggacctcctggaacaggaaagaccctgattgctcgagctgtagcaaatgagactggagccttcttcttcttgatcaatggtcctgagatcatgagcaaattggctggtgagtctgagagcaaccttcgtaaagcctttgaggaggctgagaagaatgctcctgccatcatcttcattgatgagctagatgccatcgctcccaaaagagagaaaactcatggcgaggtggagcggcgcattgtatcacagttgttgaccctcatggatggcctaaagcagagggcacatgtgattgttatggcagcaaccaacagacccaacagcattgacccagctctacggcgatttggtcgctttgacagggaggtagatattggaattcctgatgctacaggacgcttagagattcttcagatccataccaagaacatgaagctggcagatgatgtggacctggaacaggtagccaatgagactcacgggcatgtgggtgctgacttagcagccctgtgctcagaggctgctctgcaagccatccgcaagaagatggatctcattgacctagaggatgagaccattgatgccgaggtcatgaactctctagcagttactatggatgacttccggtgggccttgagccagagtaacccatcagcactgcgggaaaccgtggtagaggtgccacaggtaacctgggaagacatcgggggcctagaggatgtcaaacgtgagctacaggagctggtccagtatcctgtggagcacccagacaaattcctgaagtttggcatgacaccttccaagggagttctgttctatggacctcctggctgtgggaaaactttgttggccaaagccattgctaatgaatgccaggccaacttcatctccatcaagggtcctgagctgctcaccatgtggtttggggagtctgaggccaatgtcagagaaatctttgacaaggcccgccaagctgccccctgtgtgctattctttgatgagctggattcgattgccaaggctcgtggaggtaacattggagatggtggtggggctgctgaccgagtcatcaaccagatcctgacagaaatggatggcatgtccacaaaaaaaaatgtgttcatcattggcgctaccaaccggcctgacatcattgatcctgccatcctcagacctggccgtcttgatcagctcatctacatcccacttcctgatgagaagtcccgtgttgccatcctcaaggctaacctgcgcaagtccccagttgccaaggatgtggacttggagttcctggctaaaatgactaatggcttctctggagctgacctgacagagatttgccagcgtgcttgcaagctggccatccgtgaatccatcgagagtgagattaggcgagaacgagagaggcagacaaacccatcagccatggaggtagaagaggatgatccagtgcctgagatccgtcgagatcactttgaagaagccatgcgctttgcgcgccgttctgtcagtgacaatgacattcggaagtatgagatgtttgcccagacccttcagcagagtcggggctttggcagcttcagattcccttcagggaaccagggtggagctggccccagtcagggcagtggaggcggcacaggtggcagtgtatacacagaagacaatgatgatgacctgtatggctaagtggtggtggccagcgtgcagtgagctggcctgcctggaccttgttccctgggggtgggggcgcttgcccaggagagggaccaggggtgcgcccacagcctgctccattctccagtctgaacagttcagctacagtctgactctggacagggggtttctgttgcaaaaatacaaaacaaaagcgataaaataaaagcgattttcatttggtaggcggagagtgaattaccaacagggaattgggccttgggcctatgccatttctgttgtagtttggggcagtgcaggggacctgtgtggggtgtgaaccaaggcactactgccacctgccacagtaaagcatctgcacttgactcaatgctgcccgagccctcccttccccctatccaacctgggtaggtgggtaggggccacagttgctggatgtttatatagagagtaggttgatttattttacatgcttttgagttaatgttggaaaactaatcacaagcagtttctaaaccaaaaaatgacatgttgtaaaaggacaataaacgttgggtcaaaatggagcctgagtcctgggccctgtgcctgcttcttttcctgggaacagccttgggctacccaccactcccaaggcattcttccaaatgtgaaatcctggaagtaagattgcaccttcttcctctcctgatcaacatcggtatgatgtctcctgttgcctcaccctttgtctgcagtatcactggataggactggtggaaagggagcagcctgacagagctccaaatgtggagaatatggcatccctccacctatatttgatgtggacggtaaggctaggcctgcaggatcccttatcctgaccaaagactgtgttggggtgccatttgaaaatcgcagggttgcaaaagaatacaatcttacttgcaggtggatattctctatactctcttttaatgcatctaaaaatcccaaacatcccctggttggtgatcacttacagttgtgtccacctttattttatgtactttgattaaaaaaaaaaaactttttgttaatataaaa

SEQ ID NO: 1886 - DNA, 2898 bp, Homo sapiens
cgtcgtttgattagtcgctgcccccctcgcggattaggagctagcgtctcccgcccgcccgcctgccgccccggtgcccctgggaggaagcgagagggaggctgccagagggtttgtcactgctgttgctcctccgcctcagcgagtccagccccggcctagtcggtcgcctgcctttctcatagccgttaccctcaggccgccacagccgccgaccgggagaggcgcgcgccatggcctctggagccgattcaaaaggtgatgatttatcaacagccattctcaaacagaagaaccgacccaatcggttaattgttgatgaagccatcaatgaagataacagcgtggtgtccttgtcccagcccaagatggatgaactgcagttgttccgaggtgacacggtgttgctaaaaggaaagaaaagacgggaagctgtatgcattgttctttctgatgacacgtgttctgatgagaagattcgaatgaatagagttgttcggaataacctccgagttcgcctaggagatgtcatcagcatccagccatgccctgatgtaaagtatggcaaacgtatccacgttctacccatcgatgacacagtggaaggcatcactggcaatctctttgaggtataccttaagccgtacttcctggaagcttatcggcccatccgtaaaggagatatttttcttgtccggggtgggatgcgtgctgtggagttcaaagttgtagagacagatcccagcccttactgtattgttgctccagacacagtgatccactgtgagggggagccaatcaagcgagaggatgaggaggaatccttgaatgaagtaggctatgatgacatcggtggttgcaggaagcagctagctcagataaaggagatggtggagctgccactgagacatcctgcgctctttaaggcgattggtgtaaagcctcctcggggaatcttgttgtatgggcctcctgggacagggaagaccctgattgctcgagctgtggcaaatgaaactggagccttcttctttctgatcaatggtcctgaaatcatgagcaaattggctggtgagtctgagagcaaccttcgtaaagcctttgaggaagctgaaaagaatgctcctgctatcatcttcatcgatgagcttgatgccattgcacccaaaagagagaaaactcatggggaagtggagcgtcgcatcgtgtctcagttgttgaccctcatggatggcctaaagcagagagcacatgtgatagttatggcagcaaccaatagacccaacagcattgacccagccctacggcgatttggtcgctttgacagagaggtagatattggaatacctgatgctacaggacgtttggagattcttcagatccataccaagaacatgaaactggcagatgatgtggacttggaacaggtagccaatgagactcatggtcatgttggtgctgatttggcagccctatgttcagaggctgctctgcaggccatccggaaaaaaatggacctcattgacctagaagatgagaccattgatgctgaggtcatgaattccctggcagttactatggatgacttccggtgggctttgagtcaaagcaacccatcagcacttcgggaaactgtggtagaggtgccacaagtaacctgggaagatattggaggcctggaggatgtcaaacgtgagcttcaggagttggttcagtatcctgtggaacatccagacaaattcctcaaatttggcatgactccctccaaaggcgttcttttctatggacctcctggctgtgggaaaaccttactggctaaagccattgctaatgaatgccaggccaacttcatctccatcaagggtcctgagctgcttaccatgtggtttggggaatctgaggccaatgtccgggaaatttttgacaaggcacggcaagctgccccctgtgtactcttctttgatgagttagattcaattgccaaggctcgaggtggtaatattggagatggtggtggagctgctgaccgagtcatcaatcagatcctgacagaaatggatggcatgtctacaaaaaagaatgtgtttatcattggagctaccaacaggcctgacatcattgatcctgctatcctaagacctggccgtctagatcagctcatttatatcccacttcctgatgagaagtcccgtgttgccatcctaaaagccaatctgcgaaagtccccagttgccaaggatgtggatttggagttcctggctaagatgactaatggcttttctggagctgatttgacagaaatttgccaacgggcttgtaaactggccattcgtgaatctattgagagtgagattaggcgagaacgagagaggcagacaaatccatcggctatggaggtagaagaggacgatccagtgcctgagatccgcagagatcactttgaggaagccatgcgttttgcccgacgttctgtcagcgataatgacattcggaagtatgaaatgttcgcccagacactgcagcagagtcgaggttttggcagcttcagattcccttcagggaaccagggtggagctggtcccagccagggcagtggaggtggcacaggtggcagtgtgtacacagaagacaatgacgatgacctgtatggctaagtgatgtgccagcatgcagcgagctggcctggctggaccttgttccctgggggagggggcgcttgcccaagagggaccaggggtgtgcccatggcctgttccattcctcagtctgaacagttcagccccagtcagactctggacaggggtttcctgttgcaaaaaaaaaaaattacaaaagcgataaaataaaagtgattttcatttgaaaaaaaaaaaaaaaaaaaaaaaaaaaaaaaaaaaa

SEQ ID NO: 1887 - DNA, 4434 bp, Homo sapiens
taatgacgggaggaagaaaggcacaagcgctgagaaactgcaaaggctgtgggattggggttaccagagggtgcagtgacaatggggtaggagtggggtgctagtcagaaagttcagagtaggggtggttggaggcagcgttgagaaggagcaagaagtgtcagggtggtgatggcgtcttagaagatctccaggttttgggagaagatgggtgtatgggttaccacaataggactagactaatacaagggttcagtctattgtgccacgttcttccaggaggataaactccggagccaatgaactggagccaagtgggagagtccgcctctaagggattaaagggtctcctttcactaatcgatctcgccctattcctttcgttgattggctgagaattccaatccgtcgaggaagcgtagcgttgcggccaattgacgtggcgttactaggcgtgtcgcatcactgaggcgggagccaggccgcaagcgaatttcctgattggctgtgatctgcgggttgctggggagaggcgcggagaggcgggcgagagtccgcagggcaggcgctgattggctgaggtgggagcagcttcccttccgatgattcggctcttctcggctcagtctcagcgaagcgtctgcgaccgtcgtttgagtcgtcgctgccgctgccgctgccactgccactgccacctcgcggatcaggagccagcgttgttcgcccgacgcctcgctgccggtgggaggaagcgagagggaagccgcttgcgggtttgtcgccgctgctcgcccaccgcctggaagagccgagccccggcccagtcggtcgcttgccaccgctcgtagccgttacccgcgggccgccacagccgccggccgggagaggcgcgcgccatggcttctggagccgagtgagtgtgcgcgcgccgttcgcttgctgcggcggcgcgcaccgggaccagccgcgcaggttcaaaaggtgatgacctatcaacagccattctcaaacagaagaaccgtcccaatcggttaattgttgatgaagccatcaatgaggacaacagtgtggtgtccttgtcccagcccaagatggatgaattgcagttgttccgaggtgacacagtgttgctgaaaggaaagaagagacgagaagctgtttgcatcgtcctttctgatgatacttgttctgatgagaagattcggatgaatagagttgttcggaataaccttcgtgtacgcctaggggatgtcatcagcatccagccatgccctgatgtgaagtacggcaaacgtatccatgtgctgcccattgatgacacagtggaaggcattactggtaatctcttcgaggtataccttaagccgtacttcctggaagcgtatcgacccatccggaaaggagacatttttcttgtccgtggtgggatgcgtgctgtggagttcaaagtggtggaaacagatcctagcccttattgcattgttgctccagacacagtgatccactgcgaaggggagcctatcaaacgagaggatgaggaagagtccttgaatgaagtagggtatgatgacattggtggctgcaggaagcagctagctcagataaaggagatggtggaactgcccctgagacatcctgccctctttaaggcaattggtgtgaagcctcctagaggaatcctgctttacggacctcctggaacaggaaagaccctgattgctcgagctgtagcaaatgagactggagccttcttcttcttgatcaatggtcctgagatcatgagcaaattggctggtgagtctgagagcaaccttcgtaaagcctttgaggaggctgagaagaatgctcctgccatcatcttcattgatgagctagatgccatcgctcccaaaagagagaaaactcatggcgaggtggagcggcgcattgtatcacagttgttgaccctcatggatggcctaaagcagagggcacatgtgattgttatggcagcaaccaacagacccaacagcattgacccagctctacggcgatttggtcgctttgacagggaggtagatattggaattcctgatgctacaggacgcttagagattcttcagatccataccaagaacatgaagctggcagatgatgtggacctggaacaggtagccaatgagactcacgggcatgtgggtgctgacttagcagccctgtgctcagaggctgctctgcaagccatccgcaagaagatggatctcattgacctagaggatgagaccattgatgccgaggtcatgaactctctagcagttactatggatgacttccggtgggccttgagccagagtaacccatcagcactgcgggaaaccgtggtagaggtgccacaggtaacctgggaagacatcgggggcctagaggatgtcaaacgtgagctacaggagctggtccagtatcctgtggagcacccagacaaattcctgaagtttggcatgacaccttccaagggagttctgttctatggacctcctggctgtgggaaaactttgttggccaaagccattgctaatgaatgccaggccaacttcatctccatcaagggtcctgagctgctcaccatgtggtttggggagtctgaggccaatgtcagagaaatctttgacaaggcccgccaagctgccccctgtgtgctattctttgatgagctggattcgattgccaaggctcgtggaggtaacattggagatggtggtggggctgctgaccgagtcatcaaccagatcctgacagaaatggatggcatgtccacaaaaaaaaatgtgttcatcattggcgctaccaaccggcctgacatcattgatcctgccatcctcagacctggccgtcttgatcagctcatctacatcccacttcctgatgagaagtcccgtgttgccatcctcaaggctaacctgcgcaagtccccagttgccaaggcaggatgtggacttggagttcctggctaaaatgactaatggcttctctggagctgacctgacagagatttgccagcgtgcttgcaagctggccatccgtgaatccatcgagagtgagattaggcgagaacgagagaggcagacaaacccatcagccatggaggtagaagaggatgatccagtgcctgagatccgtcgagatcactttgaagaagccatgcgctttgcgcgccgttctgtcagtgacaatgacattcggaagtatgagatgtttgcccagacccttcagcagagtcggggctttggcagcttcagattcccttcagggaaccagggtggagctggccccagtcagggcagtggaggcggcacaggtggcagtgtatacacagaagacaatgatgatgacctgtatggctaagtggtggtggccagcgtgcagtgagctggcctgcctggaccttgttccctgggggtgggggcgcttgcccaggagagggaccaggggtgcgcccacagcctgctccattctccagtctgaacagttcagctacagtctgactctggacagggggtttctgttgcaaaaatacaaaacaaaagcgataaaataaaagcgattttcatttggtaggcggagagtgaattaccaacagggaattgggccttgggcctatgccatttctgttgtagtttggggcagtgcaggggacctgtgtggggtgtgaaccaaggcactactgccacctgccacagtaaagcatctgcacttgactcaatgctgcccgagccctcccttccccctatccaacctgggtaggtgggtaggggccacagttgctggatgtttatatagagagtaggttgatttattttacatgcttttgagttaatgttggaaaactaatcacaagcagtttctaaaccaaaaaatgacatgttgtaaaaggacaataaacgttgggtcaaaatggagcctgagtcctgggccctgtgcctgcttcttttcctgggaacagccttgggctacccaccactcccaaggcattcttccaaatgtgaaatcctggaagtaagattgcaccttcttcctctcctgatcaacatcggtatgatgtctcctgttgcctcaccctttgtctgcagtatcactggataggactggtggaaagggagcagcctgacagagctccaaatgtggagaatatggcatccctccacctatatttgatgtggacggtaaggctaggcctgcaggatcccttatcctgaccaaagactgtgttggggtgccatttgaaaatcgcagggttgcaaaagaatacaatcttacttgcaggtggatattctctatactctcttttaatgcatctaaaaatcccaaacatcccctggttggtgatcacttacagttgtgtccacctttattttatgtactttgattaaaaaaaaaaaactttttgttaatataaaa

SEQ ID NO: 1888 - DNA, 2004 bp, Homo sapiens
tgaaagtgggcacagctgctgcacatcccggggctcctgacctctctgcgtttgcagcgtagcccaagtcggtcagcactggaggacctcagaagccatgttgaagccccatagtgaagccagggctgccttcattcagacccagcagctgcacgcagccatggctgacacattcttggagcacatgtgctgcctggacactgactcgccacccatcacagcctggagcactggcatcatccgtactatgggcccagcttctccattgctagagatgctgaagaaaacgattaagtctggaattaatgtggctcatctgaactctcatggagcccatgagtaccatacagagaccatcaagaacgtgcgcacagccacggaaagctttgcttctgactccatcctctaccagcccattgctgtggctccagacactaaaggacctgagatcccaactgggcccgtcaagggcagcggcactgcagaggtggagctgaagaagggagccactctcaagttcacgctggataatacctacatggaaaagggtaagagaacatcctgtggcgggactacaagaacatctgcaaggtggtggaagtgggctgcaagatctacgtggatgatgggctaatttctctccaagtgaagcagaaggatgctcactttctggtgacagaggtggaaaatggtggctccttgggcagcaagaagagtgtgaaccttcctggggctgccgtggacctgcctgccatgttggagaaggacatccaggacctgaagtttgggggcgagcaagatgtcgatatgatgttttcatcattcatctgcaagacatctgatgtccatgaagttaggaaggtcttgggagagaaaggaaagaacagcaagataaccagcaaaattgagaatcatgatgggggttggaggtttgatgaaatcctggaggccagcgatgggattatggtagctcgtggtgatccaccacaagccgtcgagatgagattcctgcagggaaggtctgccttgctcagaggatgatgattgggtggtgcaaccaagctgggaagcctgtcatcttgccactcagatgctagaggatgtgatcaagaagctccaccccacttgggctgagggcagtggtgtggccaatgcagttctggtggaagctgactgcatcatgctgtctggagaaacagccaaagggaactatcctctggaggctgtgcacatgcagcacctgattgcctgtgaggcagaggccaccatctaccacttgcaattatttgaggagttctgccacctggcacccattaccagtgaccccgcagaagctactgccgtgggcactgtggaggcctccttcaagtgctgcagtggggccataatcgtcctcaccaagtctgcaggtgtgcccaccaggtggccagatactgcccacgtgcccccatgattgttgtgacatggcatccccaggcagctcgccaggcccacctgtaccgtggtatcttccctgtgctgtgtaaggaccccatccaggagccctaggctgaggatgtggacctccgagtgaacttggccatgaatgttggtaaggcctgaggcttcttcaagaaggatgatgtggtcattgtgctgacctggtgacaccctggccctggcttctccaccaccctgtgtgttattcctgtgctgtgatggactccagagctcttcctccagcccctgtcccacccccttcccccaatgcatccattaggccagcaatgcttatagagctcactctgggctgtagtgtggcactggtgggctggaacaccagggaagaagatttatgcctcgctgaaacgtggctgtttttagagcctgctgtggcgggagagcccggagcctggctgcccatcatgtggccccacccaagcaagagaagaaggaggaatgcagaacagaggcccccagagtgtatggcaagagggtggcagcttcctttcttctgtgtactct

SEQ ID NO: 1889 - DNA, 2117 bp, Homo sapiens
ggcagtggctccttgcacagcagctgcacgcgccgtggctccggatctcttcgtctttgcagcgtagcccgagtcggtcagcgccggaggtgagcgccatgtcgaagccccatagtgaagccgggactgccttcattcagacccagcagctgcacgcagccatggctgacacattcctggagcacatgtgccgcctggacattgattcaccacccatcacagcccggaacactggcatcatctgtaccattggcccagcttcccgatcagtggagacgttgaaggagatgattaagtctggaatgaatgtggctcgtctgaacttctctcatggaactcatgagtaccatgcggagaccatcaagaatgtgcgcacagccacggaaagctttgcttctgaccccatcctctaccggcccgttgctgtggctctagacactaaaggacctgagatccgaactgggctcatcaagggcagcggcactgcagaggtggagctgaagaagggagccactctcaaaatcacgctggataacgcctacatggaaaagtgtgacgagaacatcctgtggctggactacaagaacatctgcaaggtggtggaagtgggcagcaagatctacgtggatgatgggcttatttctctccaggtgaagcagaaaggtgccgacttcctggtgacggaggtggaaaatggtggctccttgggcagcaagaagggtgtgaaccttcctggggctgctgtggacttgcctgctgtgtcggagaaggacatccaggatctgaagtttggggtcgagcaggatgttgatatggtgtttgcgtcattcatccgcaaggcatctgatgtccatgaagttaggaaggtcctgggagagaagggaaagaacatcaagattatcagcaaaatcgagaatcatgagggggttcggaggcagtttgatgaaatcctggaggccagtgatgggatcatggtggctcgtggtgatctaggcattgagattcctgcagagaaggtcttccttgctcagaagatgatgattggacggtgcaaccgagctgggaagcctgtcatctgtgctactcaggcatatgctggagagcatgatcaagaagccccgccccactcgggctgaaggcagtgatgtggccaatgcagtcctggatggagccgactgcatcatgctgtctggagaaacagccaaaggggactatcctctggaggctgtgcgcatgcagcacctgattgcccgtgaggcagaggctgccatctaccacttgcaattatttgaggaactccgccgcctggcgcccattaccagcgaccccacagaagccaccgccgtgggtgccgtggaggcctccttcaagtgctgcagtggggccataatcgtcctcaccaagtctggcaggtctgctcaccaggtggccagataccgcccacgtgcccccatcattgctgtgacccggaatccccagacagctcgtcaggcccacctgtaccgtggcatcttccctgtgctgtgcaaggacccagtccaggaggcctgggctgaggacgtggacctccgggtgaactttgccatgaatgttggcaaggcccgaggcttcttcaagaagggagatgtggtcattgtgctgaccggatggcgccctggctccggcttcaccaacaccatgcgtgttgttcctgtgccgtgatggaccccagagcccctcctccagcccctgtcccacccccttcccccagcccatccatggtaggttgggacaccagggaagaagatcaacgcctcactgaaacatggctgtgtttgcagcctgctctagtgggacagcccagagcctggctgcccatcatgtggccccacccaatcaagggaagaaggaggaatgctggactggaggcccctggagccagatggcaagagggtgacagcttcctttcctgtgtgtactctgtccagttcctttagaaaaaccgactctggccctggcccttacttgcttctctagctctctaggcctctccagtttgcacctgtccccaccctccactcagctgtcctgcagcaaacactccaccctccaccttccattttcccccactactgcag

SEQ ID NO: 1890 - DNA, 2117 bp, Homo sapiens
ggcagtggctccttgcacagcagctgcacgcgccgtggctccggatctcttcgtctttgcagcgtagcccgagtcggtcagcgccggaggtgagcgccatgtcgaagccccatagtgaagccgggactgccttcattcagacccagcagctgcacgcagccatggctgacacattcctggagcacatgtgccgcctggacattgattcaccacccatcacagcccggaacactggcatcatctgtaccattggcccagcttcccgatcagtggagacgttgaaggagatgattaagtctggaatgaatgtggctcgtctgaacttctctcatggaactcatgagtaccatgcggagaccatcaagaatgtgcgcacagccacggaaagctttgcttctgaccccatcctctaccggcccgttgctgtggctctagacactaaaggacctgagatccgaactgggctcatcaagggcagcggcactgcagaggtggagctgaagaagggagccactctcaaaatcacgctggataacgcctacatggaaaagtgtgacgagaacatcctgtggctggactacaagaacatctgcaaggtggtggaagtgggcagcaagatctacgtggatgatgggcttatttctctccaggtgaagcagaaaggtgccgacttcctggtgacggaggtggaaaatggtggctccttgggcagcaagaagggtgtgaaccttcctggggctgctgtggacttgcctgctgtgtcggagaaggacatccaggatctgaagtttggggtcgagcaggatgttgatatggtgtttgcgtcattcatccgcaaggcatctgatgtccatgaagttaggaaggtcctgggagagaagggaaagaacatcaagattatcagcaaaatcgagaatcatgagggggttcggaggcagtttgatgaaatcctggaggccagtgatgggatcatggtggctcgtggtgatctaggcattgagattcctgcagagaaggtcttccttgctcagaagatgatgattggacggtgcaaccgagctgggaagcctgtcatctgtgctactcaggcatatgctggagagcatgatcaagaagccccgccccactcgggctgaaggcagtgatgtggccaatgcagtcctggatggagccgactgcatcatgctgtctggagaaacagccaaaggggactatcctctggaggctgtgcgcatgcagcacctgatagctcgtgaggctgaggcagccatgttccaccgcaagctgtttgaagaacttgtgcgagcctcaagtcactccacagacctcatggaagccatggccatgggcagcgtggaggcttcttataagtgtttagcagcagctttgatagttctgacggagtctggcaggtctgctcaccaggtggccagataccgcccacgtgcccccatcattgctgtgacccggaatccccagacagctcgtcaggcccacctgtaccgtggcatcttccctgtgctgtgcaaggacccagtccaggaggcctgggctgaggacgtggacctccgggtgaactttgccatgaatgttggcaaggcccgaggcttcttcaagaagggagatgtggtcattgtgctgaccggatggcgccctggctccggcttcaccaacaccatgcgtgttgttcctgtgccgtgatggaccccagagcccctcctccagcccctgtcccacccccttcccccagcccatccatggtaggttgggacaccagggaagaagatcaacgcctcactgaaacatggctgtgtttgcagcctgctctagtgggacagcccagagcctggctgcccatcatgtggccccacccaatcaagggaagaaggaggaatgctggactggaggcccctggagccagatggcaagagggtgacagcttcctttcctgtgtgtactctgtccagttcctttagaaaaaccgactctggccctggcccttacttgcttctctagctctctaggcctctccagtttgcacctgtccccaccctccactcagctgtcctgcagcaaacactccaccctccaccttccattttcccccactactgcag

SEQ ID NO: 1891 - DNA, 3057 bp, Homo sapiens
gtctgctctgtgtgccatggacggcattgtcccagatatagccgttggtacaaagcggggatctgacgagcttttctctacttgtgtcactaacggaccgtttatcatgagcagcaactcggcttctgcagcaaacggaaatgacagcaagaagttcaaaggtgacagccgaagtgcaggcgtcccctctagagtgatccacatccggaagctccccatcgacgtcacggagggggaagtcatctccctggggctgccctttgggaaggtcaccaacctcctgatgctgaaggggaaaaaccaggccttcatcgagatgaacacggaggaggctgccaacaccatggtgaactactacacctcggtgacccctgtgctgcgcggccagcccatctacatccagttctccaaccacaaggagctgaagaccgacagctctcccaaccaggcgcgggcccaggcggccctgcaggcggtgaactcggtccagtcggggaacctggccttggctgcctcggcggcggccgtggacgcagggatggcgatggccgggcagagccccgtgctcaggatcatcgtggagaacctcttctaccctgtgaccctggatgtgctgcaccagattttctccaagttcggcacagtgttgaagatcatcaccttcaccaagaacaaccagttccaggccctgctgcagtatgcggaccccgtgagcgcccagcacgccaagctgtcgctggacgggcagaacatctacaacgcctgctgcacgctgcgcatcgacttttccaagctcaccagcctcaacgtcaagtacaacaatgacaagagccgtgactacacacgcccagacctgccttccggggacagccagccctcgctggaccagaccatggccgcggccttcggcctttccgttccgaacgtccacggcgccctggcccccctggccatcccctcggcggcggcggcagctgcggcggcaggtcggatcgccatcccgggcctggcgggggcaggaaattctgtattgctggtcagcaacctcaacccagagagagtcacaccccaaagcctctttattcttttcggcgtctacggtgacgtgcagcgcgtgaagatcctgttcaataagaaggagaacgccctagtgcagatggcggacggcaaccaggcccagctggccatgagccacctgaacgggcacaagctgcacgggaagcccatccgcatcacgctctcgaagcaccagaacgtgcagctgccccgcgagggccaggaggaccagggcctgaccaaggactacggcaactcacccctgcaccgcttcaagaagccgggctccaagaacttccagaacatattcccgccctcggccacgctgcacctctccaacatcccgccctcagtctccgaggaggatctcaaggtcctgttttccagcaatgggggcgtcgtcaaaggattcaagttcttccagaaggaccgcaagatggcactgatccagatgggctccgtggaggaggcggtccaggccctcattgacctgcacaaccacgacctcggggagaaccaccacctgcgggtctccttctccaagtccaccatctaggggcacaggcccccacggccgggccccctggcgacaacttccatcattccagagaaaagccactttaaaaacagctgaagtgacctagcagaccagagattttatttttttaaagagaaatcagtttacctgtttttaaaaaaattaaatctagttcaccttgctcaccctgcggtgacagggacagctcaggctcttggtgactgtggcagcgggagttcccggccctccacacccggggccagaccctcggggccatgccttggtggggcctgtgtcgggcgtggggcctgcaggtgggcgccccgaccacgacttggcttccttgtgccttaaaaaacctgccttcctgcagccacacacccacccggggtgtcctggggacccaaggggtgggggggtcacaccagagagaggcagggggcctggccggctcctgcaggatcatgcagctggggcgcggcggccgcggctgcgacaccccaaccccagccctctaatcaagtcacgtgattctcccttcaccccgcccccagggccttcccttctgcccccaggcgggctccccgctgctccagctgcggagctggtcgacataatctctgtattatatactttgcagttgcagacgtctgtgcctagcaatatttccagttgaccaaatattctaatcttttttcatttatatgcaaaagaaatagttttaagtaactttttatagcaagatgatacaatggtatgagtgtaatctaaacttccttgtggtattaccttgtatgctgttacttttattttattccttgtaattaagtcacaggcaggacccagtttccagagagcaggcggggccgcccagtgggtcaggcacagggagccccggtcctatcttagagcccctgagcttcagggaaggggcgggcgtgtcgccgcctctggcatcgcctccggttgccttacaccacgccttcacctgcagtcgcctagaaaacttgctctcaaacttcagggttttttcttccttcaaattttggaccaaagtctcatttctgtgttttgcctgcctctgatgctgggacccggaaggcgggcgctcctcctgtcttctctgtgctctttctaccgcccccgcgtcctgtcccgggggctctcctaggatcccctttccgtaaaagcgtgtaacaagggtgtaaatatttataattttttatacctgttgtgagacccgaggggcggcggcgcggttttttatggtgacacaaatgtatattttgctaacagcaattccaggctcagtattgtgaccgcggagccacaggggaccccacgcacattccgttgccttacccgatggcttgtgacgcggagagaaccgattaaaaccgtttgagaaactccaaaaaaaaaaaaaaaaaaaaaaaaaaaaaaaaaaaaaaaaaaaaaaaaac

SEQ ID NO: 1892 - DNA, 2651 bp, Homo sapiens
cggcgcctccactccgtcccccgcgggtctgctctgtgtgccatggacggcggggatctgacgagcttttctctacttgtgtcactaacggaccgtttatcatgagcagcaactcggcttctgcagcaaacggaaatgacagcaagaagttcaaaggtgacagccgaagtgcaggcgtcccctctagagtgatccacatccggaagctccccatcgacgtcacggagggggaagtcatctccctggggctgccctttgggaaggtcaccaacctcctgatgctgaaggggaaaaaccaggccttcatcgagatgaacacggaggaggctgccaacaccatggtgaactactacacctcggtgacccctgtgctgcgcggccagcccatctacatccagttctccaaccacaaggagctgaagaccgacagctctcccaaccaggcgcgggcccaggcggccctgcaggcggtgaactcggtccagtcggggaacctggccttggctgcctcggcggcggccgtggacgcagggatggcgatggccgggcagagccccgtgctcaggatcatcgtggagaacctcttctaccctgtgaccctggatgtgctgcaccagattttctccaagttcggcacagtgttgaagatcatcaccttcaccaagaacaaccagttccaggccctgctgcagtatgcggaccccgtgagcgcccagcacgccaagctgtcgctggacgggcagaacatctacaacgcctgctgcacgctgcgcatcgacttttccaagctcaccagcctcaacgtcaagtacaacaatgacaagagccgtgactacacacgcccagacctgccttccggggacagccagccctcgctggaccagaccatggccgcggccttcgcctctccgtatgcaggagctggtttccctcccacctttgccattcctcaagctgcaggcctttccgttccgaacgtccacggcgccctggcccccctggccatcccctcggcggcggcggcagctgcggcggcaggtcggatcgccatcccgggcctggcgggggcaggaaattctgtattgctggtcagcaacctcaacccagagagagtcacaccccaaagcctctttattcttttcggcgtctacggtgacgtgcagcgcgtgaagatcctgttcaataagaaggagaacgccctagtgcagatggcggacggcaaccaggcccagctggccatgagccacctgaacgggcacaagctgcacgggaagcccatccgcatcacgctctcgaagcaccagaacgtgcagctgccccgcgagggccaggaggaccagggcctgaccaaggactacggcaactcacccctgcaccgcttcaagaagccgggctccaagaacttccagaacatattcccgccctcggccacgctgcacctctccaacatcccgccctcagtctccgaggaggatctcaaggtcctgttttccagcaatgggggcgtcgtcaaaggattcaagttcttccagaaggaccgcaagatggcactgatccagatgggctccgtggaggaggcggtccaggccctcattgacctgcacaaccacgacctcggggagaaccaccacctgcgggtctccttctccaagtccaccatctaggggcacaggcccccacggccgggccccctggcgacaacttccatcattccagagaaaagccactttaaaaacagctgaagtgaccttagcagaccagagattttatttttttaaagagaaatcagtttacctgtttttaaaaaaattaaatctagttcaccttgctcaccctgcggtgacagggacagctcaggctcttggtgactgtggcagcgggagttcccggccctccacacccggggccagaccctcggggccatgccttggtggggcctgtgtcgggcgtggggcctgcaggtgggcgccccgaccacgacttggcttccttgtgccttaaaaaacctgccttcctgcagccacacacccacccggggtgtcctggggacccaaggggtgggggggtcacaccagagagaggcagggggccgcggctgcgacaccccaaccccagccctctaatcaagtcacgtgattctcccttcaccccgcccccagggccttcccttctgcccccaggcgggctccccgctgctccagctgcggagctggtcgacataatctctgtattatatactttgcagttgcagacgtctgtgcctagcaatatttccagttgaccaaatattctaatcttttttcatttatatgcaaaagaaatagttttaagtaactttttatagcaagatgatacaatggtatgagtgtaatctaaacttccttgtggtattaccttgtatgctgttacttttattttattccttgtaattaagtcacaggcaggacccagtttccagagagcaggcggggccgcccagtgggtcaggcacagggagccccggtcctatcttagagcccctgagcttcagggaaggggcgggcgtgtcgccgcctctggcatcgcctccggttttcagggttttttcttccttcaaattttggaccaaagtctcatttctgtgttttgcctgcctctgatgctgggacccg

SEQ ID NO: 1893 - DNA, 3281 bp, Homo sapiens
tgcgggcgtctccgccattttgtgagtctataactcggagccgttgggtcggttcctgctattccggcgcctccactccgtcccccgcgggtctgctctgtgtgccatggacggcattgtcccagatatagccgttggtacaaagcggggatctgacgagcttttctctacttgtgtcactaacggaccgtttatcatgagcagcaactcggcttctgcagcaaacggaaatgacagcaagaagttcaaaggtgacagccgaagtgcaggcgtcccctctagagtgatccacatccggaagctccccatcgacgtcacggagggggaagtcatctccctggggctgccctttgggaaggtcaccaacctcctgatgctgaaggggaaaaaccaggccttcatcgagatgaacacggaggaggctgccaacaccatggtgaactactacacctcggtgacccctgtgctgcgcggccagcccatctacatccagttctccaaccacaaggagctgaagaccgacagctctcccaaccaggcgcgggcccaggcggccctgcaggcggtgaactcggtccagtcggggaacctggccttggctgcctcggcggcggccgtggacgcagggatggcgatggccgggcagagccccgtgctcaggatcatcgtggagaacctcttctaccctgtgaccctggatgtgctgcaccagattttctccaagttcggcacagtgttgaagatcatcaccttcaccaagaacaaccagttccaggccctgctgcagtatgcggaccccgtgagcgcccagcacgccaagctgtcgctggacgggcagaacatctacaacgcctgctgcacgctgcgcatcgacttttccaagctcaccagcctcaacgtcaagtacaacaatgacaagagccgtgactacacacgcccagacctgccttccggggacagccagccctcgctggaccagaccatggccgcggccttcggtgcacctggtataatctcagcctctccgtatgcaggagctggtttccctcccacctttgccattcctcaagctgcaggcctttccgttccgaacgtccacggcgccctggcccccctggccatcccctcggcggcggcggcagctgcggcggcaggtcggatcgccatcccgggcctggcgggggcaggaaattctgtattgctggtcagcaacctcaacccagagagagtcacaccccaaagcctctttattcttttcggcgtctacggtgacgtgcagcgcgtgaagatcctgttcaataagaaggagaacgccctagtgcagatggcggacggcaaccaggcccagctggccatgagccacctgaacgggcacaagctgcacgggaagcccatccgcatcacgctctcgaagcaccagaacgtgcagctgccccgcgagggccaggaggaccagggcctgaccaaggactacggcaactcacccctgcaccgcttcaagaagccgggctccaagaacttccagaacatattcccgccctcggccacgctgcacctctccaacatcccgccctcagtctccgaggaggatctcaaggtcctgttttccagcaatgggggcgtcgtcaaaggattcaagttcttccagaaggaccgcaagatggcactgatccagatgggctccgtggaggaggcggtccaggccctcattgacctgcacaaccacgacctcggggagaaccaccacctgcgggtctccttctccaagtccaccatctaggggcacaggcccccacggccgggccccctggcgacaacttccatcattccagagaaaagccactttaaaaacagctgaagtgaccttagcagaccagagattttatttttttaaagagaaatcagtttacctgtttttaaaaaaattaaatctagttcaccttgctcaccctgcggtgacagggacagctcaggctcttggtgactgtggcagcgggagttcccggccctccacacccggggccagaccctcggggccatgccttggtggggcctgtgtcgggcgtggggcctgcaggtgggcgccccgaccacgacttggcttccttgtgccttaaaaaacctgccttcctgcagccacacacccacccggggtgtcctggggacccaaggggtgggggggtcacaccagagagaggcagggggcctggccggctcctgcaggatcatgcagctggggcgcggcggccgcggctgcgacaccccaaccccagccctctaatcaagtcacgtgattctcccttcaccccgcccccagggccttcccttctgcccccaggcgggctccccgctgctccagctgcggagctggtcgacataatctctgtattatatactttgcagttgcagacgtctgtgcctagcaatatttccagttgaccaaatattctaatcttttttcatttatatgcaaaagaaatagttttaagtaactttttatagcaagatgatacaatggtatgagtgtaatctaaacttccttgtggtattaccttgtatgctgttacttttattttattccttgtaattaagtcacaggcaggacccagtttccagagagcaggcggggccgcccagtgggtcaggcacagggagccccggtcctatcttagagcccctgagcttcagggaaggggcgggcgtgtcgccgcctctggcatcgcctccggttgccttacaccacgccttcacctgcagtcgcctagaaaacttgctctcaaacttcagggttttttcttccttcaaattttggaccaaagtctcatttctgtgttttgcctgcctctgatgctgggacccggaaggcgggcgctcctcctgtcttctctgtgctctttctaccgcccccgcgtcctgtcccgggggctctcctaggatcccctttccgtaaaagcgtgtaacaagggtgtaaatatttataattttttatacctgttgtgagacccgaggggcggcggcgcggttttttatggtgacacaaatgtatattttgctaacagcaattccaggctcagtattgtgaccgcggagccacaggggaccccacgcacattccgttgccttacccgatggcttgtgacgcggagagaaccgattaaaaccgtttgagaaactcctcccttgtctagccctgtgttcgctgtggacgctgtagaggcaggttggccagtctgtacctggacttcgaataaatcttctgtatcctcgctccgttccgcctt

SEQ ID NO: 1894 - DNA, 3260 bp, Homo sapiens
tgcgggcgtctccgccattttgtgagtctataactcggagccgttgggtcggttcctgctattccggcgcctccactccgtcccccgcgggtctgctctgtgtgccatggacggcattgtcccagatatagccgttggtacaaagcggggatctgacgagcttttctctacttgtgtcactaacggaccgtttatcatgagcagcaactcggcttctgcagcaaacggaaatgacagcaagaagttcaaaggtgacagccgaagtgcaggcgtcccctctagagtgatccacatccggaagctccccatcgacgtcacggagggggaagtcatctccctggggctgccctttgggaaggtcaccaacctcctgatgctgaaggggaaaaaccaggccttcatcgagatgaacacggaggaggctgccaacaccatggtgaactactacacctcggtgacccctgtgctgcgcggccagcccatctacatccagttctccaaccacaaggagctgaagaccgacagctctcccaaccaggcgcgggcccaggcggccctgcaggcggtgaactcggtccagtcggggaacctggccttggctgcctcggcggcggccgtggacgcagggatggcgatggccgggcagagccccgtgctcaggatcatcgtggagaacctcttctaccctgtgaccctggatgtgctgcaccagattttctccaagttcggcacagtgttgaagatcatcaccttcaccaagaacaaccagttccaggccctgctgcagtatgcggaccccgtgagcgcccagcacgccaagctgtcgctggacgggcagaacatctacaacgcctgctgcacgctgcgcatcgacttttccaagctcaccagcctcaacgtcaagtacaacaatgacaagagccgtgactacacacgcccagacctgccttccggggacagccagccctcgctggaccagaccatggccgcggccttcgcctctccgtatgcaggagctggtttccctcccacctttgccattcctcaagctgcaggcctttccgttccgaacgtccacggcgccctggcccccctggccatcccctcggcggcggcggcagctgcggcggcaggtcggatcgccatcccgggcctggcgggggcaggaaattctgtattgctggtcagcaacctcaacccagagagagtcacaccccaaagcctctttattcttttcggcgtctacggtgacgtgcagcgcgtgaagatcctgttcaataagaaggagaacgccctagtgcagatggcggacggcaaccaggcccagctggccatgagccacctgaacgggcacaagctgcacgggaagcccatccgcatcacgctctcgaagcaccagaacgtgcagctgccccgcgagggccaggaggaccagggcctgaccaaggactacggcaactcacccctgcaccgcttcaagaagccgggctccaagaacttccagaacatattcccgccctcggccacgctgcacctctccaacatcccgccctcagtctccgaggaggatctcaaggtcctgttttccagcaatgggggcgtcgtcaaaggattcaagttcttccagaaggaccgcaagatggcactgatccagatgggctccgtggaggaggcggtccaggccctcattgacctgcacaaccacgacctcggggagaaccaccacctgcgggtctccttctccaagtccaccatctaggggcacaggcccccacggccgggccccctggcgacaacttccatcattccagagaaaagccactttaaaaacagctgaagtgaccttagcagaccagagattttatttttttaaagagaaatcagtttacctgtttttaaaaaaattaaatctagttcaccttgctcaccctgcggtgacagggacagctcaggctcttggtgactgtggcagcgggagttcccggccctccacacccggggccagaccctcggggccatgccttggtggggcctgtgtcgggcgtggggcctgcaggtgggcgccccgaccacgacttggcttccttgtgccttaaaaaacctgccttcctgcagccacacacccacccggggtgtcctggggacccaaggggtgggggggtcacaccagagagaggcagggggcctggccggctcctgcaggatcatgcagctggggcgcggcggccgcggctgcgacaccccaaccccagccctctaatcaagtcacgtgattctcccttcaccccgcccccagggccttcccttctgcccccaggcgggctccccgctgctccagctgcggagctggtcgacataatctctgtattatatactttgcagttgcagacgtctgtgcctagcaatatttccagttgaccaaatattctaatcttttttcatttatatgcaaaagaaatagttttaagtaactttttatagcaagatgatacaatggtatgagtgtaatctaaacttccttgtggtattaccttgtatgctgttacttttattttattccttgtaattaagtcacaggcaggacccagtttccagagagcaggcggggccgcccagtgggtcaggcacagggagccccggtcctatcttagagcccctgagcttcagggaaggggcgggcgtgtcgccgcctctggcatcgcctccggttgccttacaccacgccttcacctgcagtcgcctagaaaacttgctctcaaacttcagggttttttcttccttcaaattttggaccaaagtctcatttctgtgttttgcctgcctctgatgctgggacccggaaggcgggcgctcctcctgtcttctctgtgctctttctaccgcccccgcgtcctgtcccgggggctctcctaggatcccctttccgtaaaagcgtgtaacaagggtgtaaatatttataattttttatacctgttgtgagacccgaggggcggcggcgcggttttttatggtgacacaaatgtatattttgctaacagcaattccaggctcagtattgtgaccgcggagccacaggggaccccacgcacattccgttgccttacccgatggcttgtgacgcggagagaaccgattaaaaccgtttgagaaactcctcccttgtctagccctgtgttcgctgtggacgctgtagaggcaggttggccagtctgtacctggacttcgaataaatcttctgtatcctcgctccgttccgcctt

SEQ ID NO: 1895 - DNA, 2672 bp, Homo sapiens
cggcgcctccactccgtcccccgcgggtctgctctgtgtgccatggacggcggggatctgacgagcttttctctacttgtgtcactaacggaccgtttatcatgagcagcaactcggcttctgcagcaaacggaaatgacagcaagaagttcaaaggtgacagccgaagtgcaggcgtcccctctagagtgatccacatccggaagctccccatcgacgtcacggagggggaagtcatctccctggggctgccctttgggaaggtcaccaacctcctgatgctgaaggggaaaaaccaggccttcatcgagatgaacacggaggaggctgccaacaccatggtgaactactacacctcggtgacccctgtgctgcgcggccagcccatctacatccagttctccaaccacaaggagctgaagaccgacagctctcccaaccaggcgcgggcccaggcggccctgcaggcggtgaactcggtccagtcggggaacctggccttggctgcctcggcggcggccgtggacgcagggatggcgatggccgggcagagccccgtgctcaggatcatcgtggagaacctcttctaccctgtgaccctggatgtgctgcaccagattttctccaagttcggcacagtgttgaagatcatcaccttcaccaagaacaaccagttccaggccctgctgcagtatgcggaccccgtgagcgcccagcacgccaagctgtcgctggacgggcagaacatctacaacgcctgctgcacgctgcgcatcgacttttccaagctcaccagcctcaacgtcaagtacaacaatgacaagagccgtgactacacacgcccagacctgccttccggggacagccagccctcgctggaccagaccatggccgcggccttcggtgcacctggtataatctcagcctctccgtatgcaggagctggtttccctcccacctttgccattcctcaagctgcaggcctttccgttccgaacgtccacggcgccctggcccccctggccatcccctcggcggcggcggcagctgcggcggcaggtcggatcgccatcccgggcctggcgggggcaggaaattctgtattgctggtcagcaacctcaacccagagagagtcacaccccaaagcctctttattcttttcggcgtctacggtgacgtgcagcgcgtgaagatcctgttcaataagaaggagaacgccctagtgcagatggcggacggcaaccaggcccagctggccatgagccacctgaacgggcacaagctgcacgggaagcccatccgcatcacgctctcgaagcaccagaacgtgcagctgccccgcgagggccaggaggaccagggcctgaccaaggactacggcaactcacccctgcaccgcttcaagaagccgggctccaagaacttccagaacatattcccgccctcggccacgctgcacctctccaacatcccgccctcagtctccgaggaggatctcaaggtcctgttttccagcaatgggggcgtcgtcaaaggattcaagttcttccagaaggaccgcaagatggcactgatccagatgggctccgtggaggaggcggtccaggccctcattgacctgcacaaccacgacctcggggagaaccaccacctgcgggtctccttctccaagtccaccatctaggggcacaggcccccacggccgggccccctggcgacaacttccatcattccagagaaaagccactttaaaaacagctgaagtgaccttagcagaccagagattttatttttttaaagagaaatcagtttacctgtttttaaaaaaattaaatctagttcaccttgctcaccctgcggtgacagggacagctcaggctcttggtgactgtggcagcgggagttcccggccctccacacccggggccagaccctcggggccatgccttggtggggcctgtgtcgggcgtggggcctgcaggtgggcgccccgaccacgacttggcttccttgtgccttaaaaaacctgccttcctgcagccacacacccacccggggtgtcctggggacccaaggggtgggggggtcacaccagagagaggcagggggccgcggctgcgacaccccaaccccagccctctaatcaagtcacgtgattctcccttcaccccgcccccagggccttcccttctgcccccaggcgggctccccgctgctccagctgcggagctggtcgacataatctctgtattatatactttgcagttgcagacgtctgtgcctagcaatatttccagttgaccaaatattctaatcttttttcatttatatgcaaaagaaatagttttaagtaactttttatagcaagatgatacaatggtatgagtgtaatctaaacttccttgtggtattaccttgtatgctgttacttttattttattccttgtaattaagtcacaggcaggacccagtttccagagagcaggcggggccgcccagtgggtcaggcacagggagccccggtcctatcttagagcccctgagcttcagggaaggggcgggcgtgtcgccgcctctggcatcgcctccggttttcagggttttttcttccttcaaattttggaccaaagtctcatttctgtgttttgcctgcctctgatgctgggacccg

SEQ ID NO: 1896 - DNA, 3203 bp, Homo sapiens
tgcgggcgtctccgccattttgtgagtctataactcggagccgttgggtcggttcctgctattccggcgcctccactccgtcccccgcgggtctgctctgtgtgccatggacggcattgtcccagatatagccgttggtacaaagcggggatctgacgagcttttctctacttgtgtcactaacggaccgtttatcatgagcagcaactcggcttctgcagcaaacggaaatgacagcaagaagttcaaaggtgacagccgaagtgcaggcgtcccctctagagtgatccacatccggaagctccccatcgacgtcacggagggggaagtcatctccctggggctgccctttgggaaggtcaccaacctcctgatgctgaaggggaaaaaccaggccttcatcgagatgaacacggaggaggctgccaacaccatggtgaactactacacctcggtgacccctgtgctgcgcggccagcccatctacatccagttctccaaccacaaggagctgaagaccgacagctctcccaaccaggcgcgggcccaggcggccctgcaggcggtgaactcggtccagtcggggaacctggccttggctgcctcggcggcggccgtggacgcagggatggcgatggccgggcagagccccgtgctcaggatcatcgtggagaacctcttctaccctgtgaccctggatgtgctgcaccagattttctccaagttcggcacagtgttgaagatcatcaccttcaccaagaacaaccagttccaggccctgctgcagtatgcggaccccgtgagcgcccagcacgccaagctgtcgctggacgggcagaacatctacaacgcctgctgcacgctgcgcatcgacttttccaagctcaccagcctcaacgtcaagtacaacaatgacaagagccgtgactacacacgcccagacctgccttccggggacagccagccctcgctggaccagaccatggccgcggccttcggcctttccgttccgaacgtccacggcgccctggcccccctggccatcccctcggcggcggcggcagctgcggcggcaggtcggatcgccatcccgggcctggcgggggcaggaaattctgtattgctggtcagcaacctcaacccagagagagtcacaccccaaagcctctttattcttttcggcgtctacggtgacgtgcagcgcgtgaagatcctgttcaataagaaggagaacgccctagtgcagatggcggacggcaaccaggcccagctggccatgagccacctgaacgggcacaagctgcacgggaagcccatccgcatcacgctctcgaagcaccagaacgtgcagctgccccgcgagggccaggaggaccagggcctgaccaaggactacggcaactcacccctgcaccgcttcaagaagccgggctccaagaacttccagaacatattcccgccctcggccacgctgcacctctccaacatcccgccctcagtctccgaggaggatctcaaggtcctgttttccagcaatgggggcgtcgtcaaaggattcaagttcttccagaaggaccgcaagatggcactgatccagatgggctccgtggaggaggcggtccaggccctcattgacctgcacaaccacgacctcggggagaaccaccacctgcgggtctccttctccaagtccaccatctaggggcacaggcccccacggccgggccccctggcgacaacttccatcattccagagaaaagccactttaaaaacagctgaagtgaccttagcagaccagagattttatttttttaaagagaaatcagtttacctgtttttaaaaaaattaaatctagttcaccttgctcaccctgcggtgacagggacagctcaggctcttggtgactgtggcagcgggagttcccggccctccacacccggggccagaccctcggggccatgccttggtggggcctgtgtcgggcgtggggcctgcaggtgggcgccccgaccacgacttggcttccttgtgccttaaaaaacctgccttcctgcagccacacacccacccggggtgtcctggggacccaaggggtgggggggtcacaccagagagaggcagggggcctggccggctcctgcaggatcatgcagctggggcgcggcggccgcggctgcgacaccccaaccccagccctctaatcaagtcacgtgattctcccttcaccccgcccccagggccttcccttctgcccccaggcgggctccccgctgctccagctgcggagctggtcgacataatctctgtattatatactttgcagttgcagacgtctgtgcctagcaatatttccagttgaccaaatattctaatcttttttcatttatatgcaaaagaaatagttttaagtaactttttatagcaagatgatacaatggtatgagtgtaatctaaacttccttgtggtattaccttgtatgctgttacttttattttattccttgtaattaagtcacaggcaggacccagtttccagagagcaggcggggccgcccagtgggtcaggcacagggagccccggtcctatcttagagcccctgagcttcagggaaggggcgggcgtgtcgccgcctctggcatcgcctccggttgccttacaccacgccttcacctgcagtcgcctagaaaacttgctctcaaacttcagggttttttcttccttcaaattttggaccaaagtctcatttctgtgttttgcctgcctctgatgctgggacccggaaggcgggcgctcctcctgtcttctctgtgctctttctaccgcccccgcgtcctgtcccgggggctctcctaggatcccctttccgtaaaagcgtgtaacaagggtgtaaatatttataattttttatacctgttgtgagacccgaggggcggcggcgcggttttttatggtgacacaaatgtatattttgctaacagcaattccaggctcagtattgtgaccgcggagccacaggggaccccacgcacattccgttgccttacccgatggcttgtgacgcggagagaaccgattaaaaccgtttgagaaactcctcccttgtctagccctgtgttcgctgtggacgctgtagaggcaggttggccagtctgtacctggacttcgaataaatcttctgtatcctcgctccgttccgcctt

SEQ ID NO: 1897 - DNA, 3203 bp, Homo sapiens; identical to SEQ ID NO: 1896

SEQ ID NO: 1898 - DNA, 1904 bp, Homo sapiens
ggccccggcttcccccggcagctcagcgaccaatgggcgcgcgagcggggccgcccgcagcttcccagcccgaggcccaggcgcgcccctctgctccggctcggggcgggcactggcggagggactggccagtcccctcctccgcgccggccccaaccctgtcgctgccgccgcgctccgagtccccattcccgagctgccgctgttgtcgctcgctcagcgtctccctctcggccgccctctcctcgggacgatggcgcgcggtggccgcggccgccgcctggggttagccctggggctgctgctggcgctggtgctggcgccgcgggttctgcgggccaagcccacggtgcgcaaagagcgcgtggtgcggcccgactcggagctgggcgagcggccccctgaggacaaccagagcttccagtacgaccacgaggccttcctgggcaaggaggactccaagaccttcgaccagctcaccccggacgagagcaaggagaggctagggaagattgttgatcgaatcgacaatgatggggatggctttgtcactactgaggagctgaaaacctggatcaaacgggtgcagaaaagatacatctttgataatgtcgccaaagtctggaaggattatgatagggacaaggatgataaaatttcctgggaagaatacaaacaagccacctatggttactacctaggaaaccccgcagagtttcatgattcttcagatcatcacacctttaaaaagatgctgccacgtgatgagagaagattcaaagctgcagacctcaatggtgacctgacagctactcgggaggagttcactgcctttctgcatcctgaagagtttgaacatatgaaggaaattgtggttttggaaaccctggaggacatcgacaagaacggggatgggtttgtggatcaggatgagtatattgcggatatgttttcccatgaggagaatggccctgagccagactgggttttatcagaacgggagcagtttaacgaattccgggatctgaacaaggacgggaagttagacaaagatgagattcgccactggatcctccctcaagattatgatcacgcacaggctgaggccaggcatctggtatatgaatcagacaaaaacaaggatgagaagctaactaaagaggaaatattggagaactggaacatgtttgttggaagccaagctaccaattacggggaagatctcacaaaaaatcatgatgagctttgatagacactcaccagaatatggcagactgtcataggcattctgttattgtcttggattgttgctacaattgtctaatttacagcagttgtgatcccacaaaaagcaagtttatacctcagattggggtataaaaattgtttttcgctcagtatttactggaaaatggacatcactagtctttcagtaagatttctctcaaaacacgtgaaaaccttgtgatcactgattagaatgagttggtgggatccttgggaagccaaacggagcggagttctggatcatgtcccatccagtccagtgaatccacgacccgcagacctgtccccccgcaacagcttataccatggaatgaggacaaggtgatactctgagctgtggactgaactggcagacacaacctgtacagattgaaatttcaccttgtaaggaggaagtgaatgaaataaaggatccccctaaggattttctactgtgtcctgtggtgtttgacttcacagatgctatttgtgacattattcatatagcataaaacagtggggttggatcccatgaataacattataaaggttctggggttttttttcatccaattactagaatgttcagaatagactcatatttactaatttaataaatgtatgtacttaatgccttt

SEQ ID NO: 1899 - DNA, 1904 bp, Homo sapiens; identical to SEQ ID NO: 1898

SEQ ID NO: 1900 - DNA, 8411 bp, Homo sapiens
gcgatccgggcgccaccccgcggtcatcggtcaccggtcgctctcaggaacagcagcgcaacctctgctccctgcctcgcctcccgcgcgcctaggtgcctgcgactttaattaaagggccgtcccctcgccgaggctgcagcaccgcccccccggcttctcgcgcctcaaaatgagtagctcccactctcgggcgggccagagcgcagcaggcgcggctccgggcggcggcgtcgacacgcgggacgccgagatgccggccaccgagaaggacctggcggaggacgcgccgtggaagaagatccagcagaacactttcacgcgctggtgcaacgagcacctgaagtgcgtgagcaagcgcatcgccaacctgcagacggacctgagcgacgggctgcggcttatcgcgctgttggaggtgctcagccagaagaagatgcaccgcaagcacaaccagcggcccactttccgccaaatgcagcttgagaacgtgtcggtggcgctcgagttcctggaccgcgagagcatcaaactggtgtccatcgacagcaaggccatcgtggacgggaacctgaagctgatcctgggcctcatctggaccctgatcctgcactactccatctccatgcccatgtgggacgaggaggaggatgaggaggccaagaagcagacccccaagcagaggctcctgggctggatccagaacaagctgccgcagctgcccatcaccaacttcagccgggactggcagagcggccgggccctgggcgccctggtggacagctgtgccccgggcctgtgtcctgactgggactcttgggacgccagcaagcccgttaccaatgcgcgagaggccatgcagcaggcggatgactggctgggcatcccccaggtgatcacccccgaggagattgtggaccccaacgtggacgagcactctgtcatgacctacctgtcccagttccccaaggccaagctgaagccaggggctcccttgcggcccaaactgaacccgaagaaagcccgtgcctacgggccaggcatcgagcccacaggcaacatggtgaagaagcgggcagagttcactgtggagaccagaagtgctggccagggagaggtgctggtgtacgtggaggacccggccggacaccaggaggaggcaaaagtgaccgccaataacgacaagaaccgcaccttctccgtctggtacgtccccgaggtgacggggactcataaggttactgtgctctttgctggccagcacatcgccaagagccccttcgaggtgtacgtggataagtcacagggtgacgccagcaaagtgacagcccaaggtcccggcctggagcccagtggcaacatcgccaacaagaccacctactttgagatctttacggcaggagctggcacgggcgaggtcgaggttgtgatccaggaccccatgggacagaagggcacggtagagcctcagctggaggcccggggcgacagcacataccgctgcagctaccagcccaccatggagggcgtccacaccgtgcacgtcacgtttgccggcgtgcccatccctcgcagcccctacactgtcactgttggccaagcctgtaacccgagtgcctgccgggcggttggccggggcctccagcccaagggtgtgcgggtgaaggagacagctgacttcaaggtgtacacaaagggcgctggcagtggggagctgaaggtcaccgtgaagggccccaagggagaggagcgcgtgaagcagaaggacctgggggatggcgtgtatggcttcgagtattaccccatggtccctggaacctatatcgtcaccatcacgtggggtggtcagaacatcgggcgcagtcccttcgaagtgaaggtgggcaccgagtgtggcaatcagaaggtacgggcctggggccctgggctggagggcggcgtcgttggcaagtcagcagactttgtggtggaggctatcggggacgacgtgggcacgctgggcttctcggtggaagggccatcgcaggctaagatcgaatgtgacgacaagggcgacggctcctgtgatgtgcgctactggccgcaggaggctggcgagtatgccgttcacgtgctgtgcaacagcgaagacatccgcctcagccccttcatggctgacatccgtgacgcgccccaggacttccacccagacagggtgaaggcacgtgggcctggattggagaagacaggtgtggccgtcaacaagccagcagagttcacagtggatgccaagcacggtggcaaggccccacttcgggtccaagtccaggacaatgaaggctgccctgtggaggcgttggtcaaggacaacggcaatggcacttacagctgctcctacgtgcccaggaagccggtgaagcacacagccatggtgtcctggggaggcgtcagcatccccaacagccccttcagggtgaatgtgggagctggcagccaccccaacaaggtcaaagtatacggccccggagtagccaagacagggctcaaggcccacgagcccacctacttcactgtggactgcgccgaggctggccagggggacgtcagcatcggcatcaagtgtgcccctggagtggtaggccccgccgaagctgacatcgacttcgacatcatccgcaatgacaatgacaccttcacggtcaagtacacgccccggggggctggcagctacaccattatggtcctctttgctgaccaggccacgcccaccagccccatccgagtcaaggtggagccctctcatgacgccagtaaggtgaaggccgagggccctggcctcagtcgcactggtgtcgagcttggcaagcccacccacttcacagtaaatgccaaagctgctggcaaaggcaagctggacgtccagttctcaggactcaccaagggggatgcagtgcgagatgtggacatcatcgaccaccatgacaacacctacacagtcaagtacacgcctgtccagcagggtccagtaggcgtcaatgtcacttatggaggggatcccatccctaagagccctttctcagtggcagtatctccaagcctggacctcagcaagatcaaggtgtctggcctgggagagaaggtggacgttggcaaagaccaggagttcacagtcaaatcaaagggtgctggtggtcaaggcaaagtggcatccaagattgtgggcccctcgggtgcagcggtgccctgcaaggtggagccaggcctgggggctgacaacagtgtggtgcgcttcctgccccgtgaggaagggccctatgaggtggaggtgacctatgacggcgtgcccgtgcctggcagcccctttcctctggaagctgtggcccccaccaagcctagcaaggtgaaggcgtttgggccggggctgcagggaggcagtgcgggctcccccgcccgcttcaccatcgacaccaagggcgccggcacaggtggcctgggcctgacggtggagggcccctgtgaggcgcagctcgagtgcttggacaatggggatggcacatgttccgtgtcctacgtgcccaccgagcccggggactacaacatcaacatcctcttcgctgacacccacatccctggctccccattcaaggcccacgtggttccctgctttgacgcatccaaagtcaagtgctcaggccccgggctggagcgggccaccgctggggaggtgggccaattccaagtggactgctcgagcgcgggcagcgcggagctgaccattgagatctgctcggaggcggggcttccggccgaggtgtacatccaggaccacggtgatggcacgcacaccattacctacattcccctctgccccggggcctacaccgtcaccatcaagtacggcggccagcccgtgcccaacttccccagcaagctgcaggtggaacctgcggtggacacttccggtgtccagtgctatgggcctggtattgagggccagggtgtcttccgtgaggccaccactgagttcagtgtggacgcccgggctctgacacagaccggagggccgcacgtcaaggcccgtgtggccaacccctcaggcaacctgacggagacctacgttcaggaccgtggcgatggcatgtacaaagtggagtacacgccttacgaggagggactgcactccgtggacgtgacctatgacggcagtcccgtgcccagcagccccttccaggtgcccgtgaccgagggctgcgacccctcccgggtgcgtgtccacgggccaggcatccaaagtggcaccaccaacaagcccaacaagttcactgtggagaccaggggagctggcacgggcggcctgggcctggctgtagagggcccctccgaggccaagatgtcctgcatggataacaaggacggcagctgctcggtcgagtacatcccttatgaggctggcacctacagcctcaacgtcacctatggtggccatcaagtgccaggcagtcctttcaaggtccctgtgcatgatgtgacagatgcgtccaaggtcaagtgctctgggcccggcctgagcccaggcatggttcgtgccaacctccctcagtccttccaggtggacacaagcaaggctggtgtggccccattgcaggtcaaagtgcaagggcccaaaggcctggtggagccagtggacgtggtagacaacgctgatggcacccagaccgtcaattatgtgcccagccgagaagggccctacagcatctcagtactgtatggagatgaagaggtaccccggagccccttcaaggtcaaggtgctgcctactcatgatgccagcaaggtgaaggccagtggccccgggctcaacaccactggcgtgcctgccagcctgcccgtggagttcaccatcgatgcaaaggacgccggggagggcctgctggctgtccagatcacggatcccgaaggcaagccgaagaagacacacatccaagacaaccatgacggcacgtatacagtggcctacgtgccagacgtgacaggtcgctacaccatcctcatcaagtacggtggtgacgagatccccttctccccgtaccgcgtgcgtgccgtgcccaccggggacgccagcaagtgcactgtcacaggtgctggcatcggccccaccattcagattggggaggagacggtgatcactgtggacactaaggcggcaggcaaaggcaaagtgacgtgcaccgtgtgcacgcctgatggctcagaggtggatgtggacgtggtggagaatgaggacggcactttcgacatcttctacacggccccccagccgggcaaatacgtcatctgtgtgcgctttggtggcgagcacgtgcccaacagccccttccaagtgacggctctggctggggaccagccctcggtgcagccccctctacggtctcagcagctggccccacagtacacctacgcccagggcggccagcagacttgggccccggagaggcccctggtgggtgtcaatgggctggatgtgaccagcctgaggccctttgaccttgtcatccccttcaccatcaagaagggcgagatcacaggggaggttcggatgccctcaggcaaggtggcgcagcccaccatcactgacaacaaagacggcaccgtgaccgtgcggtatgcacccagcgaggctggcctgcacgagatggacatccgctatgacaacatgcacatcccaggaagccccttgcagttctatgtggattacgtcaactgtggccatgtcactgcctatgggcctggcctcacccatggagtagtgaacaagcctgccaccttcaccgtcaacaccaaggatgcaggagaggggggcctgtctctggccattgagggcccgtccaaagcagaaatcagctgcactgacaaccaggatgggacatgcagcgtgtcctacctgcctgtgctgccgggggactacagcattctagtcaagtacaatgaacagcacgtcccaggcagccccttcactgctcgggtcacaggtgacgactccatgcgtatgtcccacctaaaggtcggctctgctgccgacatccccatcaacatctcagagacggatctcagcctgctgacggccactgtggtcccgccctcgggccgggaggagccctgtttgctgaagcggctgcgtaatggccacgtggggatttcattcgtgcccaaggagacgggggagcacctggtgcatgtgaagaaaaatggccagcacgtggccagcagccccatcccggtggtgatcagccagtcggaaattggggatgccagtcgtgttcgggtctctggtcagggccttcacgaaggccacacctttgagcctgcagagtttatcattgatacccgcgatgcaggctatggtgggctcagcctgtccattgagggccccagcaaggtggacatcaacacagaggacctggaggacgggacgtgcagggtcacctactgccccacagagccaggcaactacatcatcaacatcaagtttgccgaccagcacgtgcctggcagccccttctctgtgaaggtgacaggcgagggccgggtgaaagagagcatcacccgcaggcgtcgggctccttcagtggccaacgttggtagtcattgtgacctcagcctgaaaatccctgaaattagcatccaggatatgacagcccaggtgaccagcccatcgggcaagacccatgaggccgagatcgtggaaggggagaaccacacctactgcatccgctttgttcccgctgagatgggcacacacacagtcagcgtgaagtacaagggccagcacgtgcctgggagccccttccagttcaccgtggggcccctaggggaagggggagcccacaaggtccgagctgggggccctggcctggagagagctgaagctggagtgccagccgaattcagtatctggacccgggaagctggtgctggaggcctggccattgctgtcgagggccccagcaaggctgagatctcttttgaggaccgcaaggacggctcctgtggtgtggcttatgtggtccaggagccaggtgactacgaagtctcagtcaagttcaacgaggaacacattcccgacagccccttcgtggtgcctgtggcttctccgtctggcgacgcccgccgcctcactgtttctagccttcaggagtcagggctaaaggtcaaccagccagcctcttttgcagtcagcctgaacggggccaagggggcgatcgatgccaaggtgcacagcccctcaggagccctggaggagtgctatgtcacagaaattgaccaagataagtatgctgtgcgcttcatccctcgggagaatggcgtttacctgattgacgtcaagttcaacggcacccacatccctggaagccccttcaagatccgagttggggagcctgggcatggaggggacccaggcttggtgtctgcttacggagcaggtctggaaggcggtgtcacagggaacccagctgagttcgtcgtgaacacgagcaatgcgggagctggtgccctgtcggtgaccattgacggcccctccaaggtgaagatggattgccaggagtgccctgagggctaccgcgtcacctatacccccatggcacctggcagctacctcatctccatcaagtacggcggcccctaccacattgggggcagccccttcaaggccaaagtcacaggcccccgtctcgtcagcaaccacagcctccacgagacatcatcagtgtttgtagactctctgaccaaggccacctgtgccccccagcatggggccccgggtcctgggcctgctgacgccagcaaggtggtggccaagggcctggggctgagcaaggcctacgtaggccagaagagcagcttcacagtagactgcagcaaagcaggcaacaacatgctgctggtgggggttcatggcccaaggaccccctgcgaggagatcctggtgaagcacgtgggcagccggctctacagcgtgtcctacctgctcaaggacaagggggagtacacactggtggtcaaatggggggacgagcacatcccaggcagcccctaccgcgttgtggtgccctgagtctggggcccgtgccagccggcagcccccaagcctgccccgctacccaagcagccccgccctcttcccctcaaccccggcccaggccgccctggccgcccgcctgtcactgcagccgcccctgccctgtgccgtgctgcgctcacctgcctccccagccagccgctgacctctcggctttcacttgggcagagggagccatttggtggcgctgcttgtcttctttggttctgggaggggtgagggatgggggtcctgtacacaaccacccactagttctcttctccagccaagaggaataaagttttgcttccattct

SEQ ID NO: 1901 - DNA, 8850 bp, Homo sapiens
gcgatccgggcgccaccccgcggtcatcggtcaccggtcgctctcaggaacagcagcgcaacctctgctccctgcctcgcctcccgcgcgcctaggtgcctgcgactttaattaaagggccgtcccctcgccgaggctgcagcaccgcccccccggcttctcgcgcctcaaaatgagtagctcccactctcgggcgggccagagcgcagcaggcgcggctccgggcggcggcgtcgacacgcgggacgccgagatgccggccaccgagaaggacctggcggaggacgcgccgtggaagaagatccagcagaacactttcacgcgctggtgcaacgagcacctgaagtgcgtgagcaagcgcatcgccaacctgcagacggacctgagcgacgggctgcggcttatcgcgctgttggaggtgctcagccagaagaagatgcaccgcaagcacaaccagcggcccactttccgccaaatgcagcttgagaacgtgtcggtggcgctcgagttcctggaccgcgagagcatcaaactggtgtccatcgacagcaaggccatcgtggacgggaacctgaagctgatcctgggcctcatctggaccctgatcctgcactactccatctccatgcccatgtgggacgaggaggaggatgaggaggccaagaagcagacccccaagcagaggctcctgggctggatccagaacaagctgccgcagctgcccatcaccaacttcagccgggactggcagagcggccgggccctgggcgccctggtggacagctgtgccccgggcctgtgtcctgactgggactcttgggacgccagcaagcccgttaccaatgcgcgagaggccatgcagcaggcggatgactggctgggcatcccccaggtgatcacccccgaggagattgtggaccccaacgtggacgagcactctgtcatgacctacctgtcccagttccccaaggccaagctgaagccaggggctcccttgcggcccaaactgaacccgaagaaagcccgtgcctacgggccaggcatcgagcccacaggcaacatggtgaagaagcgggcagagttcactgtggagaccagaagtgctggccagggagaggtgctggtgtacgtggaggacccggccggacaccaggaggaggcaaaagtgaccgccaataacgacaagaaccgcaccttctccgtctggtacgtccccgaggtgacggggactcataaggttactgtgctctttgctggccagcacatcgccaagagccccttcgaggtgtacgtggataagtcacagggtgacgccagcaaagtgacagcccaaggtcccggcctggagcccagtggcaacatcgccaacaagaccacctactttgagatctttacggcaggagctggcacgggcgaggtcgaggttgtgatccaggaccccatgggacagaagggcacggtagagcctcagctggaggcccggggcgacagcacataccgctgcagctaccagcccaccatggagggcgtccacaccgtgcacgtcacgtttgccggcgtgcccatccctcgcagcccctacactgtcactgttggccaagcctgtaacccgagtgcctgccgggcggttggccggggcctccagcccaagggtgtgcgggtgaaggagacagctgacttcaaggtgtacacaaagggcgctggcagtggggagctgaaggtcaccgtgaagggccccaagggagaggagcgcgtgaagcagaaggacctgggggatggcgtgtatggcttcgagtattaccccatggtccctggaacctatatcgtcaccatcacgtggggtggtcagaacatcgggcgcagtcccttcgaagtgaaggtgggcaccgagtgtggcaatcagaaggtacgggcctggggccctgggctggagggcggcgtcgttggcaagtcagcagactttgtggtggaggctatcggggacgacgtgggcacgctgggcttctcggtggaagggccatcgcaggctaagatcgaatgtgacgacaagggcgacggctcctgtgatgtgcgctactggccgcaggaggctggcgagtatgccgttcacgtgctgtgcaacagcgaagacatccgcctcagccccttcatggctgacatccgtgacgcgccccaggacttccacccagacagggtgaaggcacgtgggcctggattggagaagacaggtgtggccgtcaacaagccagcagagttcacagtggatgccaagcacggtggcaaggccccacttcgggtccaagtccaggacaatgaaggctgccctgtggaggcgttggtcaaggacaacggcaatggcacttacagctgctcctacgtgcccaggaagccggtgaagcacacagccatggtgtcctggggaggcgtcagcatccccaacagccccttcagggtgaatgtgggagctggcagccaccccaacaaggtcaaagtatacggccccggagtagccaagacagggctcaaggcccacgagcccacctacttcactgtggactgcgccgaggctggccagggggacgtcagcatcggcatcaagtgtgcccctggagtggtaggccccgccgaagctgacatcgacttcgacatcatccgcaatgacaatgacaccttcacggtcaagtacacgccccggggggctggcagctacaccattatggtcctctttgctgaccaggccacgcccaccagccccatccgagtcaaggtggagccctctcatgacgccagtaaggtgaaggccgagggccctggcctcagtcgcactggtgtcgagcttggcaagcccacccacttcacagtaaatgccaaagctgctggcaaaggcaagctggacgtccagttctcaggactcaccaagggggatgcagtgcgagatgtggacatcatcgaccaccatgacaacacctacacagtcaagtacacgcctgtccagcagggtccagtaggcgtcaatgtcacttatggaggggatcccatccctaagagccctttctcagtggcagtatctccaagcctggacctcagcaagatcaaggtgtctggcctgggagagaaggtggacgttggcaaagaccaggagttcacagtcaaatcaaagggtgctggtggtcaaggcaaagtggcatccaagattgtgggcccctcgggtgcagcggtgccctgcaaggtggagccaggcctgggggctgacaacagtgtggtgcgcttcctgccccgtgaggaagggccctatgaggtggaggtgacctatgacggcgtgcccgtgcctggcagcccctttcctctggaagctgtggcccccaccaagcctagcaaggtgaaggcgtttgggccggggctgcagggaggcagtgcgggctcccccgcccgcttcaccatcgacaccaagggcgccggcacaggtggcctgggcctgacggtggagggcccctgtgaggcgcagctcgagtgcttggacaatggggatggcacatgttccgtgtcctacgtgcccaccgagcccggggactacaacatcaacatcctcttcgctgacacccacatccctggctccccattcaaggcccacgtggttccctgctttgacgcatccaaagtcaagtgctcaggccccgggctggagcgggccaccgctggggaggtgggccaattccaagtggactgctcgagcgcgggcagcgcggagctgaccattgagatctgctcggaggcggggcttccggccgaggtgtacatccaggaccacggtgatggcacgcacaccattacctacattcccctctgccccggggcctacaccgtcaccatcaagtacggcggccagcccgtgcccaacttccccagcaagctgcaggtggaacctgcggtggacacttccggtgtccagtgctatgggcctggtattgagggccagggtgtcttccgtgaggccaccactgagttcagtgtggacgcccgggctctgacacagaccggagggccgcacgtcaaggcccgtgtggccaacccctcaggcaacctgacggagacctacgttcaggaccgtggcgatggcatgtacaaagtggagtacacgccttacgaggagggactgcactccgtggacgtgacctatgacggcagtcccgtgcccagcagccccttccaggtgcccgtgaccgagggctgcgacccctcccgggtgcgtgtccacgggccaggcatccaaagtggcaccaccaacaagcccaacaagttcactgtggagaccaggggagctggcacgggcggcctgggcctggctgtagagggcccctccgaggccaagatgtcctgcatggataacaaggacggcagctgctcggtcgagtacatcccttatgaggctggcacctacagcctcaacgtcacctatggtggccatcaagtgccaggcagtcctttcaaggtccctgtgcatgatgtgacagatgcgtccaaggtcaagtgctctgggcccggcctgagcccaggcatggttcgtgccaacctccctcagtccttccaggtggacacaagcaaggctggtgtggccccattgcaggtcaaagtgcaagggcccaaaggtgagtgtttgcatgcctggagccaggggtcaggagggcagtgtcctgtttgagggccgggaaaggaaactggaggcccaaagtgaggaccagagtgcagaggtggtgcaagtgtgtaggtgtttttggaagagcctcaggtgacagtgcagccaggtgggggacttggaggaggtagagcagatgggactggtcactgagcagatgtggcaggaaggcaggcaggcaagggtcccagctggcacccagatgggtgtctttcgtgccagagggggtcaaggccattcccagggtcgggtggatgaggataaagcgaggtctaggcctggggctgggtcctggccgtccagtgtggtggggtaggaatggaggcccaggagactagctgatgctctgtccctggggctggggccaggcctggtggagccagtggacgtggtagacaacgctgatggcacccagaccgtcaattatgtgcccagccgagaagggccctacagcatctcagtactgtatggagatgaagaggtaccccggagccccttcaaggtcaaggtgctgcctactcatgatgccagcaaggtgaaggccagtggccccgggctcaacaccactggcgtgcctgccagcctgcccgtggagttcaccatcgatgcaaaggacgccggggagggcctgctggctgtccagatcacggatcccgaaggcaagccgaagaagacacacatccaagacaaccatgacggcacgtatacagtggcctacgtgccagacgtgacaggtcgctacaccatcctcatcaagtacggtggtgacgagatccccttctccccgtaccgcgtgcgtgccgtgcccaccggggacgccagcaagtgcactgtcacagtgtcaatcggaggtcacgggctaggtgctggcatcggccccaccattcagattggggaggagacggtgatcactgtggacactaaggcggcaggcaaaggcaaagtgacgtgcaccgtgtgcacgcctgatggctcagaggtggatgtggacgtggtggagaatgaggacggcactttcgacatcttctacacggccccccagccgggcaaatacgtcatctgtgtgcgctttggtggcgagcacgtgcccaacagccccttccaagtgacggctctggctggggaccagccctcggtgcagccccctctacggtctcagcagctggccccacagtacacctacgcccagggcggccagcagacttgggccccggagaggcccctggtgggtgtcaatgggctggatgtgaccagcctgaggccctttgaccttgtcatccccttcaccatcaagaagggcgagatcacaggggaggttcggatgccctcaggcaaggtggcgcagcccaccatcactgacaacaaagacggcaccgtgaccgtgcggtatgcacccagcgaggctggcctgcacgagatggacatccgctatgacaacatgcacatcccaggaagccccttgcagttctatgtggattacgtcaactgtggccatgtcactgcctatgggcctggcctcacccatggagtagtgaacaagcctgccaccttcaccgtcaacaccaaggatgcaggagaggggggcctgtctctggccattgagggcccgtccaaagcagaaatcagctgcactgacaaccaggatgggacatgcagcgtgtcctacctgcctgtgctgccgggggactacagcattctagtcaagtacaatgaacagcacgtcccaggcagccccttcactgctcgggtcacaggtgacgactccatgcgtatgtcccacctaaaggtcggctctgctgccgacatccccatcaacatctcagagacggatctcagcctgctgacggccactgtggtcccgccctcgggccgggaggagccctgtttgctgaagcggctgcgtaatggccacgtggggatttcattcgtgcccaaggagacgggggagcacctggtgcatgtgaagaaaaatggccagcacgtggccagcagccccatcccggtggtgatcagccagtcggaaattggggatgccagtcgtgttcgggtctctggtcagggccttcacgaaggccacacctttgagcctgcagagtttatcattgatacccgcgatgcaggctatggtgggctcagcctgtccattgagggccccagcaaggtggacatcaacacagaggacctggaggacgggacgtgcagggtcacctactgccccacagagccaggcaactacatcatcaacatcaagtttgccgaccagcacgtgcctggcagccccttctctgtgaaggtgacaggcgagggccgggtgaaagagagcatcacccgcaggcgtcgggctccttcagtggccaacgttggtagtcattgtgacctcagcctgaaaatccctgaaattagcatccaggatatgacagcccaggtgaccagcccatcgggcaagacccatgaggccgagatcgtggaaggggagaaccacacctactgcatccgctttgttcccgctgagatgggcacacacacagtcagcgtgaagtacaagggccagcacgtgcctgggagccccttccagttcaccgtggggcccctaggggaagggggagcccacaaggtccgagctgggggccctggcctggagagagctgaagctggagtgccagccgaattcagtatctggacccgggaagctggtgctggaggcctggccattgctgtcgagggccccagcaaggctgagatctcttttgaggaccgcaaggacggctcctgtggtgtggcttatgtggtccaggagccaggtgactacgaagtctcagtcaagttcaacgaggaacacattcccgacagccccttcgtggtgcctgtggcttctccgtctggcgacgcccgccgcctcactgtttctagccttcaggagtcagggctaaaggtcaaccagccagcctcttttgcagtcagcctgaacggggccaagggggcgatcgatgccaaggtgcacagcccctcaggagccctggaggagtgctatgtcacagaaattgaccaagataagtatgctgtgcgcttcatccctcgggagaatggcgtttacctgattgacgtcaagttcaacggcacccacatccctggaagccccttcaagatccgagttggggagcctgggcatggaggggacccaggcttggtgtctgcttacggagcaggtctggaaggcggtgtcacagggaacccagctgagttcgtcgtgaacacgagcaatgcgggagctggtgccctgtcggtgaccattgacggcccctccaaggtgaagatggattgccaggagtgccctgagggctaccgcgtcacctatacccccatggcacctggcagctacctcatctccatcaagtacggcggcccctaccacattgggggcagccccttcaaggccaaagtcacaggcccccgtctcgtcagcaaccacagcctccacgagacatcatcagtgtttgtagactctctgaccaaggccacctgtgccccccagcatggggccccgggtcctgggcctgctgacgccagcaaggtggtggccaagggcctggggctgagcaaggcctacgtaggccagaagagcagcttcacagtagactgcagcaaagcaggcaacaacatgctgctggtgggggttcatggcccaaggaccccctgcgaggagatcctggtgaagcacgtgggcagccggctctacagcgtgtcctacctgctcaaggacaagggggagtacacactggtggtcaaatggggggacgagcacatcccaggcagcccctaccgcgttgtggtgccctgagtctggggcccgtgccagccggcagcccccaagcctgccccgctacccaagcagccccgccctcttcccctcaaccccggcccaggccgccctggccgcccgcctgtcactgcagccgcccctgccctgtgccgtgctgcgctcacctgcctccccagccagccgctgacctctcggctttcacttgggcagagggagccatttggtggcgctgcttgtcttctttggttctgggaggggtgagggatgggggtcctgtacacaaccacccactagttctcttctccagccaagaggaataaagttttgcttccattct

SEQ ID NO: 1902 - DNA, 8206 bp, Homo sapiens
gcgatccgggcgccaccccgcggtcatcggtcaccggtcgctctcaggaacagcagcgcaacctctgctccctgcctcgcctcccgcgcgcctaggtgcctgcgactttaattaaagggccgtcccctcgccgaggctgcagcaccgcccccccggcttctcgcgcctcaaaatgagtagctcccactctcgggcgggccagagcgcagcaggcgcggctccgggcggcggcgtcgacacgcgggacgccgagatgccggccaccgagaaggacctggcggaggacgcgccgtggaagaagatccagcagaacactttcacgcgctggtgcaacgagcacctgaagtgcgtgagcaagcgcatcgccaacctgcagacggacctgagcgacgggctgcggcttatcgcgctgttggaggtgctcagccagaagaagatgcaccgcaagcacaaccagcggcccactttccgccaaatgcagcttgagaacgtgtcggtggcgctcgagttcctggaccgcgagagcatcaaactggtgtccatcgacagcaaggccatcgtggacgggaacctgaagctgatcctgggcctcatctggaccctgatcctgcactactccatctccatgcccatgtgggacgaggaggaggatgaggaggccaagaagcagacccccaagcagaggctcctgggctggatccagaacaagctgccgcagctgcccatcaccaacttcagccgggactggcagagcggccgggccctgggcgccctggtggacagctgtgccccgggcctgtgtcctgactgggactcttgggacgccagcaagcccgttaccaatgcgcgagaggccatgcagcaggcggatgactggctgggcatcccccaggtgatcacccccgaggagattgtggaccccaacgtggacgagcactctgtcatgacctacctgtcccagttccccaaggccaagctgaagccaggggctcccttgcggcccaaactgaacccgaagaaagcccgtgcctacgggccaggcatcgagcccacaggcaacatggtgaagaagcgggcagagttcactgtggagaccagaagtgctggccagggagaggtgctggtgtacgtggaggacccggccggacaccaggaggaggcaaaagtgaccgccaataacgacaagaaccgcaccttctccgtctggtacgtccccgaggtgacggggactcataaggttactgtgctctttgctggccagcacatcgccaagagccccttcgaggtgtacgtggataagtcacagggtgacgccagcaaagtgacagcccaaggtcccggcctggagcccagtggcaacatcgccaacaagaccacctactttgagatctttacggcaggagctggcacgggcgaggtcgaggttgtgatccaggaccccatgggacagaagggcacggtagagcctcagctggaggcccggggcgacagcacataccgctgcagctaccagcccaccatggagggcgtccacaccgtgcacgtcacgtttgccggcgtgcccatccctcgcagcccctacactgtcactgttggccaagcctgtaacccgagtgcctgccgggcggttggccggggcctccagcccaagggtgtgcgggtgaaggagacagctgacttcaaggtgtacacaaagggcgctggcagtggggagctgaaggtcaccgtgaagggccccaagggagaggagcgcgtgaagcagaaggacctgggggatggcgtgtatggcttcgagtattaccccatggtccctggaacctatatcgtcaccatcacgtggggtggtcagaacatcgggcgcagtcccttcgaagtgaaggtgggcaccgagtgtggcaatcagaaggtacgggcctggggccctgggctggagggcggcgtcgttggcaagtcagcagactttgtggtggaggctatcggggacgacgtgggcacgctgggcttctcggtggaagggccatcgcaggctaagatcgaatgtgacgacaagggcgacggctcctgtgatgtgcgctactggccgcaggaggctggcgagtatgccgttcacgtgctgtgcaacagcgaagacatccgcctcagccccttcatggctgacatccgtgacgcgccccaggacttccacccagacagggtgaaggcacgtgggcctggattggagaagacaggtgtggccgtcaacaagccagcagagttcacagtggatgccaagcacggtggcaaggccccacttcgggtccaagtccaggacaatgaaggctgccctgtggaggcgttggtcaaggacaacggcaatggcacttacagctgctcctacgtgcccaggaagccggtgaagcacacagccatggtgtcctggggaggcgtcagcatccccaacagccccttcagggtgaatgtgggagctggcagccaccccaacaaggtcaaagtatacggccccggagtagccaagacagggctcaaggcccacgagcccacctacttcactgtggactgcgccgaggctggccagggggacgtcagcatcggcatcaagtgtgcccctggagtggtaggccccgccgaagctgacatcgacttcgacatcatccgcaatgacaatgacaccttcacggtcaagtacacgccccggggggctggcagctacaccattatggtcctctttgctgaccaggccacgcccaccagccccatccgagtcaaggtggagccctctcatgacgccagtaaggtgaaggccgagggccctggcctcagtcgcactggtgtcgagcttggcaagcccacccacttcacagtaaatgccaaagctgctggcaaaggcaagctggacgtccagttctcaggactcaccaagggggatgcagtgcgagatgtggacatcatcgaccaccatgacaacacctacacagtcaagtacacgcctgtccagcagggtccagtaggcgtcaatgtcacttatggaggggatcccatccctaagagccctttctcagtggcagtatctccaagcctggacctcagcaagatcaaggtgtctggcctgggagagaaggtggacgttggcaaagaccaggagttcacagtcaaatcaaagggtgctggtggtcaaggcaaagtggcatccaagattgtgggcccctcgggtgcagcggtgccctgcaaggtggagccaggcctgggggctgacaacagtgtggtgcgcttcctgccccgtgaggaagggccctatgaggtggaggtgacctatgacggcgtgcccgtgcctggcagcccctttcctctggaagctgtggcccccaccaagcctagcaaggtgaaggcgtttgggccggggctgcagggaggcagtgcgggctcccccgcccgcttcaccatcgacaccaagggcgccggcacaggtggcctgggcctgacggtggagggcccctgtgaggcgcagctcgagtgcttggacaatggggatggcacatgttccgtgtcctacgtgcccaccgagcccggggactacaacatcaacatcctcttcgctgacacccacatccctggctccccattcaaggcccacgtggttccctgctttgacgcatccaaagtcaagtgctcaggccccgggctggagcgggccaccgctggggaggtgggccaattccaagtggactgctcgagcgcgggcagcgcggagctgaccattgagatctgctcggaggcggggcttccggccgaggtgtacatccaggaccacggtgatggcacgcacaccattacctacattcccctctgccccggggcctacaccgtcaccatcaagtacggcggccagcccgtgcccaacttccccagcaagctgcaggtggaacctgcggtggacacttccggtgtccagtgctatgggcctggtattgagggccagggtgtcttccgtgaggccaccactgagttcagtgtggacgcccgggctctgacacagaccggagggccgcacgtcaaggcccgtgtggccaacccctcaggcaacctgacggagacctacgttcaggaccgtggcgatggcatgtacaaagtggagtacacgccttacgaggagggactgcactccgtggacgtgacctatgacggcagtcccgtgcccagcagccccttccaggtgcccgtgaccgagggctgcgacccctcccgggtgcgtgtccacgggccaggcatccaaagtggcaccaccaacaagcccaacaagttcactgtggagaccaggggagctggcacgggcggcctgggcctggctgtagagggcccctccgaggccaagatgtcctgcatggataacaaggacggcagctgctcggtcgagtacatcccttatgaggctggcacctacagcctcaacgtcacctatggtggccatcaagtgccaggcagtcctttcaaggtccctgtgcatgatgtgacagatgcgtccaaggtcaagtgctctgggcccggcctgagcccaggcatggttcgtgccaacctccctcagtccttccaggtggacacaagcaaggctggtgtggccccattgcaggtcaaagtgcaagggcccaaaggcctggtggagccagtggacgtggtagacaacgctgatggcacccagaccgtcaattatgtgcccagccgagaagggccctacagcatctcagtactgtatggagatgaagaggtaccccggagccccttcaaggtcaaggtgctgcctactcatgatgccagcaaggtgaaggccagtggccccgggctcaacaccactggcgtgcctgccagcctgcccgtggagttcaccatcgatgcaaaggacgccggggagggcctgctggctgtccagatcacggatcccgaaggcaagccgaagaagacacacatccaagacaaccatgacggcacgtatacagtggcctacgtgccagacgtgacaggtcgctacaccatcctcatcaagtacggtggtgacgagatccccttctccccgtaccgcgtgcgtgccgtgcccaccggggacgccagcaagtgcactgtcacagtgtcaatcggaggtcacgggctaggtgctggcatcggccccaccattcagattggggaggagacggtgatcactgtggacactaaggcggcaggcaaaggcaaagtgacgtgcaccgtgtgcacgcctgatggctcagaggtggatgtggacgtggtggagaatgaggacggcactttcgacatcttctacacggccccccagccgggcaaatacgtcatctgtgtgcgctttggtggcgagcacgtgcccaacagccccttccaagtgacggctctggctggggaccagccctcggtgcagccccctctacggtctcagcagctggccccacagtacacctacgcccagggcggccagcagacttgggccccggagaggcccctggtgggtgtcaatgggctggatgtgaccagcctgaggccctttgaccttgtcatccccttcaccatcaagaagggcgagatcacaggggaggttcggatgccctcaggcaaggtggcgcagcccaccatcactgacaacaaagacggcaccgtgaccgtgcggtatgcacccagcgaggctggcctgcacgagatggacatccgctatgacaacatgcacatcccaggaagccccttgcagttctatgtggattacgtcaactgtggccatgtcactgcctatgggcctggcctcacccatggagtagtgaacaagcctgccaccttcaccgtcaacaccaaggatgcaggagaggggggcctgtctctggccattgagggcccgtccaaagcagaaatcagctgcactgacaaccaggatgggacatgcagcgtgtcctacctgcctgtgctgccgggggactacagcattctagtcaagtacaatgaacagcacgtcccaggcagccccttcactgctcgggtcacaggtgacgactccatgcgtatgtcccacctaaaggtcggctctgctgccgacatccccatcaacatctcagagacggatctcagcctgctgacggccactgtggtcccgccctcgggccgggaggagccctgtttgctgaagcggctgcgtaatggccacgtggggatttcattcgtgcccaaggagacgggggagcacctggtgcatgtgaagaaaaatggccagcacgtggccagcagccccatcccggtggtgatcagccagtcggaaattggggatgccagtcgtgttcgggtctctggtcagggccttcacgaaggccacacctttgagcctgcagagtttatcattgatacccgcgatgcaggctatggtgggctcagcctgtccattgagggccccagcaaggtggacatcaacacagaggacctggaggacgggacgtgcagggtcacctactgccccacagagccaggcaactacatcatcaacatcaagtttgccgaccagcacgtgcctggcagccccttctctgtgaaggtgacaggcgagggccgggtgaaagagagcatcacccgcaggcgtcgggctccttcagtggccaacgttggtagtcattgtgacctcagcctgaaaatccctgaaattagcatccaggatatgacagcccaggtgaccagcccatcgggcaagacccatgaggccgagatcgtggaaggggagaaccacacctactgcatccgctttgttcccgctgagatgggcacacacacagtcagcgtgaagtacaagggccagcacgtgcctgggagccccttccagttcaccgtggggcccctaggggaagggggagcccacaaggtccgagctgggggccctggcctggagagagctgaagctggagtgccagccgaattcagtatctggacccgggaagctggtgctggaggcctggccattgctgtcgagggccccagcaaggctgagatctcttttgaggaccgcaaggacggctcctgtggtgtggcttatgtggtccaggagccaggtatacgaagtctcagtcaagttcaacgaggaacacattcccgacagccccttcgtggtgcctgtggcttctccgtctggcgacgcccgccgcctcactgtttctagccttcaggagtcagggctaaaggtcaaccagccagcctcttttgcagtcagcctgaacggggccaagggggcgatcgatgccaaggtgcacagcccctcaggagccctggaggagtgctatgtcacagaaattgaccaagataagtatgctgtgcgcttcatccctcgggagaatggcgtttacctgattgacgtcaagttcaacggcacccacatccctggaagccccttcaagatccgagttggggagcctgggcatggaggggacccaggcttggtgtctgcttacggagcaggtctggaaggcggtgtcacagggaacccagctgagttcgtcgtgaacacgagcaatgcgggagctggtgccctgtcggtgaccattgacggcccctccaaggtgaagatggattgccaggagtgccctgagggctaccgcgtcacctatacccccatggcacctggcagctacctcatctccatcaagtacggcggcccctaccacattgggggcagccccttcaaggccaaagtcacaggcccccgtctcgtcagcaaccacagcctccacgagacatcatcagtgtttgtagactctctgaccaaggccacctgtgccccccagcatggggccccgggtcctgggcctgctgacgccagcaaggtggtggccaagggcctggggctgagcaaggcctacgtaggccagaagagcagcttcacagtagactgcagcaaagcaggcaacaacatgctgctggtgggggttcatggcccaaggaccccctgcgaggagatcctggtgaagcacgtgggcagccggctctacagcgtgtcctacctgcgctcacctgcctccccagccagccgctgacctctcggctttcacttgggcagagggagccatttggtggcgctgcttgtcttctttggttctgggaggggtgagggatgggggtcctgtacacaaccacccactagttctcttctccagccaagaggaataaagttttgcttccattc

SEQ ID NO: 1903 - DNA, 8435 bp, Homo sapiens
gcgatccgggcgccaccccgcggtcatcggtcaccggtcgctctcaggaacagcagcgcaacctctgctccctgcctcgcctcccgcgcgcctaggtgcctgcgactttaattaaagggccgtcccctcgccgaggctgcagcaccgcccccccggcttctcgcgcctcaaaatgagtagctcccactctcgggcgggccagagcgcagcaggcgcggctccgggcggcggcgtcgacacgcgggacgccgagatgccggccaccgagaaggacctggcggaggacgcgccgtggaagaagatccagcagaacactttcacgcgctggtgcaacgagcacctgaagtgcgtgagcaagcgcatcgccaacctgcagacggacctgagcgacgggctgcggcttatcgcgctgttggaggtgctcagccagaagaagatgcaccgcaagcacaaccagcggcccactttccgccaaatgcagcttgagaacgtgtcggtggcgctcgagttcctggaccgcgagagcatcaaactggtgtccatcgacagcaaggccatcgtggacgggaacctgaagctgatcctgggcctcatctggaccctgatcctgcactactccatctccatgcccatgtgggacgaggaggaggatgaggaggccaagaagcagacccccaagcagaggctcctgggctggatccagaacaagctgccgcagctgcccatcaccaacttcagccgggactggcagagcggccgggccctgggcgccctggtggacagctgtgccccgggcctgtgtcctgactgggactcttgggacgccagcaagcccgttaccaatgcgcgagaggccatgcagcaggcggatgactggctgggcatcccccaggtgatcacccccgaggagattgtggaccccaacgtggacgagcactctgtcatgacctacctgtcccagttccccaaggccaagctgaagccaggggctcccttgcggcccaaactgaacccgaagaaagcccgtgcctacgggccaggcatcgagcccacaggcaacatggtgaagaagcgggcagagttcactgtggagaccagaagtgctggccagggagaggtgctggtgtacgtggaggacccggccggacaccaggaggaggcaaaagtgaccgccaataacgacaagaaccgcaccttctccgtctggtacgtccccgaggtgacggggactcataaggttactgtgctctttgctggccagcacatcgccaagagccccttcgaggtgtacgtggataagtcacagggtgacgccagcaaagtgacagcccaaggtcccggcctggagcccagtggcaacatcgccaacaagaccacctactttgagatctttacggcaggagctggcacgggcgaggtcgaggttgtgatccaggaccccatgggacagaagggcacggtagagcctcagctggaggcccggggcgacagcacataccgctgcagctaccagcccaccatggagggcgtccacaccgtgcacgtcacgtttgccggcgtgcccatccctcgcagcccctacactgtcactgttggccaagcctgtaacccgagtgcctgccgggcggttggccggggcctccagcccaagggtgtgcgggtgaaggagacagctgacttcaaggtgtacacaaagggcgctggcagtggggagctgaaggtcaccgtgaagggccccaagggagaggagcgcgtgaagcagaaggacctgggggatggcgtgtatggcttcgagtattaccccatggtccctggaacctatatcgtcaccatcacgtggggtggtcagaacatcgggcgcagtcccttcgaagtgaaggtgggcaccgagtgtggcaatcagaaggtacgggcctggggccctgggctggagggcggcgtcgttggcaagtcagcagactttgtggtggaggctatcggggacgacgtgggcacgctgggcttctcggtggaagggccatcgcaggctaagatcgaatgtgacgacaagggcgacggctcctgtgatgtgcgctactggccgcaggaggctggcgagtatgccgttcacgtgctgtgcaacagcgaagacatccgcctcagccccttcatggctgacatccgtgacgcgccccaggacttccacccagacagggtgaaggcacgtgggcctggattggagaagacaggtgtggccgtcaacaagccagcagagttcacagtggatgccaagcacggtggcaaggccccacttcgggtccaagtccaggacaatgaaggctgccctgtggaggcgttggtcaaggacaacggcaatggcacttacagctgctcctacgtgcccaggaagccggtgaagcacacagccatggtgtcctggggaggcgtcagcatccccaacagccccttcagggtgaatgtgggagctggcagccaccccaacaaggtcaaagtatacggccccggagtagccaagacagggctcaaggcccacgagcccacctacttcactgtggactgcgccgaggctggccagggggacgtcagcatcggcatcaagtgtgcccctggagtggtaggccccgccgaagctgacatcgacttcgacatcatccgcaatgacaatgacaccttcacggtcaagtacacgccccggggggctggcagctacaccattatggtcctctttgctgaccaggccacgcccaccagccccatccgagtcaaggtggagccctctcatgacgccagtaaggtgaaggccgagggccctggcctcagtcgcactggtgtcgagcttggcaagcccacccacttcacagtaaatgccaaagctgctggcaaaggcaagctggacgtccagttctcaggactcaccaagggggatgcagtgcgagatgtggacatcatcgaccaccatgacaacacctacacagtcaagtacacgcctgtccagcagggtccagtaggcgtcaatgtcacttatggaggggatcccatccctaagagccctttctcagtggcagtatctccaagcctggacctcagcaagatcaaggtgtctggcctgggagagaaggtggacgttggcaaagaccaggagttcacagtcaaatcaaagggtgctggtggtcaaggcaaagtggcatccaagattgtgggcccctcgggtgcagcggtgccctgcaaggtggagccaggcctgggggctgacaacagtgtggtgcgcttcctgccccgtgaggaagggccctatgaggtggaggtgacctatgacggcgtgcccgtgcctggcagcccctttcctctggaagctgtggcccccaccaagcctagcaaggtgaaggcgtttgggccggggctgcagggaggcagtgcgggctcccccgcccgcttcaccatcgacaccaagggcgccggcacaggtggcctgggcctgacggtggagggcccctgtgaggcgcagctcgagtgcttggacaatggggatggcacatgttccgtgtcctacgtgcccaccgagcccggggactacaacatcaacatcctcttcgctgacacccacatccctggctccccattcaaggcccacgtggttccctgctttgacgcatccaaagtcaagtgctcaggccccgggctggagcgggccaccgctggggaggtgggccaattccaagtggactgctcgagcgcgggcagcgcggagctgaccattgagatctgctcggaggcggggcttccggccgaggtgtacatccaggaccacggtgatggcacgcacaccattacctacattcccctctgccccggggcctacaccgtcaccatcaagtacggcggccagcccgtgcccaacttccccagcaagctgcaggtggaacctgcggtggacacttccggtgtccagtgctatgggcctggtattgagggccagggtgtcttccgtgaggccaccactgagttcagtgtggacgcccgggctctgacacagaccggagggccgcacgtcaaggcccgtgtggccaacccctcaggcaacctgacggagacctacgttcaggaccgtggcgatggcatgtacaaagtggagtacacgccttacgaggagggactgcactccgtggacgtgacctatgacggcagtcccgtgcccagcagccccttccaggtgcccgtgaccgagggctgcgacccctcccgggtgcgtgtccacgggccaggcatccaaagtggcaccaccaacaagcccaacaagttcactgtggagaccaggggagctggcacgggcggcctgggcctggctgtagagggcccctccgaggccaagatgtcctgcatggataacaaggacggcagctgctcggtcgagtacatcccttatgaggctggcacctacagcctcaacgtcacctatggtggccatcaagtgccaggcagtcctttcaaggtccctgtgcatgatgtgacagatgcgtccaaggtcaagtgctctgggcccggcctgagcccaggcatggttcgtgccaacctccctcagtccttccaggtggacacaagcaaggctggtgtggccccattgcaggtcaaagtgcaagggcccaaaggcctggtggagccagtggacgtggtagacaacgctgatggcacccagaccgtcaattatgtgcccagccgagaagggccctacagcatctcagtactgtatggagatgaagaggtaccccggagccccttcaaggtcaaggtgctgcctactcatgatgccagcaaggtgaaggccagtggccccgggctcaacaccactggcgtgcctgccagcctgcccgtggagttcaccatcgatgcaaaggacgccggggagggcctgctggctgtccagatcacggatcccgaaggcaagccgaagaagacacacatccaagacaaccatgacggcacgtatacagtggcctacgtgccagacgtgacaggtcgctacaccatcctcatcaagtacggtggtgacgagatccccttctccccgtaccgcgtgcgtgccgtgcccaccggggacgccagcaagtgcactgtcacagtgtcaatcggaggtcacgggctaggtgctggcatcggccccaccattcagattggggaggagacggtgatcactgtggacactaaggcggcaggcaaaggcaaagtgacgtgcaccgtgtgcacgcctgatggctcagaggtggatgtggacgtggtggagaatgaggacggcactttcgacatcttctacacggccccccagccgggcaaatacgtcatctgtgtgcgctttggtggcgagcacgtgcccaacagccccttccaagtgacggctctggctggggaccagccctcggtgcagccccctctacggtctcagcagctggccccacagtacacctacgcccagggcggccagcagacttgggccccggagaggcccctggtgggtgtcaatgggctggatgtgaccagcctgaggccctttgaccttgtcatccccttcaccatcaagaagggcgagatcacaggggaggttcggatgccctcaggcaaggtggcgcagcccaccatcactgacaacaaagacggcaccgtgaccgtgcggtatgcacccagcgaggctggcctgcacgagatggacatccgctatgacaacatgcacatcccaggaagccccttgcagttctatgtggattacgtcaactgtggccatgtcactgcctatgggcctggcctcacccatggagtagtgaacaagcctgccaccttcaccgtcaacaccaaggatgcaggagaggggggcctgtctctggccattgagggcccgtccaaagcagaaatcagctgcactgacaaccaggatgggacatgcagcgtgtcctacctgcctgtgctgccgggggactacagcattctagtcaagtacaatgaacagcacgtcccaggcagccccttcactgctcgggtcacaggtgacgactccatgcgtatgtcccacctaaaggtcggctctgctgccgacatccccatcaacatctcagagacggatctcagcctgctgacggccactgtggtcccgccctcgggccgggaggagccctgtttgctgaagcggctgcgtaatggccacgtggggatttcattcgtgcccaaggagacgggggagcacctggtgcatgtgaagaaaaatggccagcacgtggccagcagccccatcccggtggtgatcagccagtcggaaattggggatgccagtcgtgttcgggtctctggtcagggccttcacgaaggccacacctttgagcctgcagagtttatcattgatacccgcgatgcaggctatggtgggctcagcctgtccattgagggccccagcaaggtggacatcaacacagaggacctggaggacgggacgtgcagggtcacctactgccccacagagccaggcaactacatcatcaacatcaagtttgccgaccagcacgtgcctggcagccccttctctgtgaaggtgacaggcgagggccgggtgaaagagagcatcacccgcaggcgtcgggctccttcagtggccaacgttggtagtcattgtgacctcagcctgaaaatccctgaaattagcatccaggatatgacagcccaggtgaccagcccatcgggcaagacccatgaggccgagatcgtggaaggggagaaccacacctactgcatccgctttgttcccgctgagatgggcacacacacagtcagcgtgaagtacaagggccagcacgtgcctgggagccccttccagttcaccgtggggcccctaggggaagggggagcccacaaggtccgagctgggggccctggcctggagagagctgaagctggagtgccagccgaattcagtatctggacccgggaagctggtgctggaggcctggccattgctgtcgagggccccagcaaggctgagatctcttttgaggaccgcaaggacggctcctgtggtgtggcttatgtggtccaggagccaggtgactacgaagtctcagtcaagttcaacgaggaacacattcccgacagccccttcgtggtgcctgtggcttctccgtctggcgacgcccgccgcctcactgtttctagccttcaggagtcagggctaaaggtcaaccagccagcctcttttgcagtcagcctgaacggggccaagggggcgatcgatgccaaggtgcacagcccctcaggagccctggaggagtgctatgtcacagaaattgaccaagataagtatgctgtgcgcttcatccctcgggagaatggcgtttacctgattgacgtcaagttcaacggcacccacatccctggaagccccttcaagatccgagttggggagcctgggcatggaggggacccaggcttggtgtctgcttacggagcaggtctggaaggcggtgtcacagggaacccagctgagttcgtcgtgaacacgagcaatgcgggagctggtgccctgtcggtgaccattgacggcccctccaaggtgaagatggattgccaggagtgccctgagggctaccgcgtcacctatacccccatggcacctggcagctacctcatctccatcaagtacggcggcccctaccacattgggggcagccccttcaaggccaaagtcacaggcccccgtctcgtcagcaaccacagcctccacgagacatcatcagtgtttgtagactctctgaccaaggccacctgtgccccccagcatggggccccgggtcctgggcctgctgacgccagcaaggtggtggccaagggcctggggctgagcaaggcctacgtaggccagaagagcagcttcacagtagactgcagcaaagcaggcaacaacatgctgctggtgggggttcatggcccaaggaccccctgcgaggagatcctggtgaagcacgtgggcagccggctctacagcgtgtcctacctgctcaaggacaagggggagtacacactggtggtcaaatggggggacgagcacatcccaggcagcccctaccgcgttgtggtgccctgagtctggggcccgtgccagccggcagcccccaagcctgccccgctacccaagcagccccgccctcttcccctcaaccccggcccaggccgccctggccgcccgcctgtcactgcagccgcccctgccctgtgccgtgctgcgctcacctgcctccccagccagccgctgacctctcggctttcacttgggcagagggagccatttggtggcgctgcttgtcttctttggttctgggaggggtgagggatgggggtcctgtacacaaccacccactagttctcttctccagccaagaggaataaagttttgcttccattct

SEQ ID NO: 1904 - DNA, 3140 bp, Homo sapiens
ggccaggaacgcacgctgcctggccgtatcgccgcccccaccgccgccgccgccgggactagaagtgagccgcccgggtcccaaacgccagccagccagtcagtgggtcccgcagtcgcccgcaaccggggcgaatcatggcggccgccaaggtggctttaaccaagagagcagatccagctgagcttagaacaatatttttgaagtatgcaagcattgagaaaaacggtgaatttttcatgtcccccaatgactttgtcactcgatacttgaacatttttggagaaagccagcctaatccaaagactgtggaacttttaagtggagtggtggatcagaccaaagatggattaatatcttttcaagaatttgttgcctttgaatctgtcctgtgtgcccctgatgctttgtttatggtagcctttcagctgtttgacaaagctggcaaaggagaagtaacttttgaggatgttaagcaagtttttggacagaccacaattcatcaacatattccatttaactgggattcagaatttgtgcaactacattttggaaaagaaagaaaaagacacctgacatatgcggaatttactcagtttttattggaaatacaactggagcacgcaaagcaagcctttgtgcaacgggacaatgctaggactgggagagtcacagccatcgacttccgagacatcatggtcaccatccgcccccatgtcttgactccttttgtagaagaatgtctagtagctgctgctggaggtaccacatcccatcaagttagtttctcctattttaatggatttaattcgctccttaacaacatggaactcattagaaagatctatagcactctggctggcaccaggaaagatgttgaagtgactaaggaggagtttgttctggcagctcagaaatttggtcaggttacacccatggaagttgacatcttgtttcagttagcagatttatatgagccaaggggacgtatgaccttagcagacattgaacggattgctcctctggaagagggaactctgccctttaacttggctgaggcccagaggcagaaggcctcaggtgattcagctcgaccagttcttctacaagttgcagagtcggcctacaggtttggtctgggttctgttgctggagctgttggagccactgctgtgtatcctatcgatcttgtaaaaactcgaatgcagaaccaacgatcaactggctcttttgtgggagaactcatgtataaaaacagctttgactgttttaagaaagtgctacgctatgaaggcttctttggactgtatagaggtctgttgccacagttattgggagttgccccagagaaggccataaaacttacagtgaacgattttgtgagggataaatttatgcacaaagatggttcggtcccacttgcagcagaaattcttgctggaggctgcgctggaggctcccaggtgattttcacaaatcctttagaaatcgtcaagatccgtttgcaagtggcaggagaaatcaccactggtcctcgagtcagtgctctgtctgtcgtgcgggacctggggttttttgggatctacaagggtgccaaagcatgctttctgcgggacattcctttctcggccatctactttccgtgctatgctcatgtgaaggcttcctttgcaaatgaagatgggcaggttagcccaggaagcctgctcttagctggtgccatagctggtatgcctgcagcatctttagtgacccctgctgatgttatcaagacgagattacaggtggctgcccgggctggccaaaccacttacagcggagtgatagactgctttagaaagatactgcgtgaagaaggaccaaaagctctgtggaagggagctggtgctcgtgtatttcgatcctcaccccagtttggtgtaactttgctgacttacgaattgctacagcgatggttctacattgattttggaggagtaaaacccatgggatcagagccagttcctaaatccaggatcaacctgcctgccccgaatcctgatcacgttgggggctacaaactggcagttgctacatttgcagggattgaaaacaaatttggactttacctacctctcttcaagccatcagtatctacctcaaaggctattggtggaggcccataggaagatcagccctgggatagtgctgtctttttgtgggtactgcagtaaagaacatccctcctgggaatgaagcaatgcttcatcccttttacgtccatctcttgtttaaattcaagtccaggcttttttatcatgtgaaatcattcattttctgggtgttttcttaaccagatcattgtgaaattattcataattattatttggccctctgcccagaaacctttgtttgcatctgaaaattgatgggatttggtcaacactaacatgatttggggaaaggagcaagtcagaatagaaattagtactcccctccttgaactaggattgtagtcccaaagaggctactgtaaggcaatcatggtgctcagagcagtgtttcgtgtgtgttttaaactggtaggaaactaggtgcatatttataaaaataaaaaacactgggagaaatgaaaaaatatatatcaaatatattcagcctggcttcaaattgtaagcatgcacaaattctgtctctggattatattatgaagcttttatgtgaaacatgtttctttgtaatgaaaaccacattggagatgtttagtaatcatattgttactggtaccaagactactagggaaatgcctttgtactttagggaagtacttttggcattttactgtacagacagaaaaaactgagatgtagcccctctcctggaagtgctaattttgaaaaactgctcatatgatgtacatgtactgattactgcctattttaataaacactcttgaaaaatgcatgttgccctgttgctgcctgccctattctcctcatctccccatcattggtacccacttgcttttaaaatccactttatcttgaataatgtaagacaaatatgttctgacataagtatttaattcatgttgccttgcataatggtcagaggcgcatgaatttgtgaaggtggaaataaactatttgtaaagtgattga

SEQ ID NO: 1905 - DNA, 1929 bp, Homo sapiens
gggtacgtggttgccggcccggtctccgcagtccccaccgagccccgaccctcctggccgccccctcgccttacctcgtcgccatgcgcctccgccgcctagcgctgttcccaggcctggcgctgctcctcgccgcggcccgcctcgctgctgcctccgatgtgctggaactcacggacgacaacttcgagagtcgcatcaccgacacgggctcttctggcctcatgctcgtcgagttcttcgccccctggtgtggacactgcaaaaagcttgccccagagtatgaagctgcagctaccagattaaaaggaatagtcccgttagcaaaggtggattgtactgccaacacgaacacctgtaataagtatggagtgagtggatatccaaccctgaagatatttagagatggtgaagaatcaggtgcctatgatgggcctaggactgccgatggaattgtcagccacctgaagaaacaggctggaccagcttcagttcctctcaagtctgaggaagaatttgaaaagttcattagcgataaagatgcttctgtggtgggttttttcaaggatttattcagtgaagctcactctgagtttctaaaagcagccagcaacttgagggataactaccggtttgcacacaccaatgttgaatctctggtgaacaaatacgatgacgatggagagggtatcaccttgtttcgtccttcccatctgacgaacaagtttgaagacaagactgtggcatatacagaacagaaaatgaccagtgggaagattaaaagatttattcaggaaaacatttttggtatctgccctcacatgacagaagacaataaagatttactacagggcaaggatttactcatcgcttactatgatgtggactatgaaaagaatgctaaaggttccaactactggagaaacagagtaatgatggtggcaaagaaattcctggatgctgggcagaaactccattttgctgtagctagccgtaaaacctttagccatgaactttcagattttggcttggaaagcactactggagagattcctgttgttgctgtcagaaccgcaaaaggagagaagtttgtcatgcaggaggagttctcgcgtgatggcaaggctcttgagagattcctggaggattactttgacggcaacctgaagagatacctgaagtctgagcctatccctgagagcaatgatgggcctgtaaaggtagtggtagcagagaattttgatgaaatagtgaataatgaaaataaagatgtgctgattgagttttatgctccttggtgtggtcactgtaagaatctggagcctaagtataaagaactgggagagaagctcagaaaagatccaaatattgtcatagccaagatggatgctacagccaacgatgtgccttctccatatgaagtcagaggttttcctaccatctacttctctccagccaacaagaagcaaaatccaaagaaatatgaaggtggccgtgaattaagtgattttattagctatctaaagcgagaggctacaaacccccctgtaattcaagaagaaaaacccaagaagaagaagaaggcacaggaggatctctaaagcagcagccaaacatcatatactttgtcaaaggacttttccaccagagatgggaaaaccaatggggaggactgggacccgtatgggaattactgcctctcagggctgagagggcagaatggttataatctgagtcctgttaaattttctctaaactgtttcttagctgcactgtttatgaaaataccagaaccagtttatgtttgtggttttgggaaaattatttgtgttgaggggaatgttgtgggggtggggggaattgagttggggggttattttctaattttttttgtacatttggaacagtgacaataaatgcgcccccttt

SEQ ID NO: 1906 - DNA, 3070 bp, Homo sapiens
ccgggtttgggggttgggacctccggctgcaggtccgcctgggccagacgcgcgagcgcaagcagcgggttagtggtcgcgcgcccgacctccgcagtcccagccgagccgcgacccttccggccgtccccaccccacctcgccgccatgcgcctccgccgcctagcgctgttcccgggtgtggcgctgcttcttgccgcggcccgcctcgccgctgcctccgacgtgctagaactcacggacgacaacttcgagagtcgcatctccgacacgggctctgcgggcctcatgctcgtcgagttcttcgccccctggtgtggacactgcaagagacttgcacctgagtatgaagctgcagctaccagattaaaaggaatagtcccattagcaaaggttgattgcactgccaacactaacacctgtaataaatatggagtcagtggatatccaaccctgaagatatttagagatggtgaagaagcaggtgcttatgatggacctaggactgctgatggaattgtcagccacttgaagaagcaggcaggaccagcttcagtgcctctcaggactgaggaagaatttaagaaattcattagtgataaagatgcctctatagtaggttttttcgatgattcattcagtgaggctcactccgagttcctaaaagcagccagcaacttgagggataactaccgatttgcacatacgaatgttgagtctctggtgaacgagtatgatgataatggagagggtatcatcttatttcgtccttcacatctcactaacaagtttgaggacaagactgtggcatatacagagcaaaaaatgaccagtggcaaaattaaaaagtttatccaggaaaacatttttggtatctgccctcacatgacagaagacaataaagatttgatacagggcaaggacttacttattgcttactatgatgtggactatgaaaagaacgctaaaggttccaactactggagaaacagggtaatgatggtggcaaagaaattcctggatgctgggcacaaactcaactttgctgtagctagccgcaaaacctttagccatgaactttctgattttggcttggagagcactgctggagagattcctgttgttgctatcagaactgctaaaggagagaagtttgtcatgcaggaggagttctcgcgtgatgggaaggctctggagaggttcctgcaggattactttgatggcaatctgaagagatacctgaagtctgaacctatcccagagagcaatgatgggcctgtgaaggtagtggtagcagagaattttgatgaaatagtgaataatgaaaataaagatgtgctgattgaattttatgccccttggtgtggtcactgtaagaacctggagcccaagtataaagaacttggcgagaagctcagcaaagacccaaatatcgtcatagccaagatggatgccacagccaatgatgtgccttctccatatgaagtcagaggttttcctaccatatacttctctccagccaacaagaagctaaatccaaagaaatatgaaggtggccgtgaattaagtgattttattagctatctacaaagagaagctacaaacccccctgtaattcaagaagaaaaacccaagaagaagaagaaggcacaggaggatctctaaagcagtagccaaacaccactttgtaaaaggactcttccatcagagatgggaaaaccattggggaggactaggacccatatgggaattattacctctcagggccgagaggacagaatggatataatctgaatcctgttaaattttctctaaactgtttcttagctgcactgtttatggaaataccaggaccagtttatgtttgtggttttgggaaaaattatttgtgttgggggaaatgttgtgggggtggggttgagttgggggtattttctaattttttttgtacatttggaacagtgacaataaatgagacccctttaaactgtcttattttccaccagattgagaaccagatgttctctacacactatcactgttcaatagagctttcttcagtgatggaaatgctctgtaatctacactgttcagtacaggtagctacggagcatctgaaatatggctagaaactacatttttgttttgattaatttaaatagccatacagttgctaccatactggtcacggcagctgtagactgactgggtccatagttcatcacctcaaaattctttcaaaatttattatctctttctctccttacatgtttatttcccaggcctaccctggtgattagaacagctgaagggcctttcttgttaggctgtccatgccctaaggatgggttcctgtttatccttgccacgcagctgagcttactgcatgtttatatctcccaaggactgttctctgctcagaaatgccctgtcaagggtgtggcatcacgcagtttcatccaagttgtttcaggaattgctgacactgctgggtgcagttctatcccctaaagcctagggtgtggccctttaacttccccttcagtagaactgggaaaggcagtaccattcctagttatgagtgaagcatccactttcttttgtaacaatgaggaacagaaaggataagactgaagagtgatcttttgtccaactaaaccatttatctccttttgtaggtaaattcaaatcctgcccagttatagttttcagtcactggagaattccaggtaggagccctactttaggtgatcctaggaactcctatgttcagaaaagaattttcttcctactatataattacagtatttagctgtcaattttaagatgaatttggtagagccttatagtaaagtatgtatcttggtcacacacaaagcttggaaaaagtaaaagatgtctaaaccataatcttgtaactcataacatctgggctggggcccggggatctaattgtttagagagccccaaaagtggctcagatgtaaagccagggttaagaaccatctgccttggaagatttaagggaaacatataaacttgtacaaaggacacagaagcagtcagtttt

SEQ ID NO: 1907 - DNA, 3070 bp, Homo sapiens; identical to SEQ ID NO: 1906

SEQ ID NO: 1908 - DNA, 1962 bp, Homo sapiens
agacgcgcgagcgcaagcagcgggttagtggtcgcgcgcccgacctccgcagtcccagccgagccgcgacccttccggccgtccccaccccacctcgccgccatgcgcctccgccgcctagcgctgttcccgggtgtggcgctgcttcttgccgcggcccgcctcgccgctgcctccgacgtgctagaactcacggacgacaacttcgagagtcgcatctccgacacgggctctgcgggcctcatgctcgtcgagttcttcgccccctggtgtggacactgcaagagacttgcacctgagtatgaagctgcagctaccagattaaaaggaatagtcccattagcaaaggttgattgcactgccaacactaacacctgtaataaatatggagtcagtggatatccaaccctgaagatatttagagatggtgaagaagcaggtgcttatgatggacctaggactgctgatggaattgtcagccacttgaagaagcaggcaggaccagcttcagtgcctctcaggactgaggaagaatttaagaaattcattagtgataaagatgcctctatagtaggttttttcgatgattcattcagtgaggctcactccgagttcctaaaagcagccagcaacttgagggataactaccgatttgcacatacgaatgttgagtctctggtgaacgagtatgatgataatggagagggtatcatcttatttcgtccttcacatctcactaacaagtttgaggacaagactgtggcatatacagagcaaaaaatgaccagtggcaaaattaaaaagtttatccaggaaaacatttttggtatctgccctcacatgacagaagacaataaagatttgatacagggcaaggacttacttattgcttactatgatgtggactatgaaaagaacgctaaaggttccaactactggagaaacagggtaatgatggtggcaaagaaattcctggatgctgggcacaaactcaactttgctgtagctagccgcaaaacctttagccatgaactttctgattttggcttggagagcactgctggagagattcctgttgttgctatcagaactgctaaaggagagaagtttgtcatgcaggaggagttctcgcgtgacgggaaggctctggagaggttcctgcaggattactttgatggcaatctgaagagatacctgaagtctgaacctatcccagagagcaatgatgggcctgtgaaggtagtggtagcagagaattttgatgaaatagtgaataatgaaaataaagatgtgctgattgaattttatgccccttggtgtggtcactgtaagaacctggagcccaagtataaagaacttggcgagaagctcagcaaagacccaaatatcgtcatagccaagatggatgccacagccaatgatgtgccttctccatatgaagtcagaggttttcctaccatatacttctctccagccaacaagaagctaaatccaaagaaatatgaaggcggccgtgaattaagtgattttattagctatctacaaagagaagctacaaacccccctgtaattcaagaagaaaaacccaagaagaagaagaaggcacaggaggatctctaaagcagtagccaaacaccactttgtaaaaggactcttccatcagagatgggaaaaccattggggaggactaggacccatatgggaattattacctctcagggccgagaggacagaatggatataatctgaatcctgttaaattttctctaaactgtttcttagctgcactgtttatggaaataccaggaccagtttatgtttgtggttttgggaaaaattatttgtgttgggggaaatgttgtgggggtggggttgagttgggggtattttctaattttttttgtacatttggaacagtgacaataagtgagacccctttaaactgtcgaaaaaaaaaaaaaa

SEQ ID NO: 1909 - DNA, 3070 bp, Homo sapiens; identical to SEQ ID NO: 1906

SEQ ID NO: 1910 - DNA, 2673 bp, Homo sapiens
cgtttcccattggtgacatcttggcgggcccggcaatggcacttcctcctctgcaccccgtgacccacgtccggctgccggtcttggatcacgaggcctccgcttcccggactccggaccccgcgcctcctcggggccgacgggccagtccctggcgtggttgagaacaaaaacatgcacctggagtttccccggagccctctgcgtggttgagcttcggtggaatttcggggctcttggctgccagccgcgcttgcctggtagcaacagaaaccagtcctgctcgcctccgtggacatttcattaccatccagaagtgtctcccactgaaggcatccgtggttgtttttaagccacaaaaaagccacacccaagatcacctgacacccaccctgacaagtgtccatgatgctgggccctgagggaggtgaaggctttgtggtcaagctccgtggcctgccctggtcctgctctgttgaggacgtgcagaacttcctctctgactgcacgattcatgatggggccgcaggtgtccatttcatctacactagagagggcaggcagagtggtgaggcttttgttgaacttggatcagaagatgatgtaaaaatggccctgaaaaaagacagggaaagcatgggacaccggtacattgaggtgttcaagtcccacagaaccgagatggattgggtgttgaagcacagtggtcccaacagtgccgacagcgccaacgatggcttcgtgcggcttcgaggactcccatttggatgcacaaaggaagaaattgttcagttcttctcagggttggaaattgtgccaaacgggatcacattgcctgtggaccccgaaggcaagattacaggggaagcgttcgtgcagtttgcctcgcaggagttagctgagaaggctctagggaaacacaaggagaggatagggcacaggtacattgaggtgtttaagagcagccaggaggaagttaggtcatactcagatccccctctgaagttcatgtccgtgcagcggccagggccctatgaccggcccgggactgccaggaggtacattggcatcgtgaagcaggcaggcctggaaaggatgaggcctggtgcctacagcacaggctacgggggctacgaggagtacagtggcctcagtgatggctacggcttcaccaccgacctgttcgggagagacctcagctactgtctctccggaatgtatgaccacagatacggcgacagtgagttcacagtgcagagcaccacaggccactgtgtccacatgaggggcctgccgtacaaagcgaccgagaacgacatttacaacttcttctctcctctcaaccctgtgagagtccatattgagattggcccagatggaagagtgacgggtgaagcagatgttgagtttgctactcatgaagaagctgtggcagctatgtccaaagacagggccaatatgcagcacagatatatagaactcttcttgaattcaacaacaggggccagcaatggggcgtatagcagccaggtgatgcaaggcatgggggtgtctgctgcccaggccacttacagtggcctggagagccagtcagtgagtggctgttacggggccggctacagtgggcagaacagcatgggtggctatgactagttttgttaggaacatttgagttacttcaatcattttcacaggcagccaacaagcaattaagagcagttataatagaggaagctgggggacccattttgcaccatgagtttgtgaaaaatctggattaaaaaattacctcttcagtgttttctcatgcaaaattttcttctagcatgtgataatgagtaaactaaaactattttcagcttttctcaattaacattttggtagtatacttcagagtgatgttatctaagtttaagtagtttaagtatgttaaatgtggatcttttacaccacatcacagtgaacacactggggagacgtgcttttttggaaaactcaaaggtgctagctccctgattcaaagaaatatttctcatgtttgttcattctagtttatattttcatttaaaatcctttaggttaagtttaagctttttaaaagttagttttgagaattgagacacaatactaatactgtaggaattggtgaggccttgacttaaaactttctttgtactgtgatttccttttgggtgtattttgctaagtgaaacttgttaaattttttgttaactaaatttttttcttaaaataaagactttttcacaatgactggcacagattactcagcaaaagatagcaaaacgggtggttgaagataattcattttaatcgtaatgtattttagtgtgaatttaaaaatttcatacatcaaatctatgatctcccttatattcttatgatgaggctaaataaaagtctaataaaaatgttaaatatgtgaatggtggaaatggtgactagcagcacacattctgggaagcatcaaatagacacacggccccagccacctgcaacttatgtgcactgttgtaaaccattcagaattttcctgctaggcccttgatgctggagtcacatctgttgatagctggagaactttagtttcaagtactacattgtgaaagcaattattttgtttctagtttttataaaatgctgatttaaactttt

SEQ ID NO: 1911 - DNA, 2673 bp, Homo sapiens; identical to SEQ ID NO: 1910

SEQ ID NO: 1912 - DNA, 2673 bp, Homo sapiens; identical to SEQ ID NO: 1910

SEQ ID NO: 1913 - DNA, 2673 bp, Homo sapiens; identical to SEQ ID NO: 1910

SEQ ID NO: 1914 - DNA, 2673 bp, Homo sapiens; identical to SEQ ID NO: 1910

SEQ ID NO: 1915 - DNA, 2233 bp, Homo sapiens
gccgcgcttgcctggtagcaacagaaaccagtcctgctcgcctccgtggacatttcattaccatccagaagtgtctcccactgaaggcatccgtggttgtttttaagccacaaaaaagccacacccaagatcacctgacacccaccctgacaagtgtccatgatgctgggccctgagggaggtgaaggctttgtggtcaagctccgtggcctgccctggtcctgctctgttgaggacgtgcagaacttcctctctgactgcacgattcatgatggggccgcaggtgtccatttcatctacactagagagggcaggcagagtggtgaggcttttgttgaacttggatcagaagatgatgtaaaaatggccctgaaaaaagacagggaaagcatgggacaccggtacattgaggtgttcaagtcccacagaaccgagatggattgggtgttgaagcacagtggtcccaacagtgccgacagcgccaacgatggcttcgtgcggcttcgaggactcccatttggatgcacaaaggaagaaattgttcagttcttctcagggttggaaattgtgccaaacgggatcacattgcctgtggaccccgaaggcaagattacaggggaagcgttcgtgcagtttgcctcgcaggagttagctgagaaggctctagggaaacacaaggagaggatagggcacaggtacattgaggtgtttaagagcagccaggaggaagttaggtcatactcagatccccctctgaagttcatgtccgtgcagcggccagggccctatgaccggcccgggactgccaggaggtacattggcatcgtgaagcaggcaggcctggaaaggatgaggcctggtgcctacagcacaggctacgggggctacgaggagtacagtggcctcagtgatggctacggcttcaccaccgacctgttcgggagagacctcagctactgtctctccggaatgtatgaccacagatacggcgacagtgagttcacagtgcagagcaccacaggccactgtgtccacatgaggggcctgccgtacaaagcgaccgagaacgacatttacaacttcttctctcctctcaaccctgtgagagtccatattgagattggcccagatggaagagtgacgggtgaagcagatgttgagtttgctactcatgaagaagctgtggcagctatgtccaaagacagggccaatatgcagcacagatatatagaactcttcttgaattcaacaacaggggccagcaatggggcgtatagcagccaggtgatgcaaggcatgggggtgtctgctgcccaggccacttacagtggcctggagagccagtcagtgagtggctgttacggggccggctacagtgggcagaacagcatgggtggctatgactagttttgttaggaacatttgagttacttcaatcattttcacaggcagccaacaagcaattaagagcagttataatagaggaagctgggggacccattttgcaccatgagtttgtgaaaaatctggattaaaaaattacctcttcagtgttttctcatgcaaaattttcttctagcatgtgataatgagtaaactaaaactattttcagcttttctcaattaacattttggtagtatacttcagagtgatgttatctaagtttaagtagtttaagtatgttaaatgtggatcttttacaccacatcacagtgaacacactggggagacgtgcttttttggaaaactcaaaggtgctagctccctgattcaaagaaatatttctcatgtttgttcattctagtttatattttcatttaaaatcctttaggttaagtttaagctttttaaaagttagttttgagaattgagacacaatactaatactgtaggaattggtgaggccttgacttaaaactttctttgtactgtgatttccttttgggtgtattttgctaagtgaaacttgttaaattttttgttaactaaatttttttcttaaaataaagactttttcacaatgactggcacagattactcagcaaaagatagcaaaacgggtggttgaagataattcattttaatcgtaatgtattttagtgtgaatttaaaaatttcatacatcaaatctatgatctcccttatattcttatgatgaggctaaataaaagtctaataaaaatgttaaatatgtgaaaaaaaaaaaaaaaaaaaaaaaaaaaaaaaaaaaaa

SEQ ID NO: 1916 - DNA, 1870 bp, Homo sapiens
gcccgggcaggagcgggcttgccctgcggagcagtagctaggaacagatccacttgcaggttgctgttcccagccatggcttcgcgctgctggcgctggtggggctggtcggcgtggcctcggacccggctgcctcccgccgggagcaccccgagcttctgccaccatttctccacacaggagaagaccccccagatctgtgtggtgggcagtggcccagctggcttctacacggcccaacacctgctaaagcacccccaggcccacgtggacatctacgagaaacagcctgtgccctttggcctggtgcgctttggtgtggcgcctgatcaccccgaggtgaagaatgtcatcaacacatttacccagacggcccattctggccgctgtgccttctggggcaacgtggaggtgggcagggacgtgacggtgccggagctgcgggaggcctaccacgctgtggtgctgagctacggggcagaggaccatcgggccctggaaattcctggtgaggagctgccaggtgtgtgctccgcccgggccttcgtgggctggtacaacgggcttcctgagaaccaggagctggagccagacctgagctgtgacacagccgtgattctggggcaggggaacgtggctctggacgtggcccgcatcctactgaccccacctgagcacctggagagaacggacatcacgaaggcagccctgggtgtactgaggcagagtcgagtgaagacagtgtggctagtgggccggcgtggacccctgcaagtggccttcaccattaaggagcttcgggagatgattcagttaccgggagcccggcccattttggatcctgtggatttcttgggtctccaggacaagatcaaggaggtcccccgcccgaggaagcggctgacggaactgctgcttcgaacggccacagagaagccagggccggcggaagctgcccgccaggcatcggcctcccgtgcctggggcctccgctttttccgaagcccccagcaggtgctgccctcaccagatgggcggcgggcagcaggtgtccgcctagcagtcactagactggagggtgtcgatgaggccacccgtgcagtgcccacgggagacatggaagacctcccttgtgggctggtgctcagcagcattgggtataagagccgccctgtcgacccaagcgtgccctttgactccaagcttggggtcatccccaatgtggagggccgggttatggatgtgccaggcctctactgcagcggctgggtgaagagaggacctacaggtgtcatagccacaaccatgactgacagcttcctcaccggccagatgctgctgcaggacctgaaggctgggttgctcccctctggccccaggcctggctacgcagccatccaggccctgctcagcagccgaggggtccggccagtctctttctcagactgggagaagctggatgccgaggaggtggcccggggccagggcacggggaagcccagggagaagctggtggatcctcaggagatgctgcgcctcctgggccactgagcccagccccagccccggcccccagcagggaagggatgagtgttgggaggggaagggctgggtccgtctgagtgggactttgcacctctgctgatcccggccggccctggcttggaggcttggctgctcttccagcgtctctcctccctcctggggaaggtcgcccttgcgcgcaaggttttagctttcagcaactgaggtaaccttagggacaggtggaggtgtgggccgatctaaccccttacccatctctctactgctggactgtggagggtcaccaggttgggaacatgctggaaataaaacagctgcaaccaag

SEQ ID NO: 1917 - DNA, 1888 bp, Homo sapiens
gcccgggcaggagcgggcttgccctgcggagcagtagctaggaacagatccacttgcaggttgctgttcccagccatggcttcgcgctgctggcgctggtggggctggtcggcgtggcctcggacccggctgcctcccgccgggagcaccccgagcttctgccaccatttctccacacaggagaagaccccccagatctgtgtggtgggcagtggcccagctggcttctacacggcccaacacctgctaaagcacccccaggcccacgtggacatctacgagaaacagcctgtgccctttggcctggtgcgctttggtgtggcgcctgatcaccccgaggtgaagaatgtcatcaacacatttacccagacggcccattctggccgctgtgccttctggggcaacgtggaggtgggcagggacgtgacggtgccggagctgcgggaggcctaccacgctgtggtgctgagctacggggcagaggaccatcgggccctggaaattcctggtgaggagctgccaggtgtgtgctccgcccgggccttcgtgggctggtacaacgggcttcctgagaaccaggagctggagccagacctgagctgtgacacagccgtgattctggggcaggggaacgtggctctggacgtggcccgcatcctactgaccccacctgagcacctggaggccctccttttgtgccagagaacggacatcacgaaggcagccctgggtgtactgaggcagagtcgagtgaagacagtgtggctagtgggccggcgtggacccctgcaagtggccttcaccattaaggagcttcgggagatgattcagttaccgggagcccggcccattttggatcctgtggatttcttgggtctccaggacaagatcaaggaggtcccccgcccgaggaagcggctgacggaactgctgcttcgaacggccacagagaagccagggccggcggaagctgcccgccaggcatcggcctcccgtgcctggggcctccgctttttccgaagcccccagcaggtgctgccctcaccagatgggcggcgggcagcaggtgtccgcctagcagtcactagactggagggtgtcgatgaggccacccgtgcagtgcccacgggagacatggaagacctcccttgtgggctggtgctcagcagcattgggtataagagccgccctgtcgacccaagcgtgccctttgactccaagcttggggtcatccccaatgtggagggccgggttatggatgtgccaggcctctactgcagcggctgggtgaagagaggacctacaggtgtcatagccacaaccatgactgacagcttcctcaccggccagatgctgctgcaggacctgaaggctgggttgctcccctctggccccaggcctggctacgcagccatccaggccctgctcagcagccgaggggtccggccagtctctttctcagactgggagaagctggatgccgaggaggtggcccggggccagggcacggggaagcccagggagaagctggtggatcctcaggagatgctgcgcctcctgggccactgagcccagccccagccccggcccccagcagggaagggatgagtgttgggaggggaagggctgggtccgtctgagtgggactttgcacctctgctgatcccggccggccctggcttggaggcttggctgctcttccagcgtctctcctccctcctggggaaggtcgcccttgcgcgcaaggttttagctttcagcaactgaggtaaccttagggacaggtggaggtgtgggccgatctaaccccttacccatctctctactgctggactgtggagggtcaccaggttgggaacatgctggaaataaaacagctgcaaccaag

SEQ ID NO: 1918 - DNA, 1817 bp, Homo sapiens
atccacttgcaggttgctgctcccagccatggcttcgcgctgctggcgctggtggggctggtcggcgtggcctcggacccggctgcctcccgccgggagcaccccgagcttctgccaccatttctccacacaggagaagaccccccagatctgtgtggtgggcagtggcccagctggcttctacacggcccaacacctgctaaagcacccccaggcccacgtggacatctacgagaaacagcctgtgccctttggcctggtgcgctttggtgtggcgcctgatcaccccgaggtgaagaatgtcatcaacacatttacccagacggcccattctggccgctgtgccttctggggcaacgtggaggtgggcagggacgtgacggtgccggagctgcaggaggcctaccacgctgtggtgctgagctacggggcagaggaccatcgggccctggaaattcctggtgaggagctgccaggtgtgtgctccgcccgggccttcgtgggctggtacaacgggcttcctgagaaccaggagctggagccagacctgagctgtgacacagccgtgattctggggcaggggaacgtggctctggacgtggcccgcatcctactgaccccacctgagcacctggagagaacggacatcacgaaggcagccctgggtgtactgaggcagagtcgagtgaagacagtgtggctagtgggccggcgtggacccctgcaagtggccttcaccattaaggagcttcgggagatgattcagttaccgggagcccggcccattttggatcctgtggatttcttgggtctccaggacaagatcaaggaggtcccccgcccgaggaagcggctgacggaactgctgcttcgaacggccacagagaagccagggccggcggaagctgcccgccaggcatcggcctcccgtgcctggggcctccgctttttccgaagcccccagcaggtgctgccctcaccagatgggcggcgggcagcaggtgtccgcctagcagtcactagactggagggtgtcgatgaggccacccgtgcagtgcccacgggagacatggaagacctcccttgtgggctggtgctcagcagcattgggtataagagccgccctgtcgacccaagcgtgccctttgactccaagcttggggtcatccccaatgtggagggccgggttatggatgtgccaggcctctactgcagcggctgggtgaagagaggacctacaggtgtcatagccacaaccatgactgacagcttcctcaccggccagatgctgctgcaggacctgaaggctgggttgctcccctctggccccaggcctggctacgcagccatccaggccctgctcagcagccgaggggtccggccagtctctttctcagactgggagaagctggatgccgaggaggtggcccggggccagggcacggggaagcccagggagaagctggtggatcctcaggagatgctgcgcctcctgggccactgagcccagccccagccccggcccccagcagggaagggatgagtgttgggaggggaagggctgggtccgtctgagtgggactttgcacctctgctgatcccggccggccctggcttggaggcttggctgctcttccagcgtctctcctccctcctggggaaggtcgcccttgcgcgcaaggttttagctttcagcaactgaggtaaccttagggacaggtggaggtgtgggccgatctaaccccttacccatctctctactgctggactgtggagggtcaccaggttgggaacatgctggaaataaaacagctgca

SEQ ID NO: 1919 - DNA, 1870 bp, Homo sapiens; identical to SEQ ID NO: 1916

SEQ ID NO: 1920 - DNA, 7302 bp, Homo sapiens
ccccgcccctggagccggcggcgcagggcgcagcttcccgccgccagagcgggccagcctgctgcgtgcgtgcgtgtgtacgactctgcgtgcgtgcgtgcgtgcgtgcgtgccgtcagctcgccgggcaccgcggcctcgccctcgccctccgcccctgcgcctgcaccgcgtagaccgacccccccccagcgcgcccacccggtagaggacccccgcccgtgccccgaccggtccccgcctttttgtaaaacttaaagcgggcgcagcattaacgcttcccgccccggtgacctctcaggggtctccccgccaaaggtgctccgccgctaaggaacatggcgaaggtggagcaggtcctgagcctcgagccgcagcacgagctcaaattccgaggtcccttcaccgatgttgtcaccaccaacctaaagcttggcaacccgacagaccgaaatgtgtgttttaaggtgaagactacagcaccacgtaggtactgtgtgaggcccaacagcggaatcatcgatgcaggggcctcaattaatgtatctgtgatgttacagcctttcgattatgatcccaatgagaaaagtaaacacaagtttatggttcagtctatgtttgctccaactgacacttcagatatggaagcagtatggaaggaggcaaaaccggaagaccttatggattcaaaacttagatgtgtgtttgaattgccagcagagaatgataaaccacatgatgtagaaataaataaaattatatccacaactgcatcaaagacagaaacaccaatagtgtctaagtctctgagttcttctttggatgacaccgaagttaagaaggttatggaagaatgtaagaggctgcaaggtgaagttcagaggctacgggaggagaacaagcagttcaaggaagaagatggactgcggatgaggaagacagtgcagagcaacagccccatttcagcattagccccaactgggaaggaagaaggccttagcacccggctcttggctctggtggttttgttctttatcgttggtgtaattattgggaagattgccttgtagaggtagcatgcacaggatggtaaattggattggtggatccaccatatcatgggatttaaatttatcataaccatgtgtaaaaagaaattaatgtatgatgacatctcacaggtcttgcctttaaattacccctccctgcacacacatacacagatacacacacacaaatataatgtaacgatcttttagaaagttaaaaatgtatagtaactgattgagggggaaaagaatgatctttattaatgacaagggaaaccatgagtaatgccacaatggcatattgtaaatgtcattttaaacattggtaggccttggtacatgatgctggattacctctcttaaaatgacacccttcctcgcctgttggtgctggcccttggggagctggagcccagcatgctggggagtgcggtcagctccacacagtagtccccacgtggcccactcccggcccaggctgctttccgtgtcttcagttctgtccaagccatcagctccttgggactgatgaacagagtcagaagcccaaaggaattgcactgtggcagcatcagacgtactcgtcataagtgagaggcgtgtgttgactgattgacccagcgctttggaaataaatggcagtgctttgttcacttaaagggaccaagctaaatttgtattggttcatgtagtgaagtcaaactgttattcagagatgtttaatgcatatttaacttatttaatgtatttcatctcatgttttcttattgtcacaagagtacagttaatgctgcgtgctgctgaactctgttgggtgaactggtattgctgctggagggctgtgggctcctctgtctctggagagtctggtcatgtggaggtggggtttattgggatgctggagaagagctgccaggaagtgttttttctgggtcagtaaataacaactgtcatagggagggaaattctcagtagtgacagtcaactctaggttaccttttttaatgaagagtagtcagtcttctagattgttcttataccacctctcaaccattactcacacttccagcgcccaggtccaagtctgagcctgacctccccttggggacctagcctggagtcaggacaaatggatcgggctgcagagggttagaagcgagggcaccagcagttgtgggtggggagcaagggaagagagaaactcttcagcgaatccttctagtactagttgagagtttgactgtgaattaattttatgccataaaagaccaacccagttctgtttgactatgtagcatcttgaaaagaaaaattataataaagccccaaaattaagaattcttttgtcattttgtcacatttgctctatggggggaattattattttatcatttttattattttgccattggaaggttaactttaaaatgagccctatcactgagaaatacgtgtttcatgatttaactctgtgtgtgtgtgtgtgtgtgtgtgtgtgtgtgtgtattttttttttggttgtcttcagctgacagtatgaaaaatgaaactgctgaaaaagctgagcacctggtcacccttggccttccattgctttggccttcagtaaaaagcagcctcccttctaggtcagggaaccatgccattgagactagtaacgggcgttctgggcacagtcccactgtgcacaggtttgagaggacaagttcatcagaaggaaggcagtccttagaagtcacatacgttgagccacgttgctcctaagcctggctctgtcaagctgggtcaggggccttgaaactggagaagtggaagtctatggttggtctgagtaagtaacttcctgtcttcatgaaaaaagttgactttgaatcccaggtactcacagaaatggtgaacagacttagttgttacccaggcacccatggattgtgttgagtgtgcagacagggaggccaccccaataggaattcgtctccaggatttttcccatgtgtcccccagtacttataaaagggagtgaaaagaccgagctgtaaggcatgtgccttctgccacctgactttccgtgaggggactaaaatttactaattgtagttgctgcagccagttaagtcctgtagcttccaggccctcatgtctttgataggagagtgcttaggtggtccccaacagtgcctaggggtacagtacagtcccattacactagagcagggctctatttatttttaaaggatatggccgtgtgttttgataaaactttattcacaaaaacagccgggtcatgggatttggcttgtgagtctgtaacagttcttaaaaagaatatctgagaaactactctgttttagacctttgaaggtgatttagagttttgtgtacatctaggagaaggtgttcagcttctcagaggatgtggacattttggttgcagctaaaaatcagtctctgaagtctctctcccttctagaggttaggacttggtgaacatgtttgtgggccttttgactgagtggcagaaggaaactgctcaggaagagaaacaggtgactgatgggaaggttgattattttctcagtcatcctggcagccaaaaatgtgccaggaaaagaaagaatgtggagcacgcgtggctcctggaggacttggagatgcatgcacatttagggtgttttccctagaattacataatgaaaaaaagaataaggcaaagaggaggtgaatatggggcctgtcacaacggcctgccctgccccaagagggttaagagtcagataatcgggacgaaactggcatggaaagagcgagcctagggaggatgccgctgggcagtgtgcatgggggagctgctgccaggctgccctccagtctgctcctgtggttactggctccacagcacctcagagagggcggccctggcttcagaaatgccagccatagtgctcacaaatgcagaagagatggaagcggtgacagaatcctgaaagtttttattgattgaagttttaaattggtaacttaagcttccttggcacgatacaaaatacctcttaaagacagcaggcttttttatttgtaggtgtgaggaactggctttaacttttttctcctcctagtttgcatgttttccttctctcgtcttctgaactgctggcaccagcagtaatacatactgataaaatcaaaattgatttttaccagtggccagtttatggctagagagacgacttatacctccataacacagaagggggaaaaatgaagaacctccagtgatccgtgaaaacctaaacgctttcaaacaaatcccaggaacagaattgctatcgaaagatatcattgcccagtttgcaggctatgttgagtcagatagaactgaatgtagtgagagctcagagctacagagcctttcagatgaatttgaaaacagactctgtgtgtgtgtgcatgtgtgcatgtgtggcatatgtgccgtatgtcagtagcttgacagttttcaaatcgtgcctatatttttttgcatacacaaatttttgtgtttgcaaactcagaatccatgccaaaatacaatgttatatgtcattttcagctccttctctaaaggaatggcccatttctcattgtagtttgagaaatacatgtatgaagagataggggtcttgggcttcccagtgtcactttgaacacctgaataacatttaactcctgagaccttctcggtgtagaggccactgcttccccctgctggagatggcatttcattgaagggcctctcgtggctttccctgcccccggctgtctggcctgaagaaggagaaagaaccaaactgaactatgaaaagttaccactctgaggagacctctcttaattaacacttggggccatgtttgctgttgttgagaaggagtgttctcaaagatgagctggaatggaattgtatttagaaaggcccctgcaaagtatatagatggatgactctagttcatgacatacaaatcccataaggccaacgaccactcttctggaacaccaagagcagctctgagatcatgctggccctacgcgaattgagtttctgtggcctaattggatttggagaacgccttccctggccccttttcctcagacagatctgctctgataggaaccttttcaagaaagttactgttgtttcaatgccactccttacctgtatagaacatttccaatacattcgctcattgaacttaatccttgcaactgtgactggggggtagatggctctgtttgcatacgaagaaataaaggctccaggaggttaaatcgggcaactttttagaactaaatcagtctctgtaaggcctacattgctaagataccatttcagctctgaaaatctgcttcagggaagtgagtggatgaggccttcctgcctcagctactctgcccgtctgtacatcttttgtgtctgcctccgtaccttattcagttattttcacactaaagtaagtagaattaagactgtagttcagatgctttttctttttctgttggaaactgaacacactacagacagtgaaaaaaggtacatattccattttctcattgcctgaagatctctgctgatgctcctggagaatgactttgggggctttagaaagaatattgccagtccgtctcggcaaggagatgatgggagcgctttatatggaggctttacatgacttgtaaattaaatgtgaatgagggcagttgattaaaattggtattacagaagggccctgctgaggtttgaaaacagctgagctgctgatgtctcaggcctttccctgaattagcactgcggttctccaggatatcagcaaagagggcaagtaatagaagcccctgataaggagcgtcagccgacaggcaagcttgggaggctgtgggaatgggtctgcccccagcttcacagacctcttcctccagcctctgaatcccattagccacagcctagaacattagctgagctgcacaagctcacccacccctgtgccagggggccctgacctccctccatgccatgtttttggctgtatctacggcacttaacaataggggctttttattttcattacagagatattttgaaaaatttaaaagacatgaactcacataaacagttatggatgatagttaaaagagaaacgggtggaggtggatgagaggttgtcttcatgaatataattacttgagatttttttttcttaatggaattagtttattagaaaatgtctgtgttaaatccgtagaaaaggaagaaaagtgtagcaacaaaaatgtagccattatctaacttgccataaatatttgcagttatgataccttggaatgttgccacgatatggattgctttgattaaaagatgtcagttgaataaaacagtactgtgggagaatcgctttctgctgctagataaatgctgatgtttatttttaaaccaggaaacattgatcctgtaacaatgcccgattacaattgctttattacaccccagggctgatggagatgtaatcacttggctaatggatgtgggtgcaggacagatgctcgcttgctggcctgctttcctgcttgcattctgatgagctgcaggagtgcgcctggccttctgcaggtggagctgctgtcagagcttcgtttcactgatacccaaagccatgtctgactgaaataaaacaggttccctttttttttccctttggaaaatgccaactaagggagactaatcagatatcttaacacaatttcatccaggcttagtgctaacaagattgcggggctttttagggtttaagaagatgagaaatgagtgtgcacgtttcacacgttgacttgccggtttttccatgtcatacaaaaaagtcctggctgtttctccgaactggctgcctgcattcccgtctttcttttgtttttaagaaatagactgaattcagctgttaatcctctagtacagtatccatgttaaaatgtttttccattgcatcttttatgtgaattcaaaggtcagaatttattgtctgtgatattgagaccatgtgtacaagaactactttttgcttttcatcattcactccttagcaaacgtttcgtaagtaccctctgtctgtttgctactatatgaggtgctgcgaaattagtgggcgtggctttttatatttttcattcgtgtgtagcctaagtaaggtgactcaagatgatacaccgagagaaaaatgcaaaatatat

SEQ ID NO: 1921 - DNA, 7302 bp, Homo sapiens; identical to SEQ ID NO: 1920

SEQ ID NO: 1922 - DNA, 3070 bp, Homo sapiens
cgcgagcgcgtggggttttccgaggctgcgggcaggggcccgccgcgcccatcccgatggctggaggcgtctgaggggcggacggaggcggcggcggcggcggcgggagcgggagcgggcggcgagtggggagcggggccgggagtggagcagccgcccgcggcccgagcgcgacgacctgccgagcggcggccgaggcggcggtgtgggcgcgtcaggccgcgacgagggctttcagacaaatttacatgtattggagaccagaccagaagcccttctgaattaagatctcacattcttgaaggtggcattgaagagcactaagatcggaagatgagtgagcttgaccagttacggcaggaggccgagcaacttaagaaccagattcgagacgccaggaaagcatgtgcagatgcaactctctctcagatcacaaacaacatcgacccagtgggaagaatccaaatgcgcacgaggaggacactgcgggggcacctggccaagatctacgccatgcactggggcacagactccaggcttctcgtcagtgcctcgcaggatggtaaacttatcatctgggacagctacaccaccaacaaggtccacgccatccctctgcgctcctcctgggtcatgacctgtgcatatgccccttctgggaactatgtggcctgcggtggcctggataacatttgctccatttacaatctgaaaactcgtgaggggaacgtgcgcgtgagtcgtgagctggcaggacacacaggttacctgtcctgctgccgattcctggatgacaatcagatcgtcaccagctctggagacaccacgtgtgccctgtgggacatcgagaccggccagcagacgaccacgtttaccggacacactggagatgtcatgagcctttctcttgctcctgacaccagactgttcgtctctggtgcttgtgatgcttcagccaaactctgggatgtgcgagaaggcatgtgccggcagaccttcactggccacgagtctgacatcaatgccatttgcttctttccaaatggcaatgcatttgccactggctcagacgacgccacctgcaggctgtttgaccttcgtgctgaccaggagctcatgacttactcccatgacaacatcatctgcgggatcacctctgtctccttctccaagagcgggcgcctcctccttgctgggtacgacgacttcaactgcaacgtctgggatgcactcaaagccgaccgggcaggtgtcttggctgggcatgacaaccgcgtcagctgcctgggcgtgactgacgatggcatggctgtggcgacagggtcctgggatagcttcctcaagatctggaactaacgccagtagcatgtggatgccatggagactggaagaccattccaacttggacgcgttaccatgagagcatatcctatccaaccgtactaacgtggacaccctacacctcccctcagaacttcaaaagggcaagatcttttttccttcacttattgctgaaaccaagagcacaattcccattgagagaaagatctctgtgctgtaaactaaaacaaattgtgcattccttccggggccatcgtctttgttttcttttttgtcttgaatgaattttaaaaggaaatatataataaaaatgttaaccagaaggtaaacttgagtgtaattgtcagacagacacacttttccaccagtgtatttgaattttagaccagtgaccctgttttgtggcattcatgcaaaacatgctgagggctttgttcatctggtcatcgtgtccaaatttcagtcatgtttgtagcaagattttggaagcattcatatttcctttttaaaatgtattcctttgtgttcaacagttaatcaaaaccagagagtctagggcagcctctctgatgttgtcaatgatgtaaattcagtccctggtttttaattttctgtctgatgtcacagatcattgttgcacacaaacgtggcatagaaaagaacatgttcagaagccatggggccaagcacatgcggggacggtctcaaatgcgtgatcagagaatccttcacctttgctgaaaattgagtttttaatctcactttgggtttccttgtgaagttggagggaagtttataatagcctaacactaccccacccccaactaggaggaacctctgttttcaagagagatgcctgtcctgtgcttggatagtcagtcaattatttgtgtatgaaacaatgtacaaatcaatgttttgaaaataatgatctcagactttctaagttaaattttaaaaattttgattgtttgccatattgggtgggtttactcttagaatcgcatgctgtagaaatgctcaaaagtgcatatgggactcagtccttaggtgttctttttcttttaagaaataacctcttacagttgtaaccattgcggctctgtccacttctcgttgctgctctgtggcacatatcggaagcagtacagcgcgcggctctacacgcttgggtagcgggataagtcactgttttctttatttctttaaaaaaaaaaaagttctgttgcaaacgactgctgttggattctgagggtggggagggagagagagggagggagagggagtgaagagcctgccctcctatatggattcttcagggccctccacatctgaggtggctcattcccatcacacacagattgtcctggtgttcatttcaaggccagtgttcagcagcagcgtttggaaagcaggttctgtgggaccccccgccccgccccccgcactccttcatagcagcagtagtggcttctccatcctgttttctgcaacattctatacaaaactgtgctgtgaccttgcggtaggcctggatctggcaaagagaatacaaatgaaaccccttctttctctttccgtccaacaactctgtagagctctctgcacccttacccctttccaccttttgtatttaattttaaagtcagtgtactgcaaggaagctggatgcaagatagatactatattaaactgtactgttatttaagatgtaataaagcagtttgac

SEQ ID NO: 1923 - DNA, 1401 bp, Homo sapiens
tctggggatctaaggatagtgaagagaaaagcatagtgactccatatctcagattccttgagttggtattgaagagcactaggaaccgaagatgagtgaacttgaccagttacggcaggaggctgagcagcttaaaaaccaaattagggatgctagaaaagcatgtgcagatgcaactctctctcagatcacaaacaacatcgacccagtaggaagaatccagatgcgcaccaggagaacgctgagggggcatttggccaaaatttatgccatgcattggggcacggattccaggcttctggtcagtgcctcacaggatggcaaactgatcatctgggatagctacaccacaaacaaggtccatgccatccctctgcgttcctcatgggtcatgacctgtgcatatgccccttctgggaactatgtggcctgtggtggcctggataacatttgctccatttacaatctgaaaactcgtgaagggaatgtacgtgtgagccgtgaactggccggacatacaggttatctgtcctgctgccgcttcctggatgacaatcagatcgtcaccagctctggggacaccacttgtgctctgtgggacatcgagaccggccagcagacaaccacgttcactggacacactggggatgttatgagcctttcactcgctcccgacaccagactgtttgtctctggtgcttgtgatgcttcagccaaactctgggatgtgcgagaagggatgtgccggcaaactttcactggccacgagtccgacatcaatgccatctgtttctttccaaatggcaatgcatttgccactggttcagatgatgccacctgcaggctgttcgaccttcgtgcagaccaggagctcatgacttactcccatgacaatatcatctgtgggatcacctcggtgtctttctccaagagcgggcgcctcctcctcgcagggtacgatgacttcaactgcaatgtgtgggatgcactcaaggccgacagagcaggtgtcttggctgggcatgacaaccgtgtcagctgcctgggggtgactgacgatgggatggccgtggcgacggggtcctgggatagcttcctcaagatctggaactaacgctgacagcaggtagacgtcgtggcgactggaagatcattccaaccttgaagcgttacagtgatagcatttccaatccacccctactaacgtggacgccctgcaccccctcagaacttcaaaagggcaagaccttttccttcacttattgctgaaatcaagagcacaattcccacgaagagaagaacctctgtgctgtaaactcaaacaaattgtgcattcctcccgggaccattgtctttgtttccttttttgtcttggatgaatttaaaaggaaaaactataat

SEQ ID NO: 1924 - DNA, 3070 bp, Homo sapiens; identical to SEQ ID NO: 1922

SEQ ID NO: 1925 - DNA, 3070 bp, Homo sapiens; identical to SEQ ID NO: 1922

SEQ ID NO: 1926 - DNA, 3070 bp, Homo sapiens; identical to SEQ ID NO: 1922

SEQ ID NO: 1927 - DNA, 8217 bp, Homo sapiens
caggtttccgagacactaaagcgttttgcagggaaggtgacaacagccagtgtaaaggaacggagagaaatcctcagtgaacttgggaagtgtgttgctggaaaagatcttccagagggagcagtgaaggggctctgcaaattgttctgcttgactctgcatcgatatagagatgcagcctcccgcagggccttgcaggcagccatccagcagttggctgaggcccagccagaagccactgctaagaaccttctacactctctgcagtcttctggtataggctccaaagcaggtgttcccagtaagagcagtggctctgccgccttgctggccttgacctggacctgcctcctggtgcgcattgtctttccatcgagagccaagcgacaaggagacatctggaacaaactggtggaagtgcagtgcctgctcttgctggaggtgctgggtggctcccacaagcacgccgtggatggtgctgtgaagaaactcacgaagctgtggaaagaggtgacaggactgcaggggctgaaccccgggctggtggaacagtacttgtcagccattctcagcctagagcccaaccagaactatgctggcatgctggggctgctggtgcagttctgcacgagtcacaaggagatggacgtgagcgccctactggacttttacatgaagaacatcctgatgagcaaagtcaagcctccgaagtacctgttggatagctgtgcccctctgctccgatacctgtcccactcagaatttaaggatctgatactgcccaccatacagaagtccttactgaggagtccagagaatgttattgaaactatttctagtctgctggcatcagtgacgcttgacctcagccagtatgccatggacatcgtgaaaggactggctggtcacctgaaatccaacagtccccgcctgatggatgaagctgtgctggcactgcggaacctggcacgccagtgcagtgactcttcggccatggaatccctgaccaagcacctatttgctatcctcggaggctcggaaggaaaactaactgttgtagcccagaagatgagcgtcctctcagggattgggagcgtcagtcatcacgtggtgtctggaccttccagtcaggtcctgaatgggatcgtggctgagctgttcatcccgttccttcagcaggaagttcatgaagggaccttggtacacgctgtctcagtcctggctctctggtgtaaccgattcactatggaagtgcccaagaagctcactgaatggttcaaaaaagctttcagccttaaaacctccacatctgcggtgaggcatgcctacctgcagtgcatgttggcctcttaccggggtgacacgctgttgcaggccctggacttactgcccttgctcatccagacagtggagaaggcagcctcccaaagcactcaggttcccaccatcactgaaggggttgccgcagccttgttgctcttaaagttgtcagtggctgactcacaggctgaggccaaactgagcagtttctggcagttgattgtggatgagaaaaagcaggttttcacttctgagaaattcctggtcatggcttcagaggatgccctgtgtactgtgttgcatctgacagagagacttttccttgaccacccgcatagactcactggcaacaaagttcagcagtaccaccgggctctggtggcggtgctcctgagccgcacctggcacgtccgcaggcaggctcagcagacagttcggaagctgctgtcctctcttgggggctttaagctggcgcacggactcttggaggagctgaagactgtcctcagttctcacaaggtgctgcccttagaggctttggtgactgatgctggagaggtgactgaggcaggcaaggcctacgtgcctccacgggtcctgcaggaggctctgtgtgtcatctccggtgtgccagggctcaagggtgatgtcaccgacactgaacaactggcccaggaaatgctgatcatctcccaccacccatccttaggtccgtggctgcggtggtcctccatgaatgccatgggctccctttccgtcctgtcgccggaccgggtcctcccacagctcatcagcaccatcactgcctccgtgcagaaccctgcactgcgcctggtgacgcgggaggagtttgccattatgcagacccctgctggggagctgtatgacaaatccatcattcagagtgcccagcaggacagcataaaaaaggccaacatgaagcgagagaacaaagcttattccttcaaagagcagatcatcgagctggagctgaaggaggagataaagaagaagaaaggcatcaaagaggaggtgcagctgaccagcaagcagaaggagatgctgcaggcccagctagacagggaggcgcaggtccggaggcggctgcaggagctggatggggagctggaggcggcgcttggactgctggacatcatcctggccaagaacccgtccggcctgacccagtacatccctgttttggtcgactcttttctgcccttgctgaagtctcccctggctgctcccaggatcaagaaccccttcttgtccttggctgcctgtgtcatgccctctaggctcaaggctttgggcactttggtgagccacgtgaccctgcgcctgctgaagccagagtgtgtcctggataagtcctggtgccaggaagagctgtcggtggctgtgaagagggcggtgatgctgctgcacacccacaccatcaccagcagggtgggcaagggggagccaggtgctgcgcccttgtccgcgccagccttctccttagtcttcccgtttctgaagatggtgctgacggagatgccccaccacagtgaggaggaggaggagtggatggcccagattcttcagatcctcactgtccaagcccagctgagggcctcccccaacaccccacccgggcgggtggacgagaatggcccggagttgctgcctcgcgtggccatgctgcgtcttctgacttgggtgatcgggacgggctcgcctcgcttacaggttctggcttcagacaccctgaccaccctgtgtgccagcagcagtggtgatgatggctgtgcctttgcagagcaggaggaggtggacgtgctgctctgtgccttgcagtccccgtgtgccagcgtgcgggaaaccgtgctccgggggctgatggaactccacatggtattgccagcacctgatactgatgagaagaatggcctgaaccttctgcggagactctgggtggtcaagtttgacaaggaggaggagatccggaagctggctgagaggctctggtcaatgatgggcctagacctgcagccagacctctgctccttgctgattgacgacgtgatctatcatgaggcggctgtaaggcaggcaggggccgaagccctctcccaagcagtggcacgttaccagcggcaggcggcggaggttatgggcaggctcatggagatttaccaggaaaagctctaccggccgcccccagtgctggatgctttgggacgagttatttcagaatctcctccagatcagtgggaagccaggtgtggcttggcgttggccctcaacaagctctcccagtatttggacagctctcaggtgaagccactctttcagttttttgtccctgatgccctcaatgaccgacacccagatgtccggaagtgcatgttggatgcagccctcgcaacgctcaacactcatgggaaggagaacgtcaactcgctgttgccagtattcgaggagttcctgaagaacgcgcccaatgatgccagctatgatgctgtgcgacagagtgtggtggtcctgatgggctctctggccaagcacctggacaagagtgaccccaaagtgaagcccattgttgccaagctcatcgctgccctctccaccccctcccagcaggtccaggagtccgtagccagctgcttgccacccctcgtgccagccatcaaggaggatgctggagggatgatccagaggcttatgcagcagctgctggagtcagacaagtacgcagagcgcaaaggggccgcctatggcctggcgggcctggtgaagggcctgggcatcctctcgctgaagcaacaggagatgatggcggcactgactgatgccatccaagataagaagaacttccgccggcgagagggagccctctttgccttcgagatgctctgcaccatgctggggaaactttttgagccgtatgtggttcacgtgctgccccatctgctcctgtgctttggggatggaaaccagtatgtgcgtgaggctgcagatgactgtgccaaggctgtgatgagcaacttgagtgctcacggggtgaagctggtgctcccctccttactggctgccctggaggaggaatcgtggcggaccaaagctgggtcagtggagcttcttggggcaatggcgtactgtgctcctaagcagctgtcatcctgtctacccaacattgtgcccaagcttacggaggtgctgaccgactcccatgtcaaagtccagaaggctggacagcaggcgctcaggcagatcggctccgttatcaggaacccggagatcctggccattgctccagtcctcctggatgccctgacggatccctccaggaagacccagaagtgcttgcagaccctgctggacaccaagtttgtccacttcattgatgccccatccctggccctcatcatgcccattgtccagagagccttccaggaccgttccacggacacgcggaagatggcagcccagattattggcaacatgtactccctgacagaccagaaggacttggctccgtacctgcccagcgtgacgcctggcctgaaagcatcgcttttggaccctgtgcctgaggtgcggaccgtatctgcaaaggcccttggggccatggtgaagggcatgggggagtcgtgctttgaggacttgctgccgtggctgatggagacactgacctatgagcagagctctgtggatcgctcaggcgctgcacaggggttggctgaggtcatggccggtttgggggtggagaagttggagaagttgatgccagaaatcgtggctacagccagcaaagtggacattgcaccccatgtccgagatggctacattatgatgtttaactacctgcccatcacctttggagacaagtttactccttatgtggggcccatcatcccctgtatcctcaaagctcttgctgatgagaatgagtttgtgcgtgacaccgccctgcgcgcgggccagcgggttatctccatgtacgctgagacagccatcgccctgctgctgccccagctagagcaaggcctctttgatgacctttggagaatcaggttcagctctgttcagctccttggggatctcctgtttcacatctcaggagtcactgggaagatgaccacagaaactgcctctgaggatgataactttggaactgcccagtccaacaaggcgatcatcactgccctgggggtagagcggcggaaccgggtgttggcagggctgtacatgggccgctcagacacccagctggtggtgcggcaggcgtccctgcatgtctggaagattgttgtctccaataccccccgcaccttgcgtgagatcctacccactctctttgggctcctgctgggtttcctggccagcacgtgtgcagataagagaacgattgcagcgagaacattgggagatcttgtgcggaagttaggggagaaaatcctccccgagatcatccccatccttgaggaaggcctgaggtctcagaagagcgatgagaggcagggtgtgtgcattggcctaagtgagatcatgaagtccaccagccgggatgccgtgctgtatttctctgaatccctcgtgcccacggcaaggaaggctttgtgtgacccactggaggaggtcagagaggcggcagccaagactttcgagcagctgcattccaccatcggccaccaggctctggaggacattctcccatttttactaaagcagctggatgacgaggaggtgtcagagtttgccttggatggtctgaagcaagtcatggctattaagagtcgtgtggtgctgccctaccttgtgcccaagctgacaacgccacctgtcaacacccgggtgctggctttcctttcgtcagtggctggtgatgccctcacccgtcatcttggcgtgatcctcccagcggtcatgctggccctgaaggaaaagcttgggaccccagatgagcagctggagatggccaattgtcaggctgtgatcctctccgtagaggatgacacagggcaccggatcatcatcgaggatctgctggaggccacccgcagccctgaggtgggcatgaggcaagctgctgccatcatcctcaacatctactgttcccgctcaaaggctgactacaccagccacctgcggagcctggtctcgggcctgatccgcctcttcaatgactccagccctgtggttctggaggagagctgggatgccctaaatgccatcactaagaagctggatgctggcaaccagttggcactcattgaagagctgcacaaggaaatccggctcatagggaacgagagcaaaggcgagcatgtgccaggattctgcctcccgaagaagggagtgacctccatccttccagtgttgcgggaaggagtcctgactggcagccctgagcagaaggaggaggcagccaaagccttaggcttggtaatccgcctgacctcggctgacgccctgaggccctccgtggtcagcatcactggccctctgatccgcatcctgggggacaggttcagctggaatgtgaaggcggctctgctcgagacactcagcctcttgttggctaaggttgggattgccctgaagcccttcctgccccagctgcagaccactttcaccaaagccctgcaggactccaaccggggggtgcgcctgaaggccgcagatgctctggggaagctcatttccatccacattaaggtggaccccctcttcacagagctgctcaatggcatccgcgccatggaggacccaggtgtcagggacaccatgctgcaggccctgaggtttgtgattcagggagcaggggccaaagtggatgccgtcatccggaaaaacatcgtctcactcctgctgagcatgctgggacacgatgaggacaacactcgcatctcctcagccgggtgcctaggggaactgtgtgcctttttgactgaagaggagcttagtgccgttctacagcagtgcttgctggcggacgtgtccggcattgactggatggttcggcacgggcggagcctggcactttccgtggctgtgaatgtggctcctggcagactttgtgccggcagatatagcagtgatgttcaggaaatgatcctgagcagtgccacggcggacaggatccccattgcggtgagcggggtccggggcatgggctttctcatgagacaccacatcgagacaggcggagggcagttgccggccaaactttccagcctgttcgttaagtgtctgcagaacccatccagcgacatcaggctggtggctgagaagatgatctggtgggcaaataaggacccactgcctcccctggacccccaggccatcaagcccatcctgaaggctcttcttgacaacaccaaggataagaacaccgtggtcagggcctacagcgaccaggcaattgtcaacctcctcaagatgcggcagggtgaagaggtgtttcagtccctctccaagatcctggatgtggccagtttggaggtgctgaacgaggttaaccgaaggtccctgaagaagctggccagccaggccgactccacggagcaggtggacgacaccatcctgacatgagaggcctgggccagcagcagcattgccgctccacatctttgctcaatgttttcatttttgaaaatacatttgttccaatggggagcttggaagatggcgttcccagaaagtattttaatatcaatagaccacagccaaagccttaaatcaaacccacacacaactgaaaattgcctcctccatctctcaccttttcctgtggagaagagaaggaaaagcacacgcatgcgcctcagcaaatggcattcccaagtctggggaggggtataggtttgaaaggctgtttgaaagaggaatgtttaataaaggctttgattt

SEQ ID NO: 1928 - DNA, 8699 bp, Homo sapiens
cagccccggcaggatggcggcggacacgcaggtttccgagacactaaagcgttttgcagggaaggtgacaacagccagtgtaaaggaacggagagaaatcctcagtgaacttgggaagtgtgttgctggaaaagatcttccagagggagcagtgaaggggctctgcaaattgttctgcttgactctgcatcgatatagagatgcagcctcccgcagggccttgcaggcagccatccagcagttggctgaggcccagccagaagccactgctaagaaccttctacactctctgcagtcttctggtataggctccaaagcaggtgttcccagtaagagcagtggctctgccgccttgctggccttgacctggacctgcctcctggtgcgcattgtctttccatcgagagccaagcgacaaggagacatctggaacaaactggtggaagtgcagtgcctgctcttgctggaggtgctgggtggctcccacaagcacgccgtggatggtgctgtgaagaaactcacgaagctgtggaaagagaaccccgggctggtggaacagtacttgtcagccattctcagcctagagcccaaccagaactatgctggcatgctggggctgctggtgcagttctgcacgagtcacaaggagatggacgtggtcagtcagcacaagagcgccctactggacttttacatgaagaacatcctgatgagcaaagtcaagcctccgaagtacctgttggatagctgtgcccctctgctccgatacctgtcccactcagaatttaaggatctgatactgcccaccatacagaagtccttactgaggagtccagagaatgttattgaaactatttctagtctgctggcatcagtgacgcttgacctcagccagtatgccatggacatcgtgaaaggactggctggtcacctgaaatccaacagtccccgcctgatggatgaagctgtgctggcactgcggaacctggcacgccagtgcagtgactcttcggccatggaatccctgaccaagcacctatttgctatcctcggaggctcggaaggaaaactaactgttgtagcccagaagatgagcgtcctctcagggattgggagcgtcagtcatcacgtggtgtctggaccttccagtcaggtcctgaatgggatcgtggctgagctgttcatcccgttccttcagcaggaagttcatgaagggaccttggtacacgctgtctcagtcctggctctctggtgtaaccgattcactatggaagtgcccaagaagctcactgaatggttcaaaaaagctttcagccttaaaacctccacatctgcggtgaggcatgcctacctgcagtgcatgttggcctcttaccggggtgacacgctgttgcaggccctggacttactgcccttgctcatccagacagtggagaaggcagcctcccaaagcactcaggttcccaccatcactgaaggggttgccgcagccttgttgctcttaaagttgtcagtggctgactcacaggctgaggccaaactgagcagtttctggcagttgattgtggatgagaaaaagcaggttttcacttctgagaaattcctggtcatggcttcagaggatgccctgtgtactgtgttgcatctgacagagagacttttccttgaccacccgcatagactcactggcaacaaagttcagcagtaccaccgggctctggtggcggtgctcctgagccgcacctggcacgtccgcaggcaggctcagcagacagttcggaagctgctgtcctctcttgggggctttaagctggcgcacggactcttggaggagctgaagactgtcctcagttctcacaaggtgctgcccttagaggctttggtgactgatgctggagaggtgactgaggcaggcaaggcctacgtgcctccacgggtcctgcaggaggctctgtgtgtcatctccggtgtgccagggctcaagggtgatgtcaccgacactgaacaactggcccaggaaatgctgatcatctcccaccacccatccttagttgccgtgcagtctggactttggccagcacttcttgccaggatgaagatcgatcctgaagcctttatcaccaggcacctggatcagatcattcccaggatgaccacacagagtcccctaaaccagtcctccatgaatgccatgggctccctttccgtcctgtcgccggaccgggtcctcccacagctcatcagcaccatcactgcctccgtgcagaaccctgcactgcgcctggtgacgcgggaggagtttgccattatgcagacccctgctggggagctgtatgacaaatccatcattcagagtgcccagcaggacagcataaaaaaggccaacatgaagcgagagaacaaagcttattccttcaaagagcagatcatcgagctggagctgaaggaggagataaagaagaagaaaggcatcaaagaggaggtgcagctgaccagcaagcagaaggagatgctgcaggcccagctagacagggaggcgcaggtccggaggcggctgcaggagctggatggggagctggaggcggcgcttggactgctggacatcatcctggccaagaacccgtccggcctgacccagtacatccctgttttggtcgactcttttctgcccttgctgaagtctcccctggctgctcccaggatcaagaaccccttcttgtccttggctgcctgtgtcatgccctctaggctcaaggctttgggcactttggtgagccacgtgaccctgcgcctgctgaagccagagtgtgtcctggataagtcctggtgccaggaagagctgtcggtggctgtgaagagggcggtgatgctgctgcacacccacaccatcaccagcagggtgggcaagggggagccaggtgctgcgcccttgtccgcgccagccttctccttagtcttcccgtttctgaagatggtgctgacggagatgccccaccacagtgaggaggaggaggagtggatggcccagattcttcagatcctcactgtccaagcccagctgagggcctcccccaacaccccacccgggcgggtggacgagaatggcccggagttgctgcctcgcgtggccatgctgcgtcttctgacttgggtgatcgggacgggctcgcctcgcttacaggttctggcttcagacaccctgaccaccctgtgtgccagcagcagtggtgatgatggctgtgcctttgcagagcaggaggaggtggacgtgctgctctgtgccttgcagtccccgtgtgccagcgtgcgggaaaccgtgctccgggggctgatggaactccacatggtattgccagcacctgatactgatgagaagaatggcctgaaccttctgcggagactctgggtggtcaagtttgacaaggaggaggagatccggaagctggctgagaggctctggtcaatgatgggcctagacctgcagccagacctctgctccttgctgattgacgacgtgatctatcatgaggcggctgtaaggcaggcaggggccgaagccctctcccaagcagtggcacgttaccagcggcaggcggcggaggttatgggcaggctcatggagatttaccaggaaaagctctaccggccgcccccagtgctggatgctttgggacgagttatttcagaatctcctccagatcagtgggaagccaggtgtggcttggcgttggccctcaacaagctctcccagtatttggacagctctcaggtgaagccactctttcagttttttgtccctgatgccctcaatgaccgacacccagatgtccggaagtgcatgttggatgcagccctcgcaacgctcaacactcatgggaaggagaacgtcaactcgctgttgccagtattcgaggagttcctgaagaacgcgcccaatgatgccagctatgatgctgtgcgacagagtgtggtggtcctgatgggctctctggccaagcacctggacaagagtgaccccaaagtgaagcccattgttgccaagctcatcgctgccctctccaccccctcccagcaggtccaggagtccgtagccagctgcttgccaccccttgtgccagccatcaaggaggatgctggagggatgatccagaggcttatgcagcagctgctggagtcagacaagtacgcagagcgcaaaggggccgcctatggcctggcgggcctggtgaagggcctgggcatcctctcgctgaagcaacaggagatgatggcggcactgactgatgccatccaagataagaagaacttccgccggcgagagggagccctctttgccttcgagatgctctgcaccatgctggggaaactttttgagccgtatgtggttcacgtgctgccccatctgctcctgtgctttggggatggaaaccagtatgtgcgtgaggctgcagatgactgtgccaaggctgtgatgagcaacttgagtgctcacggggtgaagctggtgctcccctccttactggctgccctggaggaggaatcgtggcggaccaaagctgggtcagtggagcttcttggggcaatggcgtactgtgctcctaagcagctgtcatcctgtctacccaacattgtgcccaagcttacggaggtgctgaccgactcccatgtcaaagtccagaaggctggacagcaggcgctcaggcagatcggctccgttatcaggaacccggagatcctggccattgctccagtcctcctggatgccctgacggatccctccaggaagacccagaagtgcttgcagaccctgctggacaccaagtttgtccacttcattgatgccccatccctggccctcatcatgcccattgtccagagagccttccaggaccgttccacggacacgcggaagatggcagcccagattattggcaacatgtactccctgacagaccagaaggacttggctccgtacctgcccagcgtgacgcctggcctgaaagcatcgcttttggaccctgtgcctgaggtgcggaccgtatctgcaaaggcccttggggccatggtgaagggcatgggggagtcgtgctttgaggacttgctgccgtggctgatggagacactgacctatgagcagagctctgtggatcgctcaggcgctgcacaggggttggctgaggtcatggccggtttgggggtggagaagttggagaagttgatgccagaaatcgtggctacagccagcaaagtggacattgcaccccatgtccgagatggctacattatgatgtttaactacctgcccatcacctttggagacaagtttactccttatgtggggcccatcatcccctgtatcctcaaagctcttgctgatgagaatgagtttgtgcgtgacaccgccctgcgcgcgggccagcgggttatctccatgtacgctgagacagccatcgccctgctgctgccccagctagagcaaggcctctttgatgacctttggagaatcaggttcagctctgttcagctccttggggatctcctgtttcacatctcaggagtcactgggaagatgaccacagaaactgcctctgaggatgataactttggaactgcccagtccaacaaggcgatcatcactgccctgggggtagagcggcggaaccgggtgttggcagggctgtacatgggccgctcagacacccagctggtggtgcggcaggcgtccctgcatgtctggaagattgttgtctccaataccccccgcaccttgcgtgagatcctacccactctctttgggctcctgctgggtttcctggccagcacgtgtgcagataagagaacgattgcagcgagaacattgggagatcttgtgcggaagttaggggagaaaatcctccccgagatcatccccatccttgaggaaggcctgaggtctcagaagagcgatgagaggcagggtgtgtgcattggcctaagtgagatcatgaagtccaccagccgggatgccgtgctgtatttctctgaatccctcgtgcccacggcaaggaaggctttgtgtgacccactggaggaggtcagagaggcggcagccaagactttcgagcagctgcattccaccatcggccaccaggctctggaggacattctcccatttttactaaagcagctggatgacgaggaggtgtcagagtttgccttggatggtctgaagcaagtcatggctattaagagtcgtgtggtgctgccctaccttgtgcccaagctgacaacgccacctgtcaacacccgggtgctggctttcctttcgtcagtggctggtgatgccctcacccgtcatcttggcgtgatcctcccagcggtcatgctggccctgaaggaaaagcttgggaccccagatgagcagctggagatggccaattgtcaggctgtgatcctctccgtagaggatgacacagggcaccggatcatcatcgaggatctgctggaggccacccgcagccctgaggtgggcatgaggcaagctgctgccatcatcctcaacatctactgttcccgctcaaaggctgactacaccagccacctgcggagcctggtctcgggcctgatccgcctcttcaatgactccagccctgtggttctggaggagagctgggatgccctaaatgccatcactaagaagctggatgctggcaaccagttggcactcattgaagagctgcacaaggaaatccggctcatagggaacgagagcaaaggcgagcatgtgccaggattctgcctcccgaagaagggagtgacctccatccttccagtgttgcgggaaggagtcctgactggcagccctgagcagaaggaggaggcagccaaagccttaggcttggtaatccgcctgacctcggctgacgccctgaggccctccgtggtcagcatcactggccctctgatccgcatcctgggggacaggttcagctggaatgtgaaggcggctctgctcgagacactcagcctcttgttggctaaggttgggattgccctgaagcccttcctgccccagctgcagaccactttcaccaaagccctgcaggactccaaccggggggtgcgcctgaaggccgcagatgctctggggaagctcatttccatccacattaaggtggaccccctcttcacagagctgctcaatggcatccgcgccatggaggacccaggtgtcagggacaccatgctgcaggccctgaggtttgtgattcagggagcaggggccaaagtggatgccgtcatccggaaaaacatcgtctcactcctgctgagcatgctgggacacgatgaggacaacactcgcatctcctcagccgggtgcctaggggaactgtgtgcctttttgactgaagaggagcttagtgccgttctacagcagtgcttgctggcggacgtgtccggcattgactggatggttcggcacgggcggagcctggcactttccgtggctgtgaatgtggctcctggcagactttgtgccggcagatatagcagtgatgttcaggaaatgatcctgagcagtgccacggcggacaggatccccattgcggtgagcggggtccggggcatgggctttctcatgagacaccacatcgagacaggcggagggcagttgccggccaaactttccagcctgttcgttaagtgtctgcagaacccatccagcgacatcaggctggtggctgagaagatgatctggtgggcaaataaggacccactgcctcccctggacccccaggccatcaagcccatcctgaaggctcttcttgacaacaccaaggataagaacaccgtggtcagggcctacagcgaccaggcaattgtcaacctcctcaagatgcggcagggtgaagaggtgtttcagtccctctccaagatcctggatgtggccagtttggaggtgctgaacgaggttaaccgaaggtccctgaagaagctggccagccaggccgactccacggagcaggtggacgacaccatcctgacatgagaggcctgggccagcagcagcattgccgctccacatctttgctcaatgttttcatttttgaaaatacatttgttccaatggggagcttggaagatggcgttcccagaaagtattttaatatcaatagaccacagccaaagccttaaatcaaacccacacacaactgaaaattgcctcctccatctctcaccttttcctgtggagaagagaaggaaaagcacacgcatgcgcctcagcaaatggcagcccaggagctgtttgtccagtttagcatggctaggtctggaactataatagcagggtcagactgtgggttcctcttctcctgtgcttgagctctggtttgagagctggcgctaccaacctttttcctatatcccgagtggggcacagacggtggatctctgcccagtgtggtgtgtctggcttggcttttcaatattgtgaggtctgaatggatctgacccctgtcagatgaaaatgattcacagctctggcagttcccaagtctggggaggggtataggtttgaaaggctgtttgaaagaggaatgtttaataaaggctttgatttaatcttgatataaacagatttttaaaaatctccacccattaaacatgaagcttcctgcatcaggaaaaaaaaaaaaaaaaaaaaaaaaaaaaaaaaa

SEQ ID NO: 1929 - DNA, 8217 bp, Homo sapiens; identical to SEQ ID NO: 1927

SEQ ID NO: 1930 - DNA, 8217 bp, Homo sapiens; identical to SEQ ID NO: 1927

SEQ ID NO: 1931 - DNA, 8325 bp, Homo sapiens
caggtttccgagacactaaagcgttttgcagggaaggtgacaacagccagtgtaaaggaacggagagaaatcctcagtgaacttgggaagtgtgttgctggaaaagatcttccagagggagcagtgaaggggctctgcaaattgttctgcttgactctgcatcgatatagagatgcagcctcccgcagggccttgcaggcagccatccagcagttggctgaggcccagccagaagccactgctaagaaccttctacactctctgcagtcttctggtataggctccaaagcaggtgttcccagtaagagcagtggctctgccgccttgctggccttgacctggacctgcctcctggtgcgcattgtctttccatcgagagccaagcgacaaggagacatctggaacaaactggtggaagtgcagtgcctgctcttgctggaggtgctgggtggctcccacaagcacgccgtggatggtgctgtgaagaaactcacgaagctgtggaaagaggtgacaggactgcaggggctgaaccccgggctggtggaacagtacttgtcagccattctcagcctagagcccaaccagaactatgctggcatgctggggctgctggtgcagttctgcacgagtcacaaggagatggacgtgagcgccctactggacttttacatgaagaacatcctgatgagcaaagtcaagcctccgaagtacctgttggatagctgtgcccctctgctccgatacctgtcccactcagaatttaaggatctgatactgcccaccatacagaagtccttactgaggagtccagagaatgttattgaaactatttctagtctgctggcatcagtgacgcttgacctcagccagtatgccatggacatcgtgaaaggactggctggtcacctgaaatccaacagtccccgcctgatggatgaagctgtgctggcactgcggaacctggcacgccagtgcagtgactcttcggccatggaatccctgaccaagcacctatttgctatcctcggaggctcggaaggaaaactaactgttgtagcccagaagatgagcgtcctctcagggattgggagcgtcagtcatcacgtggtgtctggaccttccagtcaggtcctgaatgggatcgtggctgagctgttcatcccgttccttcagcaggaagttcatgaagggaccttggtacacgctgtctcagtcctggctctctggtgtaaccgattcactatggaagtgcccaagaagctcactgaatggttcaaaaaagctttcagccttaaaacctccacatctgcggtgaggcatgcctacctgcagtgcatgttggcctcttaccggggtgacacgctgttgcaggccctggacttactgcccttgctcatccagacagtggagaaggcagcctcccaaagcactcaggttcccaccatcactgaaggggttgccgcagccttgttgctcttaaagttgtcagtggctgactcacaggctgaggccaaactgagcagtttctggcagttgattgtggatgagaaaaagcaggttttcacttctgagaaattcctggtcatggcttcagaggatgccctgtgtactgtgttgcatctgacagagagacttttccttgaccacccgcatagactcactggcaacaaagttcagcagtaccaccgggctctggtggcggtgctcctgagccgcacctggcacgtccgcaggcaggctcagcagacagttcggaagctgctgtcctctcttgggggctttaagctggcgcacggactcttggaggagctgaagactgtcctcagttctcacaaggtgctgcccttagaggctttggtgactgatgctggagaggtgactgaggcaggcaaggcctacgtgcctccacgggtcctgcaggaggctctgtgtgtcatctccggtgtgccagggctcaagggtgatgtcaccgacactgaacaactggcccaggaaatgctgatcatctcccaccacccatccttagttgccgtgcagtctggactttggccagcacttcttgccaggatgaagatcgatcctgaagcctttatcaccaggcacctggatcagatcattcccaggatgaccacacagagtcccctaaaccagtcctccatgaatgccatgggctccctttccgtcctgtcgccggaccgggtcctcccacagctcatcagcaccatcactgcctccgtgcagaaccctgcactgcgcctggtgacgcgggaggagtttgccattatgcagacccctgctggggagctgtatgacaaatccatcattcagagtgcccagcaggacagcataaaaaaggccaacatgaagcgagagaacaaagcttattccttcaaagagcagatcatcgagctggagctgaaggaggagataaagaagaagaaaggcatcaaagaggaggtgcagctgaccagcaagcagaaggagatgctgcaggcccagctagacagggaggcgcaggtccggaggcggctgcaggagctggatggggagctggaggcggcgcttggactgctggacatcatcctggccaagaacccgtccggcctgacccagtacatccctgttttggtcgactcttttctgcccttgctgaagtctcccctggctgctcccaggatcaagaaccccttcttgtccttggctgcctgtgtcatgccctctaggctcaaggctttgggcactttggtgagccacgtgaccctgcgcctgctgaagccagagtgtgtcctggataagtcctggtgccaggaagagctgtcggtggctgtgaagagggcggtgatgctgctgcacacccacaccatcaccagcagggtgggcaagggggagccaggtgctgcgcccttgtccgcgccagccttctccttagtcttcccgtttctgaagatggtgctgacggagatgccccaccacagtgaggaggaggaggagtggatggcccagattcttcagatcctcactgtccaagcccagctgagggcctcccccaacaccccacccgggcgggtggacgagaatggcccggagttgctgcctcgcgtggccatgctgcgtcttctgacttgggtgatcgggacgggctcgcctcgcttacaggttctggcttcagacaccctgaccaccctgtgtgccagcagcagtggtgatgatggctgtgcctttgcagagcaggaggaggtggacgtgctgctctgtgccttgcagtccccgtgtgccagcgtgcgggaaaccgtgctccgggggctgatggaactccacatggtattgccagcacctgatactgatgagaagaatggcctgaaccttctgcggagactctgggtggtcaagtttgacaaggaggaggagatccggaagctggctgagaggctctggtcaatgatgggcctagacctgcagccagacctctgctccttgctgattgacgacgtgatctatcatgaggcggctgtaaggcaggcaggggccgaagccctctcccaagcagtggcacgttaccagcggcaggcggcggaggttatgggcaggctcatggagatttaccaggaaaagctctaccggccgcccccagtgctggatgctttgggacgagttatttcagaatctcctccagatcagtgggaagccaggtgtggcttggcgttggccctcaacaagctctcccagtatttggacagctctcaggtgaagccactctttcagttttttgtccctgatgccctcaatgaccgacacccagatgtccggaagtgcatgttggatgcagccctcgcaacgctcaacactcatgggaaggagaacgtcaactcgctgttgccagtattcgaggagttcctgaagaacgcgcccaatgatgccagctatgatgctgtgcgacagagtgtggtggtcctgatgggctctctggccaagcacctggacaagagtgaccccaaagtgaagcccattgttgccaagctcatcgctgccctctccaccccctcccagcaggtccaggagtccgtagccagctgcttgccacccctcgtgccagccatcaaggaggatgctggagggatgatccagaggcttatgcagcagctgctggagtcagacaagtacgcagagcgcaaaggggccgcctatggcctggcgggcctggtgaagggcctgggcatcctctcgctgaagcaacaggagatgatggcggcactgactgatgccatccaagataagaagaacttccgccggcgagagggagccctctttgccttcgagatgctctgcaccatgctggggaaactttttgagccgtatgtggttcacgtgctgccccatctgctcctgtgctttggggatggaaaccagtatgtgcgtgaggctgcagatgactgtgccaaggctgtgatgagcaacttgagtgctcacggggtgaagctggtgctcccctccttactggctgccctggaggaggaatcgtggcggaccaaagctgggtcagtggagcttcttggggcaatggcgtactgtgctcctaagcagctgtcatcctgtctacccaacattgtgcccaagcttacggaggtgctgaccgactcccatgtcaaagtccagaaggctggacagcaggcgctcaggcagatcggctccgttatcaggaacccggagatcctggccattgctccagtcctcctggatgccctgacggatccctccaggaagacccagaagtgcttgcagaccctgctggacaccaagtttgtccacttcattgatgccccatccctggccctcatcatgcccattgtccagagagccttccaggaccgttccacggacacgcggaagatggcagcccagattattggcaacatgtactccctgacagaccagaaggacttggctccgtacctgcccagcgtgacgcctggcctgaaagcatcgcttttggaccctgtgcctgaggtgcggaccgtatctgcaaaggcccttggggccatggtgaagggcatgggggagtcgtgctttgaggacttgctgccgtggctgatggagacactgacctatgagcagagctctgtggatcgctcaggcgctgcacaggggttggctgaggtcatggccggtttgggggtggagaagttggagaagttgatgccagaaatcgtggctacagccagcaaagtggacattgcaccccatgtccgagatggctacattatgatgtttaactacctgcccatcacctttggagacaagtttactccttatgtggggcccatcatcccctgtatcctcaaagctcttgctgatgagaatgagtttgtgcgtgacaccgccctgcgcgcgggccagcgggttatctccatgtacgctgagacagccatcgccctgctgctgccccagctagagcaaggcctctttgatgacctttggagaatcaggttcagctctgttcagctccttggggatctcctgtttcacatctcaggagtcactgggaagatgaccacagaaactgcctctgaggatgataactttggaactgcccagtccaacaaggcgatcatcactgccctgggggtagagcggcggaaccgggtgttggcagggctgtacatgggccgctcagacacccagctggtggtgcggcaggcgtccctgcatgtctggaagattgttgtctccaataccccccgcaccttgcgtgagatcctacccactctctttgggctcctgctgggtttcctggccagcacgtgtgcagataagagaacgattgcagcgagaacattgggagatcttgtgcggaagttaggggagaaaatcctccccgagatcatccccatccttgaggaaggcctgaggtctcagaagagcgatgagaggcagggtgtgtgcattggcctaagtgagatcatgaagtccaccagccgggatgccgtgctgtatttctctgaatccctcgtgcccacggcaaggaaggctttgtgtgacccactggaggaggtcagagaggcggcagccaagactttcgagcagctgcattccaccatcggccaccaggctctggaggacattctcccatttttactaaagcagctggatgacgaggaggtgtcagagtttgccttggatggtctgaagcaagtcatggctattaagagtcgtgtggtgctgccctaccttgtgcccaagctgacaacgccacctgtcaacacccgggtgctggctttcctttcgtcagtggctggtgatgccctcacccgtcatcttggcgtgatcctcccagcggtcatgctggccctgaaggaaaagcttgggaccccagatgagcagctggagatggccaattgtcaggctgtgatcctctccgtagaggatgacacagggcaccggatcatcatcgaggatctgctggaggccacccgcagccctgaggtgggcatgaggcaagctgctgccatcatcctcaacatctactgttcccgctcaaaggctgactacaccagccacctgcggagcctggtctcgggcctgatccgcctcttcaatgactccagccctgtggttctggaggagagctgggatgccctaaatgccatcactaagaagctggatgctggcaaccagttggcactcattgaagagctgcacaaggaaatccggctcatagggaacgagagcaaaggcgagcatgtgccaggattctgcctcccgaagaagggagtgacctccatccttccagtgttgcgggaaggagtcctgactggcagccctgagcagaaggaggaggcagccaaagccttaggcttggtaatccgcctgacctcggctgacgccctgaggccctccgtggtcagcatcactggccctctgatccgcatcctgggggacaggttcagctggaatgtgaaggcggctctgctcgagacactcagcctcttgttggctaaggttgggattgccctgaagcccttcctgccccagctgcagaccactttcaccaaagccctgcaggactccaaccggggggtgcgcctgaaggccgcagatgctctggggaagctcatttccatccacattaaggtggaccccctcttcacagagctgctcaatggcatccgcgccatggaggacccaggtgtcagggacaccatgctgcaggccctgaggtttgtgattcagggagcaggggccaaagtggatgccgtcatccggaaaaacatcgtctcactcctgctgagcatgctgggacacgatgaggacaacactcgcatctcctcagccgggtgcctaggggaactgtgtgcctttttgactgaagaggagcttagtgccgttctacagcagtgcttgctggcggacgtgtccggcattgactggatggttcggcacgggcggagcctggcactttccgtggctgtgaatgtggctcctggcagactttgtgccggcagatatagcagtgatgttcaggaaatgatcctgagcagtgccacggcggacaggatccccattgcggtgagcggggtccggggcatgggctttctcatgagacaccacatcgagacaggcggagggcagttgccggccaaactttccagcctgttcgttaagtgtctgcagaacccatccagcgacatcaggctggtggctgagaagatgatctggtgggcaaataaggacccactgcctcccctggacccccaggccatcaagcccatcctgaaggctcttcttgacaacaccaaggataagaacaccgtggtcagggcctacagcgaccaggcaattgtcaacctcctcaagatgcggcagggtgaagaggtgtttcagtccctctccaagatcctggatgtggccagtttggaggtgctgaacgaggttaaccgaaggtccctgaagaagctggccagccaggccgactccacggagcaggtggacgacaccatcctgacatgagaggcctgggccagcagcagcattgccgctccacatctttgctcaatgttttcatttttgaaaatacatttgttccaatggggagcttggaagatggcgttcccagaaagtattttaatatcaatagaccacagccaaagccttaaatcaaacccacacacaactgaaaattgcctcctccatctctcaccttttcctgtggagaagagaaggaaaagcacacgcatgcgcctcagcaaatggcattcccaagtctggggaggggtataggtttgaaaggctgtttgaaagaggaatgtttaataaaggctttgattt

SEQ ID NO: 1932 - DNA, 2779 bp, Homo sapiens
gagaggtacgtagttgttatttgaggctaggttttcgaagtgggacatagcgtgttccgaacaaaccgacgtttggcatcactgattgctgtctggagcagtgcttcgcaaaagtttggcacaattaccggtgctggtccttgaagaaacaaatatggaaattgaaagcgtttaaaaccttttgaaagcaatataacaataattttatacctgttaaatgtaataaattggggcctgcattttgtatgtttcttttattccatatttctctaaggattcatttttattgttttatgaaactactagtctgtgacatggaaggtagaggaaaaagattcttgaccctagttgcttgtgaaacctgggattctacaagtgacagttgtctgtttactcttgaagttcaagtgttactttgttacatggttaatttatgtcaaaagtatcataggctaagacatcaaagttttaataacattcttttttctttaaggggtttgttaaagttgttaagaataaggcctactttaagagataccaagtgaaatttagaagacgacgaggtactagggtaaaactgattattatgctcggaaacgcttggtgatacaagataaaaataaatacaacacacccaaatacaggatgatagttcgtgtgacaaacagagatatcatttgtcagattgcttatgcccgtatagagggggatatgatagtctgcgcagcgtatgcacacgaactgccaaaatatggtgtgaaggttggcctgacaaattatgctgcagcatattgtactggcctgctgctggcccgcaggcttctcaataggtttggcatggacaagatctatgaaggccaagtggaggtgactggtgatgaatacaatgtggaaagcattgatggtcagccaggtgccttcacctgctatttggatgcaggccttgccagaactaccactggcaataaagtttttggtgccctgaagggagctgtggatggaggcttgtctatccctcacagtaccaaacgattccctggttatgattctgaaagcaaggaatttaatgcagaagtacatcggaagcacatcatgggccagaatgttgcagattacatgcgctacttaatggaagaagatgaagatgcttacaagaaacagttctctcaatacataaagaacagcgtaactccagacatgatggaggagatgtataagaaagctcatgctgctatacgagagaatccagtctatgaaaagaagcccaagaaagaagttaaaaagaagaggtggaaccgtcccaaaatgtcccttgctcagaagaaggatcgggtagctcaaaagaaggcaagcttcctcagagctcaggagcgggctgctgagagctaaacccagcaattttctatgattttttcagatatagataataaacttatgaacagcaactatttctgtgttaagctcttattcttatgaaccttataggaaataccctgaaatattttggaaaagcaaaggagttgacaggtttttttctccaagaaaacaagtgtaactaactttttaagaaaaaaagttgttatttcttgggcttctgttttacctgacaggagtcattatcccttatgttgtatgatgaacagctctccctaaaaatttggcaagcaacagaccaaccatcagtgggaaatatttcttccatccatttattataaccagatgatgaatgggaaaagtaccttaaagtaaacaaaactggtgctaatccatggcgttgaaggaaagttttgagagaaagctgtccagtgatggtcacatagatttttaacatgttccactttaggtaggcgaaacctttgagcagaaaatagtggatcttttctccaaaaggtgtttaattttatggagatgttgaaaggtacatgccaaatctgagtatacgtgtgaaaataatatgaaagaggagcaaatactaaaccttgtatatcaagtttacatggggaaaaaaacattagataaataaatacatttacatgcctctttaagaaatagccctttggcccacaggatatactgtttgaaaatggaaagttattactaaaaagtctgctataatttattttagtcttgcacttacagtcccactttcacatagttcaaaatcaggatatgtggatcttgattgggccttaagatgtcagttttgaagggctcagtcagctgcgtgatactaagatgggccctttgaatctttaggaaagttcatccatttttagtcaataaaattggtgtactgtcaagtataagatttcttgaagtaagccacttgaaccattgtgaagctacacataacttgatgtctgaatgaggttaaaaatgggtgtataagtctttaatacagtaaaccatgctattaacccaacatctgttttataaagaagcaagtttaacctgctttgcagtcttaatttctgttaatgtgcaaactttaccatgctaagacattagtaaatttataaattttcttgttgaacagcagcttcaatgcaaacacaatgcttccagcattggtattttggctaaggtaaatctacaaatcactcactgttgatgtttatggaatgaagcttttcacagcattggtttttaaagtcagtcaaaatagttacacaatgaatgtacttcggagatgtaacagggcttctaaaagggcaggaatgacatcttggggacctgttgatcctacacctgccattacttcagtaatcacatactgatg

SEQ ID NO: 1933 - DNA, 2365 bp, Homo sapiens
tgtggcccttttcccaccccctagcgccgctgggcctgcaggtctctgtcgagcagcggacgccggtctctgttccgcaggatggggtttgttaaagttgttaagaataaggcctactttaagagataccaagtgaaatttagaagacgacgagagggtaaaactgattattatgctcggaaacgcttggtgatacaagataaaaataaatacaacacacccaaatacaggatgatagttcgtgtgacaaacagagatatcatttgtcagattgcttatgcccgtatagagggggatatgatagtctgcgcagcgtatgcacacgaactgccaaaatatggtgtgaaggttggcctgacaaattatgctgcagcatattgtactggcctgctgctggcccgcaggcttctcaataggtttggcatggacaagatctatgaaggccaagtggaggtgactggtgatgaatacaatgtggaaagcattgatggtcagccaggtgccttcacctgctatttggatgcaggccttgccagaactaccactggcaataaagtttttggtgccctgaagggagctgtggatggaggcttgtctatccctcacagtaccaaacgattccctggttatgattctgaaagcaaggaatttaatgcagaagtacatcggaagcacatcatgggccagaatgttgcagattacatgcgctacttaatggaagaagatgaagatgcttacaagaaacagttctctcaatacataaagaacagcgtaactccagacatgatggaggagatgtataagaaagctcatgctgctatacgagagaatccagtctatgaaaagaagcccaagaaagaagttaaaaagaagaggtggaaccgtcccaaaatgtcccttgctcagaagaaggatcgggtagctcaaaagaaggcaagcttcctcagagctcaggagcgggctgctgagagctaaacccagcaattttctatgattttttcagatatagataataaacttatgaacagcaactatttctgtgttaagctcttattcttatgaaccttataggaaataccctgaaatattttggaaaagcaaaggagttgacaggtttttttctccaagaaaacaagtgtaactaactttttaagaaaaaaagttgttatttcttgggcttctgttttacctgacaggagtcattatcccttatgttgtatgatgaacagctctccctaaaaatttggcaagcaacagaccaaccatcagtgggaaatatttcttccatccatttattataaccagatgatgaatgggaaaagtaccttaaagtaaacaaaactggtgctaatccatggcgttgaaggaaagttttgagagaaagctgtccagtgatggtcacatagatttttaacatgttccactttaggtaggcgaaacctttgagcagaaaatagtggatcttttctccaaaaggtgtttaattttatggagatgttgaaaggtacatgccaaatctgagtatacgtgtgaaaataatatgaaagaggagcaaatactaaaccttgtatatcaagtttacatggggaaaaaaacattagataaataaatacatttacatgcctctttaagaaatagccctttggcccacaggatatactgtttgaaaatggaaagttattactaaaaagtctgctataatttattttagtcttgcacttacagtcccactttcacatagttcaaaatcaggatatgtggatcttgattgggccttaagatgtcagttttgaagggctcagtcagctgcgtgatactaagatgggccctttgaatctttaggaaagttcatccatttttagtcaataaaattggtgtactgtcaagtataagatttcttgaagtaagccacttgaaccattgtgaagctacacataacttgatgtctgaatgaggttaaaaatgggtgtataagtctttaatacagtaaaccatgctattaacccaacatctgttttataaagaagcaagtttaacctgctttgcagtcttaatttctgttaatgtgcaaactttaccatgctaagacattagtaaatttataaattttcttgttgaacagcagcttcaatgcaaacacaatgcttccagcattggtattttggctaaggtaaatctacaaatcactcactgttgatgtttatggaatgaagcttttcacagcattggtttttaaagtcagtcaaaatagttacacaatgaatgtacttcggagatgtaacagggcttctaaaagggcaggaatgacatcttggggacctgttgatcctacacctgccattacttcagtaatcacatactgatg

SEQ ID NO: 1934 - DNA, 2365 bp, Homo sapiens; identical to SEQ ID NO: 1933

SEQ ID NO: 1935 - DNA, 1024 bp, Homo sapiens
caccgctgggcctgcaggtctctgtcgagccgcggacgcgggtctctgttccgctggatggggtttgttaaagttgttaagaataaggcctactttaacagataccaagtgaaatttagaagacgacgagagggtaaaactgattactatgctcggaaacgcttggtgatacaggataaaaataaatacaacacacccaagtataggatgattgttcgtgtaactgacagagatatcatttgtcagattgcttatgcccgtatagagggggatatgatagtctgcgcggcatatgcacacgaactgccaaaatacggtgtgaaggttggcccgacaaattatgctgctgcatattgtactggcctgctgctggcccgcaggcttcttgataggtttggcatggacaagatctatgacggccaagtggaggtgactggcgataaatacaatgtggaaagtactgatggtcagccaggtgccttcacctgctgtatggatgcaggtcttgccagaactaccactggcaataaagtttttggcgccctgaagggagttgtggatggaggcttgtctgtccctcacagcaccaaatgattccctggttatgattctgaaagcaaggaatttaatgcaggagtacaccagaagcacttcatgggccagaatgttgcagattacatgcgctacttaatggaagaagatgacgatgcttacaagaaacagttctctcaatacataaagaacagcgtaactccagacatgatggaggagatgtataagaaagctcatgctgctatacgagagaatccagtctatgaaaagaagcccaagaaagaagttaaaaaggagaggtggaaccttcccaaaatgccccttgctcagaagaaggatcaggtagctcaaaagaaggcaagcttcctcagagctcaggagcgggctgctgagagctaaaccaaacaattttctatgatgatttttcagatacagacaataaacttagggccagcaaaaaaaaaaaaaaaaa

SEQ ID NO: 1936 - DNA, 1099 bp, Homo sapiens
tgggcctgcaggtctctgttgagccacggatgtgggtctctgttttgcaggatggggtttgttaaagttgttaagaataaggcctactttaagagataccaagtgaaatttagaagacgacaagagggtaaaactggttactatgctcggaaatacttggagatacaggataaaaataaatacaacacacccaaatataggatagtagttcatctaaccaacagagatatcattagtcagattgcttatgcccgtatagagggggatatgatagtctgcgcagcatacgcacacgaactgccaaaatatggtgtgaaggttggcctgacaaattatgctgcagagtattgtactggcctgctgctggcccgcaggcttctcaataggtttggcacagacaacatctatgaaggccaagtgtaggtgactggcaatgaatacaatgtggaaaacattgatggtcagccaagtgcctttacctgctatttggatgcaggccttgccagaactaccactggcaataaattttttggctccctgaagggagctgtggctggaggctcatctgtctctcatagtaccagatgattccctggttatgattctgaaagcaaggaatttaatgcagaagtacaccagaagcacatcacgggccagaatgttgcagattacctgtgctacttaatggaagaagatgaagatgcttacaagaaacagttctctcaatacacaaagaacagcgtaactccagacatgacggaggagatgtataagaaagctcatgctgcttatacatcaagtctatgaaaagaagcccaagaaagaagttaaaaagaagaggtggaactgtcccaaaatgtccattgcccagaagaaagatcagatagctcaaaagaaggcaagcttcctcagagctcaggagcgggctgctgagagctacaccaaacaattttctatgacgatttttcagataaagacaataaacttatggacagcaaaaaaaaaaaaaaagaactgaaaaacataaccaggcaacaggatttatttaacatgtatggaacactctattcaacaggaacagcatacatgtttttcaagc

SEQ ID NO: 1937 - DNA, 5880 bp, Homo sapiens
agacgccgcccaggacgcagccgccgccgccgccgctcctctgccactggctctgcgccccagcccggctctgctgcagcggcagggaggaagagccgccgcagcgcgactcgggagccccgggccacagcctggcctccggagccacccacaggcctccccgggcggcgcccacgctcctaccgcccggacgcgcggatcctccgccggcaccgcagccacctgctcccggcccagaggcgacgacacgatgcgctgcgcgctggcgctctcggcgctgctgctactgttgtcaacgccgccgctgctgccgtcgtcgccgtcgccgtcgccgtcgccctcccagaatgcaacccagactactacggactcatctaacaaaacagcaccgactccagcatccagtgtcaccatcatggctacagatacagcccagcagagcacagtccccacttccaaggccaacgaaatcttggcctcggtcaaggcgaccacccttggtgtatccagtgactcaccggggactacaaccctggctcagcaagtctcaggcccagtcaacactaccgtggctagaggaggcggctcaggcaaccctactaccaccatcgagagccccaagagcacaaaaagtgcagacaccactacagttgcaacctccacagccacagctaaacctaacaccacaagcagccagaatggagcagaagatacaacaaactctggggggaaaagcagccacagtgtgaccacagacctcacatccactaaggcagaacatctgacgacccctcaccctacaagtccacttagcccccgacaacccacttcgacgcatcctgtggccaccccaacaagctcgggacatgaccatcttatgaaaatttcaagcagttcaagcactgtggctatccctggctacaccttcacaagcccggggatgaccaccaccctaccgtcatcggttatctcgcaaagaactcaacagacctccagtcagatgccagccagctctacggccccttcctcccaggagacagtgcagcccacgagcccggcaacggcattgagaacacctaccctgccagagaccatgagctccagccccacagcagcatcaactacccaccgataccccaaaacaccttctcccactgtggctcatgagagtaactgggcaaagtgtgaggatcttgagacacagacacagagtgagaagcagctcgtcctgaacctcacaggaaacaccctctgtgcagggggcgcttcggatgagaaattgatctcactgatatgccgagcagtcaaagccaccttcaacccggcccaagataagtgcggcatacggctggcatctgttccaggaagtcagaccgtggtcgtcaaagaaatcactattcacactaagctccctgccaaggatgtgtacgagcggctgaaggacaaatgggatgaactaaaggaggcaggggtcagtgacatgaagctaggggaccaggggccaccggaggaggccgaggaccgcttcagcatgcccctcatcatcaccatcgtctgcatggcatcattcctgctcctcgtggcggccctctatggctgctgccaccagcgcctctcccagaggaaggaccagcagcggctaacagaggagctgcagacagtggagaatggttaccatgacaacccaacactggaagtgatggagacctcttctgagatgcaggagaagaaggtggtcagcctcaacggggagctgggggacagctggatcgtccctctggacaacctgaccaaggacgacctggatgaggaggaagacacacacctctagtccggtctgccggtggcctccagcagcaccacagagctccagaccaaccaccccaagtgccgtttggatggggaagggaaagactggggagggagagtgaactccgaggggtgtcccctcccaatccccccagggccttaatttttcccttttcaacctgaacaaatcacattctgtccagattcctcttgtaaaataacccactagtgcctgagctcagtgctgctggatgatgagggagatcaagaaaaagccacgtaagggactttatagatgaactagtggaatcccttcattctgcagtgagattgccgagacctgaagagggtaagtgacttgcccaaggtcagagccacttggtgacagagccaggatgagaacaaagattccatttgcaccatgccacactgctgtgttcacatgtgccttccgtccagagcagtcccgggcaggggtgaaactccagcaggtggctgggctggaaaggagggcagggctacatcctggctcggtgggatctgacgacctgaaagtccagctcccaagttttccttctcctaccccagcctcgtgtacccatcttcccaccctctatgttcttacccctccctacactcagtgtttgttcccacttactctgtcctggggcctctgggattagcacaggttattcataaccttgaaccccttgttctggattcggattttctcacatttgcttcgtgagatgggggcttaacccacacaggtctccgtgcgtgaaccaggtctgcttaggggacctgcgtgcaggtgaggagagaaggggacactcgagtccaggctggtatctcagggcagctgatgaggggtcagcaggaacactggcccattgcccctggcactccttgcagaggccacccacgatcttctttgggcttccatttccaccagggactaaaatctgctgtagctagtgagagcagcgtgttccttttgttgttcactgctcagctgatgggagtgattccctgagacccagtatgaaagagcagtggctgcaggagaggccttcccggggccccccatcagcgatgtgtcttcagagacaatccattaaagcagccaggaaggacaggctttcccctgtatatcataggaaactcagggacatttcaagttgctgagagttttgttatagttgttttctaacccagccctccactgccaaaggccaaaagctcagacagttggcagacgtccagttagctcatctcactcactctgattctcctgtgccacaggaaaagagggcctggaaagcgcagtgcatgctgggtgcatgaagggcagcctgggggacagactgttgtgggaacgtcccactgtcctggcctggagctaggccttgctgttcctcttctctgtgagcctagtggggctgctgcggttctcttgcagtttctggtggcatctcaggggaacacaaagctatgtctattccccaatataggacttttatgggctcggcagttagctgccatgtagaaggctcctaagcagtgggcatggtgaggtttcatctgattgagaagggggaatcctgtgtggaatgttgaactttcgccatggtctccatcgttctgggcgtaaattccctgggatcaagtaggaaaatgggcagaactgcttaggggaatgaaattgccatttttcgggtgaaacgccacacctccagggtcttaagagtcaggctccggctgtagtagctctgatgaaataggctatccactcgggatggcttactttttaaaagggtagggggaggggctggggaagatctgtcctgcaccatctgcctaattccttcctcacagtctgtagccatctgatatcctaggggaaaaggaaggccaggggttcacatagggccccagcgagtttcccaggagttagagggatgcgaggctaacaagttccaaaaacatctgccccgatgctctagtgtttggaggtgggcaggatggagaacagtgcctgtttgggggaaaacaggaaatcttgttaggcttgagtgaggtgtttgcttccttcttgcccagcgctgggttctctccacccagtaggttttctgttgtggtcccgtgggagaggccagactggattattcctcctttgctgatcctgggtcacacttcaccagccagggcttttgacggagacagcaaataggcctctgcaaatcaatcaaaggctgcaaccctatggcctcttggagacagatgatgactggcaaggactagagagcaggagtgcctggccaggtcggtcctgactctcctgactctccatcgctctgtccaaggagaacccggagaggctctgggctgattcagaggttactgctttatattcgtccaaactgtgttagtctaggcttaggacagcttcagaatctgacaccttgccttgctcttgccaccaggacacctatgtcaacaggccaaacagccatgcatctataaaggtcatcatcttctgccacctttactgggttctaaatgctctctgataattcagagagcattgggtctgggaagaggtaagaggaacactagaagctcagcatgacttaaacaggttgtagcaaagacagtttatcatcagctctttcagtggtaaactgtggtttccccaagctgcacaggaggccagaaaccacaagtatgatgactaggaagcctactgtcatgagagtggggagacaggcagcaaagcttatgaaggaggtacagaatattctttgcgttgtaagacagaatacgggtttaatctagtctaggcaccagatttttttcccgcttgataaggaaagctagcagaaagtttatttaaaccacttcttgagctttatcttttttgacaatatactggagaaactttgaagaacaagttcaaactgatacatatacacatatttttttgataatgtaaatacagtgaccatgttaacctaccctgcactgctttaagtgaacatactttgaaaaagcattatgttagctgagtgatggccaagttttttctctggacagtaatgtaaatgtcttactggaaatgacaagtttttgcttgatttttttttttaaacaaaaaatgaaatataacaagacaaacttatgataaagtatttgtcttgtagatcaggtgttttgttttgtttttttaattttaaaatgcaaccctgccccctccccagcaaagtcacagctccatttcagtaaaggttggagtcaatatgctctggttggcaggcaaccctgtagtcatggagaaaggtatttcaagatctagtccaatctttttctagagaaaaagataatctgaagctcacaaagatgaagtgacttcctcaaaatcacatggttcaggacagaaacaagattaaaacctggatccacagactgtgcgcctcagaaggaataatcggtaaattaagaattgctactcgaaggtgccagaatgacacaaaggacagaattcctttcccagttgttaccctagcaaggctagggagggcatgaacacaaacataagaactggtcttctacactttctctgaatcatttaggtttaagatgtaagtgaacaattctttctttctgccaagaaacaaagttttggatgagcttttatatatggaacttactccaacaggactgagggaccaaggaaacatgatgggggaggcagagagggcaagagtaaaactgtagcatagcttttgtcacggtcactagctgatccctcaggtctgctgcaaacacagcatggaggacacagatgactctttggtgttggtctttttgtctgcagtgaatgttcaacagtttgcccaggaactgggggatcatatatgtcttagtggacaggggtctgaagtacactggaatttactgagaaacttgtttgtaaaaactatagttaataattattgcattttcttacaaaaatatattttggaaaattgtatactgtcaattaaagtgtttttgtgtaaactggttcaa

SEQ ID NO: 1938 - DNA, 2027 bp, Homo sapiens
gagcgcggcacttccgctggccgctggctcgctggccgctcctggaggcggcggcgggagcgcagggggcgcgcggcccggggactcgcattccccggttccccctccaccccacgcggcctggaccatggacgccagatggtgggcagtggtggtgctggctgcgttcccctccctaggggcaggtggggagactcccgaagcccctccggagtcatggacccagctatggttcttccgatttgtggtgaatgctgctggctatgccagctttatggtacctggctacctcctggtgcagtacttcaggcggaagaactacctggagaccggtaggggcctctgctttcccctggtgaaagcttgtgtgtttggcaatgagcccaaggcctctgatgaggttcccctggcgccccgaacagaggcggcagagaccaccccgatgtggcaggccctgaagctgctcttctgtgccacagggctccaggtgtcttatctgacttggggtgtgctgcaggaaagagtgatgacccgcagctatggggccacagccacatcaccgggtgagcgctttacggactcgcagttcctggtgctaatgaaccgagtgctggcactgattgtggctggcctctcctgtgttctctgcaagcagccccggcatggggcacccatgtaccggtactcctttgccagcctgtccaatgtgcttagcagctggtgccaatacgaagctcttaagttcgtcagcttccccacccaggtgctggccaaggcctctaaggtgatccctgtcatgctgatgggaaagcttgtgtctcggcgcagctacgaacactgggagtacctgacagccaccctcatctccattggggtcagcatgtttctgctatccagcggaccagagccccgcagctccccagccaccacactctcaggcctcatcttactggcaggttatattgcttttgacagcttcacctcaaactggcaggatgccctgtttgcctataagatgtcatcggtgcagatgatgtttggggtcaatttcttctcctgcctcttcacagtgggctcactgctagaacagggggccctactggagggaacccgcttcatggggcgacacagtgagtttgctgcccatgccctgctactctccatctgctccgcatgtggccagctcttcatcttttacaccattgggcagtttggggctgccgtcttcaccatcatcatgaccctccgccaggcctttgccatccttctttcctgccttctctatggccacactgtcactgtggtgggagggctgggggtggctgtggtctttgctgccctcctgctcagagtctacgcgcggggccgtctaaagcaacggggaaagaaggctgtgcctgttgagtctcctgtgcagaaggtttgagggtggaaagggcctgaggggtgaagtgaaataggaccctcccaccatccccttctgctgtaacctctgagggagctggctgaaagggcaaaatgcaggtgttttctcagtatcacagaccagctctgcagcaggggattggggagcccaggaggcagccttcccttttgccttaagtcacccatcttccagtaagcagtttattctgagccccgggggtagacagtcctcagtgaggggttttggggagtttggggtcaagagagcataggtaggttccacagttactcttcccacaagttcccttaagtcttgccctagctgtgctctgccaccttccagactcactcccctctgcaaatacctgcatttcttaccctggtgagaaaagcacaagcggtgtaggctccaatgctgctttcccaggagggtgaagatggtgctgtgctgaggaaaggggatgcagagccctgcccagcaccaccacctcctatgctcctggatccctaggctctgttccatgagcctgttgcaggttttggtactttagaaatgtaactttttgctcttataattttattttattaaattaaattactgc

SEQ ID NO: 1939 - DNA, 5508 bp, Homo sapiens
gcagcggtgggaggactgcggggctcttgaggccagctgcagagcttgtggaggccatggggcgcgtcgtcgcggagctcgtctcctcgctgctggggttgtggctgttgctgtgcagctgcggatgccccgagggcgccgagctgcgtgctccgccagataaaatcgcgattattggagccggaattggtggcacttcagcagcctattacctgcggcagaaatttgggaaagatgtgaagatagacctgtttgaaagagaagaggtcgggggccgcctggctaccatgatggtgcaggggcaagaatacgaggcaggaggttctgtcatccatcctttaaatctgcacatgaaacgttttgtcaaagacctgggtctctctgctgttcaggcctctggtggcctactggggatatataatggagagactctggtatttgaggagagcaactggttcataattaacgtgattaaattagtttggcgctatggatttcaatccctccgtatgcacatgtgggtagaggacgtgttagacaagttcatgaggatctaccgctaccagtctcatgactatgccttcagtagtgtcgaaaaattacttcatgctctaggaggagatgacttccttggaatgcttaatcgaacacttcttgaaaccttgcaaaaggccggcttttctgagaagttcctcaatgaaatgattgctcctgttatgagggtcaattatggccaaagcacggacatcaatgcctttgtgggggcggtgtcactgtcctgttctgattctggcctttgggcagtagaaggtggcaataaacttgtttgctcagggcttctgcaggcatccaaaagcaatcttatatctggctcagtaatgtacatcgaggagaaaacaaagaccaagtacacaggaaatccaacaaagatgtatgaagtggtctaccaaattggaactgagactcgttcagacttctatgacatcgtcttggtggccactccgttgaatcgaaaaatgtcgaatattacttttctcaactttgatcctccaattgaggaattccatcaatattatcaacatatagtgacaactttagttaagggggaattgaatacatctatctttagctctagacccatagataaatttggccttaatacagttttaaccactgataattcagatttgttcattaacagtattgggattgtgccctctgtgagagaaaaggaagatcctgagccatcaacagatggaacatatgtttggaagatcttttcccaagaaactcttactaaagcacaaattttaaagctctttctgtcctatgattatgctgtgaagaagccatggcttgcatatcctcactataagcccccggagaaatgcccctctatcattctccatgatcgactttattacctcaatggcatagagtgtgcagcaagtgccatggagatgagtgccattgcagcccacaacgctgcactccttgcctatcaccgctggaacgggcacacagacatgattgatcaggatggcttatatgagaaacttaaaactgaactatgaagtgacacactcctttttcccctcctagttccaaatgactatcagtggcaaaaaagaacaaaatctgagcagagatgattttgaaccagatattttgccattatcattgtttaataaaagtaatccctgctggtcataggaaaacacacggttctaattaagtgtgaaggtatagctattgcacttatgccatctccaaaatttcttaagtattctttcactatccattaggagtttttcttaaacttgtctgataataagaatcacctggagttaggaggtggtggttgcagtgagccaatctcaccattgcacttcagcctgagcaacacgagcaaaactccgtctcaaaagtaaataaaaataatcacctggagtttgttaaaccatatggattctcaagctcctctcttgaagattctgattcagtaggtctgggagtggcgcgctggattttgatcaaaattgtagagcattttaaggtgagtacctgagggagaacttaaagacatcttagttggggagtagtccttttgaattttacagctagatataatcttcagtcagataaaatttatgggagctggtgtcttatgcctgactcttagtaatttcataccggtttgaagtacgtgtgcccatgcctaaagccttgactttcagaatgttgtcttttgattcttctgtcttgatttgattaggggtgaaatttagaagtcttagtaatgtaacttgaagatgttaaacaaaaatctcaagtaaaatgaaaagcaaatatgggctactgaattaagaaactggcattctagtattaaatcctcacttcaggagcttttaaaaatactgagacccccccataaccagagattcagattcaaagactgaggataggaccttagcattgtagctatttaaagtttctaatgtgcacccagggttgggaatcaccaatgtgggtgtgaaaatgcctacaaagggttttagtgccttagaagtcctaagaagcccaatctgtatcaaagcagatccattttgcaaggatctttcttttagaactttctcagttctcttagtaagaactttagaagtaatcttgataataagcacagacagcctaacagcagaggcaacttaaataactcctgagcagttggcactagaacagaatacttggaatgacaccaaagttaaccaagtccagcatatgtccaaagagttaagtgtttcatttactgtagcattctgggtgagaaattggttgctgaaatcttaagacagtggtctcaaccttggctgcacattggaatcacctgtagggttttaaagcatccaaatggtaattaacaggcagcaaaacttcagaactagttctgcatctactgtgcaaagatcatgattaactgtcaagacactggtagaacagaacaagcaaaagattaagagttcaaaagtaaatgcaaccaatttaacatgtagtgttattaaaaaattacaaaggcctagaccagcctgggcaacatggtgaaaccccatctctacaaaaaatttttaaaaagttggccaggcatggtaatgcgcgcctgtggtcccagctgctcgggaggctgaggtgggaggatcacttgagccttggaggtcaaggctgcagtgaatcatgatcatgccactgtactccagcctgggcaacagagaccatcttaaaaaaaaaaaatccttccattgaatagaaacttcaaagtccttcatcagatcatggcattagctactttagcaaaatagtgtaaactttggttctgagtaaaaatgacttcttccctaccacagttgtgaatgttaatatgctgataaaactgccaagatatatttgataggtaggggattaaactcatggtttgtcaaaagagtgtttttttctagttttattcttaacagatatgttgaggtattcatatttgtttccttttgtggttttaatgaagacaatttgtaaagtaatactgttatgtatatgctaaatgttggtaaatactaattaatttccatcatttgtagacttgttttgcaatgggatatatttttacttataataccaatttaggctgggcgcagtggctcacgcctgtaatcccagcactttgggaggccaaggcaaacggatcacgaggtcaggagatcaagaccatcctggccaacatggtgaaaccccatctctactgaatacacaaaaattggctggacatggtggcgcatgtctgtaatcccagctactgtaatctcagctacttgggaggctgaggcaggagaattgcctcaaccgggaggcggaggttgcagtgagccaagatcgcaccactgcactccagcctggcaacagagcgagactctgtctcagaaaaaaaaaacaaaaaccagtttaggctgggtatggtggctcaccagcactttgggaggctgaggcaggtggatctcttgaggtcgggagtttgagaccagcctggccaacatggtgaaaccctgtctttactaaaaatacaaaaattagccaggcatggtggcgtgtgccagtaatcccagctacttgggaggctgaggcgcgagaatcgcttgaaccctggagatggaggttgcagtgagcagagatcgcaccactgcactccagcctgggcaagagtgagactgtgtctcaaaaggaaaaaaaaaaaattaaaaatgttgctggtattacatcaaacctactctggataaattttccagtagggcatctgaaattgctttggcaaaagcaaaacaggttatcaatacaccaaggacatcaagtagttttaatgcaactacagtgttgagtgcttttttactgggagaaaaatcctagcagaacctgctactctgggcgcattaggtagttttatgcaactatagtattaagagttttattggaagaaaaaacactgtcagagcttactgctccagacctttttttttaatagaagagactggtaaaaatgatgcaggggctgaatgaaagccagctctgctccagtggctctctgagttgagcatgcatcagttaccttaagggcttgttaaaacatcgctaggctccaccctgtttattcaataagtttgttatgggatataagaagatgcattttattaagttccccagtgatgctgctgttctactataggaaccacacttgaagaactagttctacaattcagctgtatgttgtaaaggagtcaagtcaatgaaggagttataaagagttgctgaaaaatggagtaacagtgtatgggacttcacatcagttctccttattgattgttagtttgatccctcttgttcttttgttgtaaacattttctataattaggaaatgccatttaagagtgagagaggtatatatctatgagccattgtgtttggtgttttacaagaactttaccatactggtgtgtagtccattctgtacagtttaaaagtgattcacgatttgcaggctttttatcagatcacaaaaaaatcagtctttaagcatttgcttggtaaggtttcttaagattaggtttataatacaaccatctgtaatgtatctctcgtttgagcttgtgggccatacaattcattaactagatgaatacattgtggacagcatcctcactacccctctctactcactcacaaagaaccatgatacactggaatgtttttctctggaatcctctttctactcttgtattaaaatttttccccacttcatgattatattcaaaataaacaactacatcattacttcttgtcttttgcttctgttgtactatatttggaatgtagatgtacttgggaaagtcaggctagatcaaagttactattcttacaagttttgaaaattagtgttttagaagaaactcactcatgtttgtaacttcttta

SEQ ID NO: 1940 - DNA, 4734 bp, Homo sapiens
cctggcctcgcgggccgtgtctccggcatcatgtgtggtatatttgcttacttaaactaccatgttcctcgaacgagacgagaaattcctggagaccctaatcaaaggcctcagagactggagtacagagctcatgatggtttaggtgtgggatttgatggaggcaatgataaagattgggaagccaatgcctgcaaaatccagcttattaagaagaaaggaaaagttaaggcactggatgaagaagttcacaagcaacaagatatggatttggatatagaatttgatgtacaccttggaatagctcatacccgttgggcaacacatggagaacccagtcctgtcaatagccacccccagcgctctgataaaaataatgaatttatcgttattcacaatggaatcatcaccaactacaaagacttgaaaaagtttttggaaagcaaaggctatgacttcgaatctgaaacagacacagagacaattgccaagctcgttaagtatatgtatgacaatcgggaaagtcaagataccagctttactaccttggtggagagagttatccaacaattggaaggtgcttttgcacttgtgtttaaaagtgttcattttcccgggcaagcagttggcacaaggcgaggtagccctctgttgattggtgtacggagtgaacataaactttctactgatcacattcctatactctacagaacaggcaaagacaagaaaggaagctgcaatctctctcgtgtggacagcacaacctgccttttcccggtggaagaaaaagcagtggagtattactttgcttctgatgcaagtgctgtcatagaacacaccaatcgcgtcatctttctggaagatgatgatgttgcagcagtagtggatggacgtctttctatccatcgaattaaacgaactgcaggagatcaccccggacgagctgtgcaaacactccagatggaactccagcagatcatgaagggcaacttcagttcatttatgcagaaggaaatatttgagcagccagagtctgtcgtgaacacaatgagaggaagagtcaactttgatgactatactgtgaatttgggtggtttgaaggatcacataaaggagatccagagatgccggcgtttgattcttattgcttgtggaacaagttaccatgctggtgtagcaacacgtcaagttcttgaggagctgactgagttgcctgtgatggtggaactagcaagtgacttcctggacagaaacacaccagtctttcgagatgatgtttgctttttccttagtcaatcaggtgagacagcagatactttgatgggtcttcgttactgtaaggagagaggagctttaactgtggggatcacaaacacagttggcagttccatatcacgggagacagattgtggagttcatattaatgctggtcctgagattggtgtggccagtacaaaggcttataccagccagtttgtatcccttgtgatgtttgcccttatgatgtgtgatgatcggatctccatgcaagaaagacgcaaagagatcatgcttggattgaaacggctgcctgatttgattaaggaagtactgagcatggatgacgaaattcagaaactagcaacagaactttatcatcagaagtcagttctgataatgggacgaggctatcattatgctacttgtcttgaaggggcactgaaaatcaaagaaattacttatatgcactctgaaggcatccttctgtgctgagaggctatgatgttgatttcccacggaatcttgccaaatctgtgactgtagagtgaggaatatctatacaaaatgtacgaaactgtatgattaagcaacacaagacaccttttgtatttaaaaccttgatttaaaatatcaccccttgaagcctttttttagtaaatccttatttatatatcagttataattattccactcaatatgtgatttttgtgaagttacctcttacattttcccagtaatttgtggaggactttgaataatggaatctatattggaatctgtatcagaaagattctagctattattttctttaaagaatgctgggtgttgcatttctggaccctccacttcaatctgagaagacaatatgtttctaaaaattggtacttgtttcaccatacttcattcagaccagtgaaagagtagtgcatttaattggagtatctaaagccagtggcagtgtatgctcatacttggacagttagggaagggtttgccaagttttaagagaagatgtgatttattttgaaatttgtttctgttttgtttttaaatcaaactgtaaaacttaaaactgaaaaattttattggtaggatttatatctaagtttggttagccttagtttctcagacttgttgtctattatctgtaggtggaagaaatttaggaagcgaaatattacagtagtgcattggtgggtctcaatccttaacatatttgcacaattttatagcacaaactttaaattcaagctgctttggacaactgacaatatgattttaaatttgaagatgggatgtgtacatgttgggtatcctactactttgtgttttcatctcctaaaagtggtttttatttccttgtatctgtagtcttttattttttaaatgactgctgaatgacatattttatcttgttctttaaaatcacaacacagagctgctattaaattaatattgatatattcagtattctcttcaactttgtcacgaggaagaatttcctgtagttaattttaactttccttcattacattgttgcataaaactagtcccttagtgccagtttggaagttacttgcaattgtttggaagatttgcaggtcgctgacctcatcatttcactctaagtatatgtggtaggctaagctcagaaaaaggtatgtatgctttacactgataggcaccaaatttagtattgtatcctaagtatttttcctcttctgtattttctgtgctctacccctgaaatatatttaggaataaagaagatataaataaagtgatattggggtatgttcagcttgtaagtgtcagaaatggaagttgacaatttggattaaaatatttaaagtagaatgttattatttgatacccccaaaattgtgagtaataatttcttaatggagcttttctggccagatcttcagggctataggagagtgtgtttgtttttggtgaagtccttctttttcaaaggtttttacttttaaattgtgaagataagctatttagcacaattatttaagtaagctgttttttcctttcttttctttcttttcttgttttaacttctgggtgaggttaagattttctaatagttattgttgttgccagagaagcatagaattctgcttgtgtcttagggttagagaaagatttgttatattttgaggtaatttggaaggactttcatacatggtgactagaaacctgatctttttaagaataaaatagggtcactatttacattatatataatatatggctattatagctatattaatctactttaattgtttctaagattattttgtgtaagtcagctagcgtgtgtatagtgtcatttcttatgttttgtatattaacgttttacaaacacaatttgtgtgggtttgtagcatttcttatagtttaaagtatgattcagcattctaagttaaaactaatatgtgaagtcagtcattagtctgcataatctctgtctccctctgtgtgtgtctttctataaagcacatgtgtacacacacacacacaaatatactgaaagctagggtaagttctaaactgaatatcaaaaaccaaaatcaagaacaaagaagtgatattttccaaacaaacatggattctctgccgggtgcagtggctcagcctgtaataccagcctccactttgggagtctgaggtgggagtattgcttgagctcaagagttggagaacatgctgggattacaggcatgagtcaccgtgtcctgcccagacatatcaaatttgacaggtattgtataccctttggatctttaggaattaatttttgcctctgtcactcagctttgtatattttgaaatggagataagtatagggaggtcttggaaggaaaattgccagaattcccaaaccatgtaacactcattgagaattccagatccattatatctaaagggcaagtgaaggaaacagtattgtgaactgggtataactccttggttcttaactagtacattcttaatctgtgagacccaaaggttgataaacaataatttaagattgtacagtactctaaacgtctgcaaaggtctagatgttatcagtatcactagtttttatttctgccagtagctcccttttaggttacattgttgtcctctttccagtgtcgcatctgtcattggtttttcactatggcaagttcattaaaaagcttgctccattgttatcttcaagtaatgcccataaggagatggaagatatctgagacaattaaggctttagcttctaggcaagagaaataacgttgcattaaatttcaagtttctttctgctagacttgaatgtgtctagccactctaatttatgggggcttttggttttttcctattgtactttgtatgtagaattgttttgaaatatcaagcatatttactttgaatttgaactctttcttaattttgtatttatcctttgaataaaatgta

SEQ ID NO: 1941 - DNA, 5903 bp, Homo sapiens
agacgccgcccaggacgcagccgccgccgccgccgctcctctgccactggctctgcgccccagcccggctctgctgcagcggcagggaggaagagccgccgcagcgcgactcgggagccccgggccacagcctggcctccggagccacccacaggcctccccgggcggcgcccacgctcctaccgcccggacgcgcggatcctccgccggcaccgcagccacctgctcccggcccagaggcgacgacacgatgcgctgcgcgctggcgctctcggcgctgctgctactgttgtcaacgccgccgctgctgccgtcgtcgccgtcgccgtcgccgtcgccctcccagaatgcaacccagactactacggactcatctaacaaaacagcaccgactccagcatccagtgtcaccatcatggctacagatacagcccagcagagcacagtccccacttccaaggccaacgaaatcttggcctcggtcaaggcgaccacccttggtgtatccagtgactcaccggggactacaaccctggctcagcaagtctcaggcccagtcaacactaccgtggctagaggaggcggctcaggcaaccctactaccaccatcgagagccccaagagcacaaaaagtgcagacaccactacagttgcaacctccacagccacagctaaacctaacaccacaagcagccagaatggagcagaagatacaacaaactctggggggaaaagcagccacagtgtgaccacagacctcacatccactaaggcagaacatctgacgacccctcaccctacaagtccacttagcccccgacaacccacttcgacgcatcctgtggccaccccaacaagctcgggacatgaccatcttatgaaaatttcaagcagttcaagcactgtggctatccctggctacaccttcacaagcccggggatgaccaccaccctaccgtcatcggttatctcgcaaagaactcaacagacctccagtcagatgccagccagctctacggccccttcctcccaggagacagtgcagcccacgagcccggcaacggcattgagaacacctaccctgccagagaccatgagctccagccccacagcagcatcaactacccaccgataccccaaaacaccttctcccactgtggctcatgagagtaactgggcaaagtgtgaggatcttgagacacagacacagagtgagaagcagctcgtcctgaacctcacaggaaacaccctctgtgcagggggcgcttcggatgagaaattgatctcactgatatgccgagcagtcaaagccaccttcaacccggcccaagataagtgcggcatacggctggcatctgttccaggaagtcagaccgtggtcgtcaaagaaatcactattcacactaagctccctgccaaggatgtgtacgagcggctgaaggacaaatgggatgaactaaaggaggcaggggtcagtgacatgaagctaggggaccaggggccaccggaggaggccgaggaccgcttcagcatgcccctcatcatcaccatcgtctgcatggcatcattcctgctcctcgtggcggccctctatggctgctgccaccagcgcctctcccagaggaaggaccagcagcggctaacagaggagctgcagacagtggagaatggttaccatgacaacccaacactggaagtgatggagacctcttctgagatgcaggagaagaaggtggtcagcctcaacggggagctgggggacagctggatcgtccctctggacaacctgaccaaggacgacctggatgaggaggaagacacacacctctagtccggtctgccggtggcctccagcagcaccacagagctccagaccaaccaccccaagtgccgtttggatggggaagggaaagactggggagggagagtgaactccgaggggtgtcccctcccaatccccccagggccttaatttttcccttttcaacctgaacaaatcacattctgtccagattcctcttgtaaaataacccactagtgcctgagctcagtgctgctggatgatgagggagatcaagaaaaagccacgtaagggactttatagatgaactagtggaatcccttcattctgcagtgagattgccgagacctgaagagggtaagtgacttgcccaaggtcagagccacttggtgacagagccaggatgagaacaaagattccatttgcaccatgccacactgctgtgttcacatgtgccttccgtccagagcagtcccgggcaggggtgaaactccagcaggtggctgggctggaaaggagggcagggctacatcctggctcggtgggatctgacgacctgaaagtccagctcccaagttttccttctcctaccccagcctcgtgtacccatcttcccaccctctatgttcttacccctccctacactcagtgtttgttcccacttactctgtcctggggcctctgggattagcacaggttattcataaccttgaaccccttgttctggattcggattttctcacatttgcttcgtgagatgggggcttaacccacacaggtctccgtgcgtgaaccaggtctgcttaggggacctgcgtgcaggtgaggagagaaggggacactcgagtccaggctggtatctcagggcagctgatgaggggtcagcaggaacactggcccattgcccctggcactccttgcagaggccacccacgatcttctttgggcttccatttccaccagggactaaaatctgctgtagctagtgagagcagcgtgttccttttgttgttcactgctcagctgatgggagtgattccctgagacccagtatgaaagagcagtggctgcaggagaggccttcccggggccccccatcagcgatgtgtcttcagagacaatccattaaagcagccaggaaggacaggctttcccctgtatatcataggaaactcagggacatttcaagttgctgagagttttgttatagttgttttctaacccagccctccactgccaaaggccaaaagctcagacagttggcagacgtccagttagctcatctcactcactctgattctcctgtgccacaggaaaagagggcctggaaagcgcagtgcatgctgggtgcatgaagggcagcctgggggacagactgttgtgggaacgtcccactgtcctggcctggagctaggccttgctgttcctcttctctgtgagcctagtggggctgctgcggttctcttgcagtttctggtggcatctcaggggaacacaaagctatgtctattccccaatataggacttttatgggctcggcagttagctgccatgtagaaggctcctaagcagtgggcatggtgaggtttcatctgattgagaagggggaatcctgtgtggaatgttgaactttcgccatggtctccatcgttctgggcgtaaattccctgggatcaagtaggaaaatgggcagaactgcttaggggaatgaaattgccatttttcgggtgaaacgccacacctccagggtcttaagagtcaggctccggctgtagtagctctgatgaaataggctatccactcgggatggcttactttttaaaagggtagggggaggggctggggaagatctgtcctgcaccatctgcctaattccttcctcacagtctgtagccatctgatatcctaggggaaaaggaaggccaggggttcacatagggccccagcgagtttcccaggagttagagggatgcgaggctaacaagttccaaaaacatctgccccgatgctctagtgtttggaggtgggcaggatggagaacagtgcctgtttgggggaaaacaggaaatcttgttaggcttgagtgaggtgtttgcttccttcttgcccagcgctgggttctctccacccagtaggttttctgttgtggtcccgtgggagaggccagactggattattcctcctttgctgatcctgggtcacacttcaccagccagggcttttgacggagacagcaaataggcctctgcaaatcaatcaaaggctgcaaccctatggcctcttggagacagatgatgactggcaaggactagagagcaggagtgcctggccaggtcggtcctgactctcctgactctccatcgctctgtccaaggagaacccggagaggctctgggctgattcagaggttactgctttatattcgtccaaactgtgttagtctaggcttaggacagcttcagaatctgacaccttgccttgctcttgccaccaggacacctatgtcaacaggccaaacagccatgcatctataaaggtcatcatcttctgccacctttactgggttctaaatgctctctgataattcagagagcattgggtctgggaagaggtaagaggaacactagaagctcagcatgacttaaacaggttgtagcaaagacagtttatcatcagctctttcagtggtaaactgtggtttccccaagctgcacaggaggccagaaaccacaagtatgatgactaggaagcctactgtcatgagagtggggagacaggcagcaaagcttatgaaggaggtacagaatattctttgcgttgtaagacagaatacgggtttaatctagtctaggcaccagatttttttcccgcttgataaggaaagctagcagaaagtttatttaaaccacttcttgagctttatcttttttgacaatatactggagaaactttgaagaacaagttcaaactgatacatatacacatatttttttgataatgtaaatacagtgaccatgttaacctaccctgcactgctttaagtgaacatactttgaaaaagcattatgttagctgagtgatggccaagttttttctctggacaggaatgtaaatgtcttactggaaatgacaagtttttgcttgatttttttttttaaacaaaaaatgaaatataacaagacaaacttatgataaagtatttgtcttgtagatcaggtgttttgttttgtttttttaattttaaaatgcaaccctgccccctccccagcaaagtcacagctccatttcagtaaaggttggagtcaatatgctctggttggcaggcaaccctgtagtcatggagaaaggtatttcaagatctagtccaatctttttctagagaaaaagataatctgaagctcacaaagatgaagtgacttcctcaaaatcacatggttcaggacagaaacaagattaaaacctggatccacagactgtgcgcctcagaaggaataatcggtaaattaagaattgctactcgaaggtgccagaatgacacaaaggacagaattcctttcccagttgttaccctagcaaggctagggagggcatgaacacaaacataagaactggtcttctacactttctctgaatcatttaggtttaagatgtaagtgaacaattctttctttctgccaagaaacaaagttttggatgagcttttatatatggaacttactccaacaggactgagggaccaaggaaacatgatgggggaggcagagagggcaagagtaaaactgtagcatagcttttgtcacggtcactagctgatccctcaggtctgctgcaaacacagcatggaggacacagatgactctttggtgttggtctttttgtctgcagtgaatgttcaacagtttgcccaggaactgggggatcatatatgtcttagtggacaggggtctgaagtacactggaatttactgagaaacttgtttgtaaaaactatagttaataattattgcattttcttacaaaaatatattttggaaaattgtatactgtcaattaaagtgtttttgtgtaaactggttcaaaaaaaaaaaaaaaaaaaaaaaaa

SEQ ID NO: 1942 - DNA, 4408 bp, Homo sapiens
cctggcctcgcgggccgtgtctccggcatcatgtgtggtatatttgcttacttaaactaccatgttcctcgaacgagacgagaaattcctggagaccctaatcaaaggcctcagagactggagtacagagctcatgatggtttaggtgtgggatttgatggaggcaatgataaagattgggaagccaatgcctgcaaaatccagcttattaagaagaaaggaaaagttaaggcactggatgaagaagttcacaagcaacaagatatggatttggatatagaatttgatgtacaccttggaatagctcatacccgttgggcaacacatggagaacccagtcctgtcaatagccacccccagcgctctgataaaaataatgaatttatcgttattcacaatggaatcatcaccaactacaaagacttgaaaaagtttttggaaagcaaaggctatgacttcgaatctgaaacagacacagagacaattgccaagctcgttaagtatatgtatgacaatcgggaaagtcaagataccagctttactaccttggtggagagagttatccaacaattggaaggtgcttttgcacttgtgtttaaaagtgttcattttcccgggcaagcagttggcacaaggcgaggtagccctctgttgattggtgtacggagtgaacataaactttctactgatcacattcctatactctacagaacaggcaaagacaagaaaggaagctgcaatctctctcgtgtggacagcacaacctgccttttcccggtggaagaaaaagcagtggagtattactttgcttctgatgcaagtgctgtcatagaacacaccaatcgcgtcatctttctggaagatgatgatgttgcagcagtagtggatggacgtctttctatccatcgaattaaacgaactgcaggagatcaccccggacgagctgtgcaaacactccagatggaactccagcagatcatgaagggcaacttcagttcatttatgcagaaggaaatatttgagcagccagagtctgtcgtgaacacaatgagaggaagagtcaactttgatgactatactgtgaatttgggtggtttgaaggatcacataaaggagatccagagatgccggcgtttgattcttattgcttgtggaacaagttaccatgctggtgtagcaacacgtcaagttcttgaggagctgactgagttgcctgtgatggtggaactagcaagtgacttcctggacagaaacacaccagtctttcgagatgatgtttgctttttccttagtcaatcaggtgagacagcagatactttgatgggtcttcgttactgtaaggagagaggagctttaactgtggggatcacaaacacagttggcagttccatatcacgggagacagattgtggagttcatattaatgctggtcctgagattggtgtggccagtacaaaggcttataccagccagtttgtatcccttgtgatgtttgcccttatgatgtgtgatgatcggatctccatgcaagaaagacgcaaagagatcatgcttggattgaaacggctgcctgatttgattaaggaagtactgagcatggatgacgaaattcagaaactagcaacagaactttatcatcagaagtcagttctgataatgggacgaggctatcattatgctacttgtcttgaaggggcactgaaaatcaaagaaattacttatatgcactctgaaggcatccttgctggtgaattgaaacatggccctctggctttggtggataaattgatgcctgtgatcatgatcatcatgagagatcacacttatgccaagtgtcagaatgctcttcagcaagtggttgctcggcaggggcggcctgtggtaatttgtgataaggaggatactgagaccattaagaacacaaaaagaacgatcaaggtgccccactcagtggactgcttgcagggcattctcagcgtgatccctttacagttgctggctttccaccttgctgtgctgagaggctatgatgttgatttcccacggaatcttgccaaatctgtgactgtagagtgaggaatatctatacaaaatgtacgaaactgtatgattaagcaacacaagacaccttttgtatttaaaaccttgatttaaaatatcaccccttgaagcctttttttagtaaatccttatttatatatcagttataattattccactcaatatgtgatttttgtgaagttacctcttacattttcccagtaatttgtggaggactttgaataatggaatctatattggaatctgtatcagaaagattctagctattattttctttaaagaatgctgggtgttgcatttctggaccctccacttcaatctgagaagacaatatgtttctaaaaattggtacttgtttcaccatacttcattcagaccagtgaaagagtagtgcatttaattggagtatctaaagccagtggcagtgtatgctcatacttggacagttagggaagggtttgccaagttttaagagaagatgtgatttattttgaaatttgtttctgttttgtttttaaatcaaactgtaaaacttaaaactgaaaaattttattggtaggatttatatctaagtttggttagccttagtttctcagacttgttgtctattatctgtaggtggaagaaatttaggaagcgaaatattacagtagtgcattggtgggtctcaatccttaacatatttgcacaattttatagcacaaactttaaattcaagctgctttggacaactgacaatatgattttaaatttgaagatgggatgtgtacatgttgggtatcctactactttgtgttttcatctcctaaaagtggtttttatttccttgtatctgtagtcttttattttttaaatgactgctgaatgacatattttatcttgttctttaaaatcacaacacagagctgctattaaattaatattgatatattcagtattctcttcaactttgtcacgaggaagaatttcctgtagttaattttaactttccttcattacattgttgcataaaactagtcccttagtgccagtttggaagttacttgcaattgtttggaagatttgcaggtcgctgacctcatcatttcactctaagtatatgtggtaggctaagctcagaaaaaggtatgtatgctttacactgataggcaccaaatttagtattgtatcctaagtatttttcctcttctgtattttctgtgctctacccctgaaatatatttaggaataaagaagatataaataaagtgatattggggtatgttcagcttgtaagtgtcagaaatggaagttgacaatttggattaaaatatttaaagtagaatgttattatttgatacccccaaaattgtgagtaataatttcttaatggagcttttctggccagatcttcagggctataggagagtgtgtttgtttttggtgaagtccttctttttcaaaggtttttacttttaaattgtgaagataagctatttagcacaattatttaagtaagctgttttttcctttcttttctttcttttcttgttttaacttctgggtgaggttaagattttctaatagttattgttgttgccagagaagcatagaattctgcttgtgtcttagggttagagaaagatttgttatattttgaggtaatttggaaggactttcatacatggtgactagaaacctgatctttttaagaataaaatagggtcactatttacattatatataatatatggctattatagctatattaatctactttaattgtttctaagattattttgtgtaagtcagctagcgtgtgtatagtgtcatttcttatgttttgtatattaacgttttacaaacacaatttgtgtgggtttgtagcatttcttatagtttaaagtatgattcagcattctaagttaaaactaatatgtgaagtcagtcattagtctgcataatctctgtctccctctgtgtgtgtctttctataaagcacatgtgtacacacacacacacaaatatactgaaagctagggtaagttctaaactgaatatcaaaaaccaaaatcaagaacaaagaagtgatattttccaaacaaacatggattctctgccgggtgcagtggctcagcctgtaataccagcctccactttgggagtctgaggtgggagtattgcttgagctcaagagttggagaacagcctgggcaacatggtgagacctggtctttacaaaaatttttttggccggacgcagtggctcacacctgtaatcccagcactttgggaggccgaggcaggttgatcatgaggtcaagagatcgagaccatcctggccaacatggtgaaaccccgtctttac

SEQ ID NO: 1943 - DNA, 2378 bp, Homo sapiens
gcagccaccatggcgctcctgctgtgcttcgtgctcctgtgcggagtagtggatttcgccagaagtttgagtatcactactcctgaagagatgattgaaaaagccaaaggggaaactgcctatctgccatgcaaatttacgcttagtcccgaagaccagggaccgctggacatcgagtggctgatatcaccagctgataatcagaaggtggatcaagtgattattttatattctggagacaaaatttatgatgactactatccagatctgaaaggccgagtacattttacgagtaatgatctcaaatctggtgatgcatcaataaatgtaacgaatttacaactgtcagatattggcacatatcagtgcaaagtgaaaaaagctcctggtgttgcaaataagaagattcatctggtagttcttgttaagccttcaggtgcgagatgttacgttgatggatctgaagaaattggaagtgactttaagataaaatgtgaaccaaaagaaggttcacttccattacagtatgagtggcaaaaattgtctgactcacagaaaatgcccacttcatggttagcagaaatgacttcatctgttatatctgtaaaaaatgcctcttctgagtactctgggacatacagctgtacagtcagaaacagagtgggctctgatcagtgcctgttgcgtctaaacgttgtccctccttcaaataaagctggactaattgcaggagccattataggaactttgcttgctctagcgctcattggtcttatcatcttttgctgtcgtaaaaagcgcagagaagaaaaatatgaaaaggaagttcatcacgatatcagggaagatgtgccacctccaaagagccgtacgtccactgccagaagctacatcggcagtaatcattcatccctggggtccatgtctccttccaacatggaaggatattccaagactcagtataaccaagtaccaagtgaagactttgaacgcactcctcagagtccgactctcccacctgctaaggtagctgcccctaatctaagtcgaatgggtgcgattcctgtgatgattccagcacagagcaaggatgggtctatagtatagagcctccatatgtctcatctgtgctctccgtgttcctttcctttttttgatatatgaaaacctattctggtctaaattgtgttactagcctcaaaatacatcaaaaaataagttaatcaggaactgtacggaatatatttttaaaaatttttgtttggttatatcaaaatagttacaggcactaaagttagtaaagaaaagtttaccatctgaaaaagctggattttctttaagaggttgattataaagttttctaaatttatcagtacctaagtaagatgtagcgctttgaatatgaaatcataggtgaagacatgggtgaacttacttgcataccaagttgatacttgaataaccatctgaaagtggtacttgatcatttttaccattatttttaggatgtgtatttcatttatttatggcccaccagtctcccccaaattagtacagaaatatccatgacaaaattacttacgtatgtttgtacttggttttacagctcctttgaaaactctgtgtttggaatatctctaaaaacatagaaaacactacagtggtttagaaattactaattttacttctaagtcattcataaaccttgtctatgaaatgacttcttaaatatttagttgatagactgctacaggtaatagggacttagcaagctcttttatatgctaaaggagcatctatcagattaagttagaacatttgctgtcagccacatattgagatgacactaggtgcaatagcagggatagattttgttggtgagtagtctcatgccttgagatctgtggtggtcttcaaaatggtggccagccagatcaaggatgtagtatctcatagttcccaggtgatatttttcttattagaaaaatattataactcatttgttgtttgacacttatagattgaaatttcctaatttattctaaattttaagtggttctttggttccagtgctttatgttgttgttgtttttggatggtgttacatattatatgttctagaaacatgtaatcctaaatttaccctcttgaatataatccctggatgatattttttatcataaatgcagaataatcaaatacattttaagcaagttaagtgtcctccatcaattctgtattccagacttgggaggatgtacagttgctgttgtgtgatcaaacatgtctctgtgtagttccagcaaatcaagctgagctttgaaaaagtttgtcttagttttgtgaaggtgatttattcttgaaaaaaaaaaaaaaaa

SEQ ID NO: 1944 - DNA, 3026 bp, Homo sapiens
gggaggaggggcggagggtgcagaggtgccgccgccgccgcgagccagtcgggagcgcgcgaggcgcggggagcctgggaccaggagcgagagccgcctacctgcagccgccgcccacggcacggcagccaccatggcgctcctgctgtgcttcgtgctcctgtgcggagtagtggatttcgccagaagtttgagtatcactactcctgaagagatgattgaaaaagccaaaggggaaactgcctatctgccatgcaaatttacgcttagtcccgaagaccagggaccgctggacatcgagtggctgatatcaccagctgataatcagaaggtggatcaagtgattattttatattctggagacaaaatttatgatgactactatccagatctgaaaggccgagtacattttacgagtaatgatctcaaatctggtgatgcatcaataaatgtaacgaatttacaactgtcagatattggcacatatcagtgcaaagtgaaaaaagctcctggtgttgcaaataagaagattcatctggtagttcttgttaagccttcaggtgcgagatgttacgttgatggatctgaagaaattggaagtgactttaagataaaatgtgaaccaaaagaaggttcacttccattacagtatgagtggcaaaaattgtctgactcacagaaaatgcccacttcatggttagcagaaatgacttcatctgttatatctgtaaaaaatgcctcttctgagtactctgggacatacagctgtacagtcagaaacagagtgggctctgatcagtgcctgttgcgtctaaacgttgtccctccttcaaataaagctggactaattgcaggagccattataggaactttgcttgctctagcgctcattggtcttatcatcttttgctgtcgtaaaaagcgcagagaagaaaaatatgaaaaggaagttcatcacgatatcagggaagatgtgccacctccaaagagccgtacgtccactgccagaagctacatcggcagtaatcattcatccctggggtccatgtctccttccaacatggaaggatattccaagactcagtataaccaagtaccaagtgaagactttgaacgcactcctcagagtccgactctcccacctgctaaggtagctgcccctaatctaagtcgaatgggtgcgattcctgtgatgattccagcacagagcaaggatgggtctatagtatagagcctccatatgtctcatctgtgctctccgtgttcctttcctttttttgatatatgaaaacctattctggtctaaattgtgttactagcctcaaaatacatcaaaaaataagttaatcaggaactgtacggaatatatttttaaaaatttttgtttggttatatcgaaatagttacaggcactaaagttagtaaagaaaagtttaccatctgaaaaagctggattttctttaagaggttgattataaagttttctaaatttatcagtacctaagtaagatgtagcgctttgaatatgaaatcataggtgaagacatgggtgaacttacttgcataccaagttgatacttgaataaccatctgaaagtggtacttgatcatttttaccattatttttaggatgtgtatttcatttatttatggcccaccagtctcccccaaattagtacagaaatatccatgacaaaattacttacgtatgtttgtacttggttttacagctcctttgaaaactctgtgtttggaatatctctaaaaacatagaaaacactacagtggtttagaaattactaattttacttctaagtcattcataaaccttgtctatgaaatgacttcttaaatatttagttgatagactgctacaggtaatagggacttagcaagctcttttatatgctaaaggagcatctatcagattaagttagaacatttgctgtcagccacatattgagatgacactaggtgcaatagcagggatagattttgttggtgagtagtctcatgccttgagatctgtggtggtcttcaaaatggtggccagccagatcaaggatgtagtatctcatagttcccaggtgatatttttcttattagaaaaatattataactcatttgttgtttgacacttatagattgaaatttcctaatttattctaaattttaagtggttctttggttccagtgctttatgttgttgttgtttttggatggtgttacatattatatgttctagaaacatgtaatcctaaatttaccctcttgaatataatccctggatgatattttttatcataaatgcagaataatcaaatacattttaagcaagttaagtgtcctccatcaattctgtattccagacttgggaggatgtacagttgctgttgtgtgatcaaacatgtctctgtgtagttccagcaaatcaagctgagctttgaaaaagtttgtcttagttttgtgaaggtgatttattcttaaaaaaaaaaaagaaagaaaaagaaaaaaagataagaagaaggagtaaagggactactcctccttgccaaatgtgctaaatatcattttaggagaagaaagtgggtttattgtatttcccttaagattgtgagggagtgtggatacagtagaatgagccaacagtttctttataataaatacggtctgcaataaattatttcactagctctaaaacctttccctagattttagtagggagttggtttctgttaatatctttgggtgctgtggtggtaaatgctatattatgaacggtggcatgtatttacagttagagtattgtgtgtacactttttaatggtaaacttaagctgaatgtgtaatggatttgtgtatagttttacatatttggaagcattttaaaaacaggttttaaccttatgtaaaattacttttatactcgtgttaacattttcatctgtgccttttggtaatttaatttctattatgaatttctggtgcctatgagctagctatcacctacctgaaaggtgcttaga

SEQ ID NO: 1945 - DNA, 400 bp, Homo sapiens
gggaggaggggcggagggtgcagaggtgccgccgccgccgcgagccagtcgggagcgcgcgaggcgcggggagcctgggaccaggagcgagagccgcctacctgcagccgccgcccacggcacggcagccaccatggcgctcctgctgtgcttcgtgctcctgtgcggagtagtggatttcgccagaagtttgagtatcactactcctgaagagatgattgaaaaagccaaaggggaaactgcctatctgccatgcaaatttacgcttagtcccgaagaccagggaccgctggacatcgagtggctgatatcaccagctgataatcagaaggtggatcaagtgggaagatgtgccacctccaaagagccgtacgtccactgccagaagctacatcggcag

SEQ ID NO: 1946 - DNA, 1000 bp, Homo sapiens
gagtgcgccaggcgcggggagcctaggacctggagcgagagccgcctacctgcagccgccgcccacggcacggcagccaccgtggcgctcctgctgcgcttcgtgctcctgtgcagagtcgcggatttcatcagaggttggagtatcactactcctgagcagatgattgaaaaagccaaaggggaaactgcctatctgccatgcaaatttacgcttagtcctgaagaccagggaccactggacatcgagtggctgatatcaccagctgataatcagaaggtggatcaagtgattattttatattctggagacaaaaattatgatgactactatccagatctgaaaggccgagtacattttaagagtaatgatctcaaatctggtgatgcatcaataaatgtaacgaattttcagctgtcagatattggcacagatcagtgcaaagtgaaaagagctcctggtgttgcaaataggaagattcagctggtagttcttggtaagccttcaggtacaagatgttacgttgatggatcagaagaaattggaagtgactttaaattaaaatgtgaaccaaaagaaggttcacttccattacagtatgagtggcaaaaattgtctgactcacagaaaatgcccacttcatggttagcagggaagatgtgccgcctccaaagagccacacgtccactgccagaagctacataggcagtaatcattcatccctgggatccatatctccttccaacatggaaggatattccaagactcagtataaacaagtaccaagtgaagactttgaacgcactcctcagagtccgactctcccacctgctaaggtagctgcccctaatctaagtcgaatgggcgcgattcctgtgatgattcccgcacagagcaaggatgggtctatagtatagagcctccatacatctcatctgtgctctccgtgttcctttcctttttttgatatatgaaaacctattctggtctaaattttgtt

SEQ ID NO: 1947 - DNA, 733 bp, Homo sapiens
gggaggaggggcggagggtgcagaggtgccgccgccgccgcgagccagtcgggagcgcgcgaggcgcggggagcctgggaccaggagcgagagccgcctacctgcagccgccgcccacggcacggcagccaccatggcgctcctgctgtgcttcgtgctcctgtgcggagtagtggatttcgccagaagtttgagtatcactactcctgaagagatgattgaaaaagccaaaggggaaactgcctatctgccatgcaaatttacgcttagtcccgaagaccagggaccgctggacatcgagtggctgatatcaccagctgataatcagaaggtggatcaagtgattattttatattctggagacaaaatttatgatgactactatccagatctgaaaggccgagtacattttacgagtaatgatctcaaatctggtgatgcatcaataaatgtaacgaatttacaactgtcagatattggcacatatcagtgcaaagtgaaaaaagctcctggtgttgcaaataagaagattcatctggtagttcttgggaagatgtgccacctccaaagagccgtacgtccactgccagaagctacatcggcagtaatcattcatccctggggtccatgtctccttccaacatggaaggatattccaagactcagtataaccaagtaccaagtgaagactttgaacgcactcctcagagtccgactctcccacctgctaagg

SEQ ID NO: 1948 - DNA, 2764 bp, Homo sapiens
gggaggaggggcggagggtgcagaggtgccgccgccgccgcgagccagtcgggagcgcgcgaggcgcggggagcctgggaccaggagcgagagccgcctacctgcagccgccgcccacggcacggcagccaccatggcgctcctgctgtgcttcgtgctcctgtgcggagtagtggatttcgccagaagtttgagtatcactactcctgaagagatgattgaaaaagccaaaggggaaactgcctatctgccatgcaaatttacgcttagtcccgaagaccagggaccgctggacatcgagtggctgatatcaccagctgataatcagaaggtggatcaagtgattattttatattctggagacaaaatttatgatgactactatccagatctgaaaggccgagtacattttacgagtaatgatctcaaatctggtgatgcatcaataaatgtaacgaatttacaactgtcagatattggcacatatcagtgcaaagtgaaaaaagctcctggtgttgcaaataagaagattcatctggtagttcttgttaagccttcaggtgcgagatgttacgttgatggatctgaagaaattggaagtgactttaagataaaatgtgaaccaaaagaaggttcacttccattacagtatgagtggcaaaaattgtctgactcacagaaaatgcccacttcatggttagcagggaagatgtgccacctccaaagagccgtacgtccactgccagaagctacatcggcagtaatcattcatccctggggtccatgtctccttccaacatggaaggatattccaagactcagtataaccaagtaccaagtgaagactttgaacgcactcctcagagtccgactctcccacctgctaaggtagctgcccctaatctaagtcgaatgggtgcgattcctgtgatgattccagcacagagcaaggatgggtctatagtatagagcctccatatgtctcatctgtgctctccgtgttcctttcctttttttgatatatgaaaacctattctggtctaaattgtgttactagcctcaaaatacatcaaaaaataagttaatcaggaactgtacggaatatatttttaaaaatttttgtttggttatatcgaaatagttacaggcactaaagttagtaaagaaaagtttaccatctgaaaaagctggattttctttaagaggttgattataaagttttctaaatttatcagtacctaagtaagatgtagcgctttgaatatgaaatcataggtgaagacatgggtgaacttacttgcataccaagttgatacttgaataaccatctgaaagtggtacttgatcatttttaccattatttttaggatgtgtatttcatttatttatggcccaccagtctcccccaaattagtacagaaatatccatgacaaaattacttacgtatgtttgtacttggttttacagctcctttgaaaactctgtgtttggaatatctctaaaaacatagaaaacactacagtggtttagaaattactaattttacttctaagtcattcataaaccttgtctatgaaatgacttcttaaatatttagttgatagactgctacaggtaatagggacttagcaagctcttttatatgctaaaggagcatctatcagattaagttagaacatttgctgtcagccacatattgagatgacactaggtgcaatagcagggatagattttgttggtgagtagtctcatgccttgagatctgtggtggtcttcaaaatggtggccagccagatcaaggatgtagtatctcatagttcccaggtgatatttttcttattagaaaaatattataactcatttgttgtttgacacttatagattgaaatttcctaatttattctaaattttaagtggttctttggttccagtgctttatgttgttgttgtttttggatggtgttacatattatatgttctagaaacatgtaatcctaaatttaccctcttgaatataatccctggatgatattttttatcataaatgcagaataatcaaatacattttaagcaagttaagtgtcctccatcaattctgtattccagacttgggaggatgtacagttgctgttgtgtgatcaaacatgtctctgtgtagttccagcaaatcaagctgagctttgaaaaagtttgtcttagttttgtgaaggtgatttattcttaaaaaaaaaaaagaaagaaaaagaaaaaaagataagaagaaggagtaaagggactactcctccttgccaaatgtgctaaatatcattttaggagaagaaagtgggtttattgtatttcccttaagattgtgagggagtgtggatacagtagaatgagccaacagtttctttataataaatacggtctgcaataaattatttcactagctctaaaacctttccctagattttagtagggagttggtttctgttaatatctttgggtgctgtggtggtaaatgctatattatgaacggtggcatgtatttacagttagagtattgtgtgtacactttttaatggtaaacttaagctgaatgtgtaatggatttgtgtatagttttacatatttggaagcattttaaaaacaggttttaaccttatgtaaaattacttttatactcgtgttaacattttcatctgtgccttttggtaatttaatttctattatgaatttctggtgcctatgagctagctatcacctacctgaaaggtgcttaga

SEQ ID NO: 1949 - DNA, 6433 bp, Homo sapiens
tgccggtggcctctgtggccgtccaggctagcggcggcccgcaggcggcggggagaaagactctctcacctggtcttgcggctgtggccaccgccggccaggggtgtggagggcgtgctgccggagacgtccgccgggctctgcagttccgccgggggtcgggcagctatggagccgcggcccacggcgccctcctccggcgccccgggactggccggggtcggggagacgccgtcagccgctgcgctggccgcagccagggtggaactgcccggcacggctgtgccctcggtgccggaggatgctgcgcccgcgagccgggacggcggcggggtccgcgatgagggccccgcggcggccggggacgggctgggcagacccttggggcccaccccgagccagagccgtttccaggtggacctggtttccgagaacgccgggcgggccgctgctgcggcggcggcggcggcggcggcagcggcggcggctggtgctggggcgggggccaagcagacccccgcggacggggaagccagcggcgagagcgagccggctaaaggcagcgaggaagccaagggccgcttccgcgtgaacttcgtggacccagctgcctcctcgtcggctgaagacagcctgtcagatgctgccggggtcggagtcgacgggcccaacgtgagcttccagaacggcggggacacggtgctgagcgagggcagcagcctgcactccggcggcggcggcggcagtgggcaccaccagcactactattatgatacccacaccaacacctactacctgcgcaccttcggccacaacaccatggacgctgtgcccaggatcgatcactaccggcacacagccgcgcagctgggcgagaagctgctccggcctagcctggcggagctccacgacgagctggaaaaggaaccttttgaggatggctttgcaaatggggaagaaagtactccaaccagagatgctgtggtcacgtatactgcagaaagtaaaggagtcgtgaagtttggctggatcaagggtgtattagtacgttgtatgttaaacatttggggtgtgatgcttttcattagattgtcatggattgtgggtcaagctggaataggtctatcagtccttgtaataatgatggccactgttgtgacaactatcacaggattgtctacttcagcaatagcaactaatggatttgtaagaggaggaggagcatattatttaatatctagaagtctagggccagaatttggtggtgcaattggtctaatcttcgcctttgccaacgctgttgcagttgctatgtatgtggttggatttgcagaaaccgtggtggagttgcttaaggaacattccatacttatgatagatgaaatcaatgatatccgaattattggagccattacagtcgtgattcttttaggtatctcagtagctggaatggagtgggaagcaaaagctcagattgttcttttggtgatcctacttcttgctattggtgatttcgtcataggaacatttatcccactggagagcaagaagccaaaagggttttttggttataaatctgaaatatttaatgagaactttgggcccgattttcgagaggaagagactttcttttctgtatttgccatcttttttcctgctgcaactggtattctggctggagcaaatatctcaggtgatcttgcagatcctcagtcagccatacccaaaggaacactcctagccattttaattactacattggtttacgtaggaattgcagtatctgtaggttcttgtgttgttcgagatgccactggaaacgttaatgacactatcgtaacagagctaacaaactgtacttctgcagcctgcaaattaaactttgatttttcatcttgtgaaagcagtccttgttcctatggcctaatgaacaacttccaggtaatgagtatggtgtcaggatttacaccactaatttctgcaggtatattttcagccactctttcttcagcattagcatccctagtgagtgctcccaaaatatttcaggctctatgtaaggacaacatctacccagctttccagatgtttgctaaaggttatgggaaaaataatgaacctcttcgtggctacatcttaacattcttaattgcacttggattcatcttaattgctgaactgaatgttattgcaccaattatctcaaacttcttccttgcatcatatgcattgatcaatttttcagtattccatgcatcacttgcaaaatctccaggatggcgtcctgcattcaaatactacaacatgtggatatcacttcttggagcaattctttgttgcatagtaatgttcgtcattaactggtgggctgcattgctaacatatgtgatagtccttgggctgtatatttatgttacctacaaaaaaccagatgtgaattggggatcctctacacaagccctgacttacctgaatgcactgcagcattcaattcgtctttctggagtggaagaccacgtgaaaaactttaggccacagtgtcttgttatgacaggtgctccaaactcacgtccagctttacttcatcttgttcatgatttcacaaaaaatgttggtttgatgatctgtggccatgtacatatgggtcctcgaagacaagccatgaaagagatgtccatcgatcaagccaaatatcagcgatggcttattaagaacaaaatgaaggcattttatgctccagtacatgcagatgacttgagagaaggtgcacagtatttgatgcaggctgctggtcttggtcgtatgaagccaaacacacttgtccttggatttaagaaagattggttgcaagcagatatgagggatgtggatatgtatataaacttatttcatgatgcttttgacatacaatatggagtagtggttattcgcctaaaagaaggtctggatatatctcatcttcaaggacaagaagaattattgtcatcacaagagaaatctcctggcaccaaggatgtggtagtaagtgtggaatatagtaaaaagtccgatttagatacttccaaaccactcagtgaaaaaccaattacacacaaagttgaggaagaggatggcaagactgcaactcaaccactgttgaaaaaagaatccaaaggccctattgtgcctttaaatgtagctgaccaaaagcttcttgaagctagtacacagtttcagaaaaaacaaggaaagaatactattgatgtctggtggctttttgatgatggaggtttgaccttattgataccttaccttctgacgaccaagaaaaaatggaaagactgtaagatcagagtattcattggtggaaagataaacagaatagaccatgaccggagagcgatggctactttgcttagcaagttccggatagacttttctgatatcatggttctaggagatatcaataccaaaccaaagaaagaaaatattatagcttttgaggaaatcattgagccatacagacttcatgaagatgataaagagcaagatattgcagataaaatgaaagaagatgaaccatggcgaataacagataatgagcttgaactttataagaccaagacataccggcagatcaggttaaatgagttattaaaggaacattcaagcacagctaatattattgtcatgagtctcccagttgcacgaaaaggtgctgtgtctagtgctctctacatggcatggttagaagctctatctaaggacctaccaccaatcctcctagttcgtgggaatcatcagagtgtccttaccttctattcataaatgttctatacagtggacagccctccagaatggtacttcagtgcctagtgtagtaactgaaatcttcaatgacacattaacatcacaatggcgaatggtgacttttctttcacgatttcattaatttgaaagcacacaggaaagttgctccattgataacgtgtatggagacttcggttttagtcaattccatatctcaatcttaatggtgattcttctctgttgaactgaagtttgtgagagtagttttcctttgctacttgaatagcaataaaagcgtgttaactttttgattgatgaaagaagtacaaaaagcctttagccttgaggtgccttctgaaattaaccaaatttcatccatatatcctcttttataaacttatagaatgtcaaactttgccttcaactgtttttatttctagtctcttccactttaaaacaaaatgaacactgcttgtcttcttccattgaccatttagtgttgagtactgtatgtgttttgttaattctataaaggtatctgttagatattaaaggtgagaattagggcaggttaatcaaaaatggggaaggggaaatggtaaccaaaaagtaaccccatggtaaggtttatatgagtatatgtgaatatagagctaggaaaaaaagcccccccaaatacctttttaacccctctgattggctattattactatatttattattatttattgaaaccttagggaagattgaagattcatcccatacttctatataccatgcttaaaaatcacgtcattctttaaacaaaaatactcaagatcatttatatttatttggagagaaaactgtcctaatttagaatttccctcaaatctgagggacttttaagaaatgctaacagatttttctggaggaaatttagacaaaacaatgtcatttagtagaatatttcagtatttaagtggaatttcagtatactgtactatcctttataagtcattaaaataatgtttcatcaaatggttaaatggaccactggtttcttagagaaatgtttttaggcttaattcattcaattgtcaagtacacttagtcttaatacactcaggtttgaacagattattctgaatattaaaatttaatccattcttaatattttaaaacttttgttaagaaaaactgccagtttgtgcttttgaaatgtctgttttgacatcatagtctagtaaaattttgacagtgcatatgtactgttactaaaagctttatatgaaattattaatgtgaagtttttcatttataattcaaggaaggatttcctgaaaacatttcaagggatttatgtctacatatttgtgtgtgtgtgtgtatatatatgtaatatgcatacacagatgcatatgtgtatatataatgaaatttatgttgctggtattttgcattttaaagtgatcaagattcattaggcaaactttggtttaagtaaacatatgttcaaatcagattaacagatacaggtttcatagagaacaaaggtgatcatttgaagggcatgctgtaatttcacacaattttccagttcaaaaatggagaatacttcgcctaaaatactgttaagtgggttaattgatacaagtttctgtggtggaaaatttatgcaggttttcacgaatcctttttttttttttttttttttttgagacggagtctcgctctgttgccacgctggaatgcagtaacgtgatcttggctcactgcgacctccacctccccagttcaagcgattctcctgcctcagcctccctagtagctgggactacgggtgcacgccaccatgcccagctaatttttgtattttgagtagagacagggtttcaccgtgttggctaggatggtgtctatctcttgaccttgtgatccacccgcctcagcctcccagagtgctgggattacaggtgcgagccactgcgcctggctggttttcatgaatcttgatagacatctataacgttattattttcagtggtgtgcagcatttttgcttcatgagtatgacctaggtatagagatctgataacttgaattcagaatattaagaaaatgaagtaactgattttctaaaaaaaaaaaaaaaaaaaatttctacattataactcacagcattgttccattgcaggttttgcaatgtttgggggtaaagacagtagaaatattattcagtaaacaataatgtgtgaacttttaagatggataatagggcatggactgagtgctgctatcttgaaatgtgcacaggtacacttaccttttttttttttttttttaagtttttcccattcaggaaaacaacattgtgatctgtactacaggaaccaaatgtcatgcgtcatacatgtgggtataaagtacataaaatatatctaactattcataatgtggggtgggtaatactgtctgtgaaataatgtaagaagcttttcacttaaaaaaaatgcattactttcacttaacactagacaccaggtcgaaaattttcaaggttatagtacttatttcaacaattcttagagatgctagctagtgttgaattctaatcattgatgatagcttggaaataaataattatgccatggcatttgacagt

SEQ ID NO: 1950 - DNA, 6433 bp, Homo sapiens; identical to SEQ ID NO: 1949

SEQ ID NO: 1951 - DNA, 6433 bp, Homo sapiens; identical to SEQ ID NO: 1949

SEQ ID NO: 1952 - DNA, 2223 bp, Homo sapiens; identical to SEQ ID NO: 1677

SEQ ID NO: 1953 - DNA, 3834 bp, Homo sapiens
gccggatcccgggaagctaccggctgctggggtgctccggattttgcggggttcgtcgggcctgtggaagaagcgccgcgcacggacttcggcagagacaggtagagcaggtctctctgcagccatgtcggccaaggcaatttcagagcagacgggcaaagaactcctttacaagttcatctgtaccacctcagccatccagaatcggttcaagtatgctcgggtcactcctgacacagactgggcccgcttgctgcaggaccacccctggctgctcagccagaacttggtagtcaagccagaccagctgatcaaacgtcgtggaaaacttggtctcgttggggtcaacctcactctggatggggtcaagtcctggctgaagccacggctgggacaggaagccacagttggcaaggccacaggcttcctcaagaactttctgatcgagcccttcgtcccccacagtcaggctgaggagttctatgtctgcatctatgccacccgagaaggggactacgtcctgttccaccacgaggggggtgtggacgtgggtgatgtggacgccaaggcccagaagctgcttgttggcgtggatgagaaactgaatcctgaggacatcaaaaaacacctgttggtccacgcccctgaagacaagaaagaaattctggccagttttatctccggcctcttcaatttctacgaggacttgtacttcacctacctcgagatcaatccccttgtagtgaccaaagatggagtctatgtccttgacttggcggccaaggtggacgccactgccgactacatctgcaaagtgaagtggggtgacatcgagttccctccccccttcgggcgggaggcatatccagaggaagcctacattgcagacctcgatgccaaaagtggggcaagcctgaagctgaccttgctgaaccccaaagggaggatctggaccatggtggccgggggtggcgcctctgtcgtgtacagcgataccatctgtgatctagggggtgtcaacgagctggcaaactatggggagtactcaggcgcccccagcgagcagcagacctatgactatgccaagactatcctctccctcatgacccgagagaagcacccagatggcaagatcctcatcattggaggcagcatcgcaaacttcaccaacgtggctgccacgttcaagggcatcgtgagagcaattcgagattaccagggccccctgaaggagcacgaagtcacaatctttgtccgaagaggtggccccaactatcaggagggcttacgggtgatgggagaagtcgggaagaccactgggatccccatccatgtctttggcacagagactcacatgacggccattgtgggcatggccctgggccaccggcccatccccaaccagccacccacagcggcccacactgcaaacttcctcctcaacgccagcgggagcacatcgacgccagcccccagcaggacagcatctttttctgagtccagggccgatgaggtggcgcctgcaaagaaggccaagcctgccatgccacaagattcagtcccaagtccaagatccctgcaaggaaagagcaccaccctcttcagccgccacaccaaggccattgtgtggggcatgcagacccgggccgtgcaaggcatgctggactttgactatgtctgctcccgagacgagccctcagtggctgccatggtctaccctttcactggggaccacaagcagaagttttactgggggcacaaagagatcctgatccctgtcttcaagaacatggctgatgccatgaggaagcacccggaggtagatgtgctcatcaactttgcctctctccgctctgcctatgacagcaccatggagaccatgaactatgcccagatccggaccatcgccatcatagctgaaggcatccctgaggccctcacgagaaagctgatcaagaaggcggaccagaagggagtgaccatcatcggacctgccactgttggaggcatcaagcctgggtgctttaagattggcaacacaggtgggatgctggacaacatcctggcctccaaactgtaccgcccaggcagcgtggcctatgtctcacgttccggaggcatgtccaacgagctcaacaatatcatctctcggaccacggatggcgtctatgagggcgtggccattggtggggacaggtacccgggctccacattcatggatcatgtgttacgctatcaggacactccaggagtcaaaatgattgtggttcttggagagattgggggcactgaggaatataagatttgccggggcatcaaggagggccgcctcactaagcccatcgtctgctggtgcatcgggacgtgtgccaccatgttctcctctgaggtccagtttggccatgctggagcttgtgccaaccaggcttctgaaactgcagtagccaagaaccaggctttgaaggaagcaggagtgtttgtgccccggagctttgatgagcttggagagatcatccagtctgtatacgaagatctcgtggccaatggagtcattgtacctgcccaggaggtgccgcccccaaccgtgcccatggactactcctgggccagggagcttggtttgatccgcaaacctgcctcgttcatgaccagcatctgcgatgagcgaggacaggagctcatctacgcgggcatgcccatcactgaggtcttcaaggaagagatgggcattggcggggtcctcggcctcctctggttccagaaaaggttgcctaagtactcttgccagttcattgagatgtgtctgatggtgacagctgatcacgggccagccgtctctggagcccacaacaccatcatttgtgcgcgagctgggaaagacctggtctccagcctcacctcggggctgctcaccatcggggatcggtttgggggtgccttggatgcagcagccaagatgttcagtaaagcctttgacagtggcattatccccatggagtttgtgaacaagatgaagaaggaagggaagctgatcatgggcattggtcaccgagtgaagtcgataaacaacccagacatgcgagtgcagatcctcaaagattacgtcaggcagcacttccctgccactcctctgctcgattatgcactggaagtagagaagattaccacctcgaagaagccaaatcttatcctgaatgtagatggtctcatcggagtcgcatttgtagacatgcttagaaactgtgggtcctttactcgggaggaagctgatgaatatattgacattggagccctcaatggcatctttgtgctgggaaggagtatggggttcattggacactatcttgatcagaagaggctgaagcaggggctgtatcgtcatccgtgggatgatatttcatatgttcttccggaacacatgagcatgtaacagagccaggaaccctactgcagtaaactgaagacaagaactcttcccccaagaaaaagtgtacagacagctggcagtggagcctgctttatttagcaggggcctggaatgtaaacagccactggggtacaggcaccgaagaccaacatccacaggctaacaccccttcagtccacacaaagaagcttcatattttttttataagcatagaaatggaagcatctaagtactgtcaggatggggtcttcctcattgtagggcgttaggatgttgctttctttttccattagttaaacatttttttctcctttggaggaagggaatgaaacatttatggcctcaagatactatacatttaaagcaccccaatgtctctctttttttttttttacttccctttcttc

SEQ ID NO: 1954 - DNA, 3834 bp, Homo sapiens; identical to SEQ ID NO: 1953

SEQ ID NO: 1955 - DNA, 3804 bp, Homo sapiens
gccggatcccgggaagctaccggctgctggggtgctccggattttgcggggttcgtcgggcctgtggaagaagcgccgcgcacggacttcggcagagacaggtagagcaggtctctctgcagccatgtcggccaaggcaatttcagagcagacgggcaaagaactcctttacaagttcatctgtaccacctcagccatccagaatcggttcaagtatgctcgggtcactcctgacacagactgggcccgcttgctgcaggaccacccctggctgctcagccagaacttggtagtcaagccagaccagctgatcaaacgtcgtggaaaacttggtctcgttggggtcaacctcactctggatggggtcaagtcctggctgaagccacggctgggacaggaagccacagttggcaaggccacaggcttcctcaagaactttctgatcgagcccttcgtcccccacagtcaggctgaggagttctatgtctgcatctatgccacccgagaaggggactacgtcctgttccaccacgaggggggtgtggacgtgggtgatgtggacgccaaggcccagaagctgcttgttggcgtggatgagaaactgaatcctgaggacatcaaaaaacacctgttggtccacgcccctgaagacaagaaagaaattctggccagttttatctccggcctcttcaatttctacgaggacttgtacttcacctacctcgagatcaatccccttgtagtgaccaaagatggagtctatgtccttgacttggcggccaaggtggacgccactgccgactacatctgcaaagtgaagtggggtgacatcgagttccctccccccttcgggcgggaggcatatccagaggaagcctacattgcagacctcgatgccaaaagtggggcaagcctgaagctgaccttgctgaaccccaaagggaggatctggaccatggtggccgggggtggcgcctctgtcgtgtacagcgataccatctgtgatctagggggtgtcaacgagctggcaaactatggggagtactcaggcgcccccagcgagcagcagacctatgactatgccaagactatcctctccctcatgacccgagagaagcacccagatggcaagatcctcatcattggaggcagcatcgcaaacttcaccaacgtggctgccacgttcaagggcatcgtgagagcaattcgagattaccagggccccctgaaggagcacgaagtcacaatctttgtccgaagaggtggccccaactatcaggagggcttacgggtgatgggagaagtcgggaagaccactgggatccccatccatgtctttggcacagagactcacatgacggccattgtgggcatggccctgggccaccggcccatccccaaccagccacccacagcggcccacactgcaaacttcctcctcaacgccagcgggagcacatcgacgccagcccccagcaggacagcatctttttctgagtccagggccgatgaggtggcgcctgcaaagaaggccaagcctgccatgccacaaggaaagagcaccaccctcttcagccgccacaccaaggccattgtgtggggcatgcagacccgggccgtgcaaggcatgctggactttgactatgtctgctcccgagacgagccctcagtggctgccatggtctaccctttcactggggaccacaagcagaagttttactgggggcacaaagagatcctgatccctgtcttcaagaacatggctgatgccatgaggaagcacccggaggtagatgtgctcatcaactttgcctctctccgctctgcctatgacagcaccatggagaccatgaactatgcccagatccggaccatcgccatcatagctgaaggcatccctgaggccctcacgagaaagctgatcaagaaggcggaccagaagggagtgaccatcatcggacctgccactgttggaggcatcaagcctgggtgctttaagattggcaacacaggtgggatgctggacaacatcctggcctccaaactgtaccgcccaggcagcgtggcctatgtctcacgttccggaggcatgtccaacgagctcaacaatatcatctctcggaccacggatggcgtctatgagggcgtggccattggtggggacaggtacccgggctccacattcatggatcatgtgttacgctatcaggacactccaggagtcaaaatgattgtggttcttggagagattgggggcactgaggaatataagatttgccggggcatcaaggagggccgcctcactaagcccatcgtctgctggtgcatcgggacgtgtgccaccatgttctcctctgaggtccagtttggccatgctggagcttgtgccaaccaggcttctgaaactgcagtagccaagaaccaggctttgaaggaagcaggagtgtttgtgccccggagctttgatgagcttggagagatcatccagtctgtatacgaagatctcgtggccaatggagtcattgtacctgcccaggaggtgccgcccccaaccgtgcccatggactactcctgggccagggagcttggtttgatccgcaaacctgcctcgttcatgaccagcatctgcgatgagcgaggacaggagctcatctacgcgggcatgcccatcactgaggtcttcaaggaagagatgggcattggcggggtcctcggcctcctctggttccagaaaaggttgcctaagtactcttgccagttcattgagatgtgtctgatggtgacagctgatcacgggccagccgtctctggagcccacaacaccatcatttgtgcgcgagctgggaaagacctggtctccagcctcacctcggggctgctcaccatcggggatcggtttgggggtgccttggatgcagcagccaagatgttcagtaaagcctttgacagtggcattatccccatggagtttgtgaacaagatgaagaaggaagggaagctgatcatgggcattggtcaccgagtgaagtcgataaacaacccagacatgcgagtgcagatcctcaaagattacgtcaggcagcacttccctgccactcctctgctcgattatgcactggaagtagagaagattaccacctcgaagaagccaaatcttatcctgaatgtagatggtctcatcggagtcgcatttgtagacatgcttagaaactgtgggtcctttactcgggaggaagctgatgaatatattgacattggagccctcaatggcatctttgtgctgggaaggagtatggggttcattggacactatcttgatcagaagaggctgaagcaggggctgtatcgtcatccgtgggatgatatttcatatgttcttccggaacacatgagcatgtaacagagccaggaaccctactgcagtaaactgaagacaagaactcttcccccaagaaaaagtgtacagacagctggcagtggagcctgctttatttagcaggggcctggaatgtaaacagccactggggtacaggcaccgaagaccaacatccacaggctaacaccccttcagtccacacaaagaagcttcatattttttttataagcatagaaatggaagcatctaagtactgtcaggatggggtcttcctcattgtagggcgttaggatgttgctttctttttccattagttaaacatttttttctcctttggaggaagggaatgaaacatttatggcctcaagatactatacatttaaagcaccccaatgtctctctttttttttttttacttccctttcttc

SEQ ID NO: 1956 - DNA, 3804 bp, Homo sapiens; identical to SEQ ID NO: 1955

SEQ ID NO: 1957 - DNA, 3834 bp, Homo sapiens; identical to SEQ ID NO: 1953

SEQ ID NO: 1958 - DNA, 4420 bp, Homo sapiens
agccgatgggggcggggaaaagtccggctgggccgggacaaaagccggatcccgggaagctaccggctgctggggtgctccggattttgcggggttcgtcgggcctgtggaagaagcgccgcgcacggacttcggcagaggtagagcaggtctctctgcagccatgtcggccaaggcaatttcagagcagacgggcaaagaactcctttacaagttcatctgtaccacctcagccatccagaatcggttcaagtatgctcgggtcactcctgacacagactgggcccgcttgctgcaggaccacccctggctgctcagccagaacttggtagtcaagccagaccagctgatcaaacgtcgtggaaaacttggtctcgttggggtcaacctcactctggatggggtcaagtcctggctgaagccacggctgggacaggaagccacagttggcaaggccacaggcttcctcaagaactttctgatcgagcccttcgtcccccacagtcaggctgaggagttctatgtctgcatctatgccacccgagaaggggactacgtcctgttccaccacgaggggggtgtggacgtgggtgatgtggacgccaaggcccagaagctgcttgttggcgtggatgagaaactgaatcctgaggacatcaaaaaacacctgttggtccacgcccctgaagacaagaaagaaattctggccagttttatctccggcctcttcaatttctacgaggacttgtacttcacctacctcgagatcaatccccttgtagtgaccaaagatggagtctatgtccttgacttggcggccaaggtggacgccactgccgactacatctgcaaagtgaagtggggtgacatcgagttccctccccccttcgggcgggaggcatatccagaggaagcctacattgcagacctcgatgccaaaagtggggcaagcctgaagctgaccttgctgaaccccaaagggaggatctggaccatggtggccgggggtggcgcctctgtcgtgtacagcgataccatctgtgatctagggggtgtcaacgagctggcaaactatggggagtactcaggcgcccccagcgagcagcagacctatgactatgccaagactatcctctccctcatgacccgagagaagcacccagatggcaagatcctcatcattggaggcagcatcgcaaacttcaccaacgtggctgccacgttcaagggcatcgtgagagcaattcgagattaccagggccccctgaaggagcacgaagtcacaatctttgtccgaagaggtggccccaactatcaggagggcttacgggtgatgggagaagtcgggaagaccactgggatccccatccatgtctttggcacagagactcacatgacggccattgtgggcatggccctgggccaccggcccatccccaaccagccacccacagcggcccacactgcaaacttcctcctcaacgccagcgggagcacatcgacgccagcccccagcaggacagcatctttttctgagtccagggccgatgaggtggcgcctgcaaagaaggccaagcctgccatgccacaaggaaagagcaccaccctcttcagccgccacaccaaggccattgtgtggggcatgcagacccgggccgtgcaaggcatgctggactttgactatgtctgctcccgagacgagccctcagtggctgccatggtctaccctttcactggggaccacaagcagaagttttactgggggcacaaagagatcctgatccctgtcttcaagaacatggctgatgccatgaggaagcatccggaggtagatgtgctcatcaactttgcctctctccgctctgcctatgacagcaccatggagaccatgaactatgcccagatccggaccatcgccatcatagctgaaggcatccctgaggccctcacgagaaagctgatcaagaaggcggaccagaagggagtgaccatcatcggacctgccactgttggaggcatcaagcctgggtgctttaagattggcaacacaggtgggatgctggacaacatcctggcctccaaactgtaccgcccaggcagcgtggcctatgtctcacgttccggaggcatgtccaacgagctcaacaatatcatctctcggaccacggatggcgtctatgagggcgtggccattggtggggacaggtacccgggctccacattcatggatcatgtgttacgctatcaggacactccaggagtcaaaatgattgtggttcttggagagattgggggcactgaggaatataagatttgccggggcatcaaggagggccgcctcactaagcccatcgtctgctggtgcatcgggacgtgtgccaccatgttctcctctgaggtccagtttggccatgctggagcttgtgccaaccaggcttctgaaactgcagtagccaagaaccaggctttgaaggaagcaggagtgtttgtgccccggagctttgatgagcttggagagatcatccagtctgtatacgaagatctcgtggccaatggagtcattgtacctgcccaggaggtgccgcccccaaccgtgcccatggactactcctgggccagggagcttggtttgatccgcaaacctgcctcgttcatgaccagcatctgcgatgagcgaggacaggagctcatctacgcgggcatgcccatcactgaggtcttcaaggaagagatgggcattggcggggtcctcggcctcctctggttccagaaaaggttgcctaagtactcttgccagttcattgagatgtgtctgatggtgacagctgatcacgggccagccgtctctggagcccacaacaccatcatttgtgcgcgagctgggaaagacctggtctccagcctcacctcggggctgctcaccatcggggatcggtttgggggtgccttggatgcagcagccaagatgttcagtaaagcctttgacagtggcattatccccatggagtttgtgaacaagatgaagaaggaagggaagctgatcatgggcattggtcaccgagtgaagtcgataaacaacccagacatgcgagtgcagatcctcaaagattacgtcaggcagcacttccctgccactcctctgctcgattatgcactggaagtagagaagattaccacctcgaagaagccaaatcttatcctgaatgtagatggtctcatcggagtcgcatttgtagacatgcttagaaactgtgggtcctttactcgggaggaagctgatgaatatattgacattggagccctcaatggcatctttgtgctgggaaggagtatggggttcattggacactatcttgatcagaagaggctgaagcaggggctgtatcgtcatccgtgggatgatatttcatatgttcttccggaacacatgagcatgtaacagagccaggaaccctactgcagtaaactgaagacaagatctcttcccccaagaaaaagtgtacagacagctggcagtggagcctgctttatttagcaggggcctggaatgtaaacagccactggggtacaggcaccgaagaccaacatccacaggctaacaccccttcagtccacacaaagaagcttcatattttttttataagcatagaaataaaaaccaagccaatatttgtgactttgctctgctacctgctgtatttattatatggaagcatctaagtactgtcaggatggggtcttcctcattgtagggcgttaggatgttgctttctttttccattagttaaacatttttttctcctttggaggaagggaatgaaacatttatggcctcaagatactatacatttaaagcaccccaatgtctctctttttttttttttacttccctttcttcttccttatataacatgaagaacattgtattaatctgatttttaaagatctttttgtatgttacgtgttaagggcttgtttggtatcccactgaaatgttctgtgttgcagaccagagtctgtttatgtcagggggatggggccattgcatccttagccattgtcacaaaatatgtggagtagtaacttaatatgtaaagttgtaacatacatacatttaaaatggaaatgcagaaagctgtgaaatgtcttgtgtcttatgttctctgtatttatgcagctgatttgtctgtctgtaactgaagtgtgggtccaaggactcctaactactttgcatctgtaatccacaaagattctgggcagctgccacctcagtctcttctctgtattatcatagtctggtttaaataaactatatagtaacaaaaaaaaaaaaaaaaaaaaaaaaaaaaaaaaaaaaaaaaaaaaaaaaaaaaaaaaaaaaaaaaaaaaaaaaaaaaaaaaaaaaaaaaaaaaaaaaaaa

SEQ ID NO: 1959 - DNA, 5204 bp, Homo sapiens
ccctgggggccgggggcggggccaggctataaaccgccggttaggggccgccatcccctcagagcgtcgggatatcgggtggcggctcgggacggaggacgcgctagtgttcttctgtgtggcagttcagaatgatggatcaagctagatcagcattctctaacttgtttggtggagaaccattgtcatatacccggttcagcctggctcggcaagtagatggcgataacagtcatgtggagatgaaacttgctgtagatgaagaagaaaatgctgacaataacacaaaggccaatgtcacaaaaccaaaaaggtgtagtggaagtatctgctatgggactattgctgtgatcgtctttttcttgattggatttatgattggctacttgggctattgtaaaggggtagaaccaaaaactgagtgtgagagactggcaggaaccgagtctccagtgagggaggagccaggagaggacttccctgcagcacgtcgcttatattgggatgacctgaagagaaagttgtcggagaaactggacagcacagacttcaccggcaccatcaagctgctgaatgaaaattcatatgtccctcgtgaggctggatctcaaaaagatgaaaatcttgcgttgtatgttgaaaatcaatttcgtgaatttaaactcagcaaagtctggcgtgatcaacattttgttaagattcaggtcaaagacagcgctcaaaactcggtgatcatagttgataagaacggtagacttgtttacctggtggagaatcctgggggttatgtggcgtatagtaaggctgcaacagttactggtaaactggtccatgctaattttggtactaaaaaagattttgaggatttatacactcctgtgaatggatctatagtgattgtcagagcagggaaaatcacctttgcagaaaaggttgcaaatgctgaaagcttaaatgcaattggtgtgttgatatacatggaccagactaaatttcccattgttaacgcagaactttcattctttggacatgctcatctggggacaggtgacccttacacacctggattcccttccttcaatcacactcagtttccaccatctcggtcatcaggattgcctaatatacctgtccagacaatctccagagctgctgcagaaaagctgtttgggaatatggaaggagactgtccctctgactggaaaacagactctacatgtaggatggtaacctcagaaagcaagaatgtgaagctcactgtgagcaatgtgctgaaagagataaaaattcttaacatctttggagttattaaaggctttgtagaaccagatcactatgttgtagttggggcccagagagatgcatggggccctggagctgcaaaatccggtgtaggcacagctctcctattgaaacttgcccagatgttctcagatatggtcttaaaagatgggtttcagcccagcagaagcattatctttgccagttggagtgctggagactttggatcggttggtgccactgaatggctagagggatacctttcgtccctgcatttaaaggctttcacttatattaatctggataaagcggttcttggtaccagcaacttcaaggtttctgccagcccactgttgtatacgcttattgagaaaacaatgcaaaatatggagtcttcctctgtcttcctccagcactcaggctggagtgcaatggtgcgatcttggctcactgcagcctccacctcctgggttcaagcgattctcctgcctcagcctcctgaggagctgggactacaggtgaagcatccggttactgggcaatttctatatcaggacagcaactgggccagcaaagttgagaaactcactttagacaatgctgctttccctttccttgcatattctggaatcccagcagtttctttctgtttttgcgaggacacagattatccttatttgggtaccaccatggacacctataaggaactgattgagaggattcctgagttgaacaaagtggcacgagcagctgcagaggtcgctggtcagttcgtgattaaactaacccatgatgttgaattgaacctggactatgagaggtacaacagccaactgctttcatttgtgagggatctgaaccaatacagagcagacataaaggaaatgggcctgagtttacagtggctgtattctgctcgtggagacttcttccgtgctacttccagactaacaacagatttcgggaatgctgagaaaacagacagatttgtcatgaagaaactcaatgatcgtgtcatgagagtggagtatcacttcctctctccctacgtatctccaaaagagtctcctttccgacatgtcttctggggctccggctctcacacgctgccagctttactggagaacttgaaactgcgtaaacaaaataacggtgcttttaatgaaacgctgttcagaaaccagttggctctagctacttggactattcagggagctgcaaatgccctctctggtgacgtttgggacattgacaatgagttttaaatgtgatacccatagcttccatgagaacagcagggtagtctggtttctagacttgtgctgatcgtgctaaattttcagtagggctacaaaacctgatgttaaaattccatcccatcatcttggtactactagatgtctttaggcagcagcttttaatacagggtagataacctgtacttcaagttaaagtgaataaccacttaaaaaatgtccatgatggaatattcccctatctctagaattttaagtgctttgtaatgggaactgcctctttcctgttgttgttaatgaaaatgtcagaaaccagttatgtgaatgatctctctgaatcctaagggctggtctctgctgaaggttgtaagtggtcgcttactttgagtgatcctccaacttcatttgatgctaaataggagataccaggttgaaagaccttctccaaatgagatctaagcctttccataaggaatgtagctggtttcctcattcctgaaagaaacagttaactttcagaagagatgggcttgttttcttgccaatgaggtctgaaatggaggtccttctgctggataaaatgaggttcaactgttgattgcaggaataaggccttaatatgttaacctcagtgtcatttatgaaaagaggggaccagaagccaaagacttagtatattttcttttcctctgtcccttcccccataagcctccatttagttctttgttatttttgtttcttccaaagcacattgaaagagaaccagtttcaggtgtttagttgcagactcagtttgtcagactttaaagaataatatgctgccaaattttggccaaagtgttaatcttaggggagagctttctgtccttttggcactgagatatttattgtttatttatcagtgacagagttcactataaatggtgtttttttaatagaatataattatcggaagcagtgccttccataattatgacagttatactgtcggttttttttaaataaaagcagcatctgctaataaaacccaacagatactggaagttttgcatttatggtcaacacttaagggttttagaaaacagccgtcagccaaatgtaattgaataaagttgaagctaagatttagagatgaattaaatttaattaggggttgctaagaagcgagcactgaccagataagaatgctggttttcctaaatgcagtgaattgtgaccaagttataaatcaatgtcacttaaaggctgtggtagtactcctgcaaaattttatagctcagtttatccaaggtgtaactctaattcccattttgcaaaatttccagtacctttgtcacaatcctaacacattatcgggagcagtgtcttccataatgtataaagaacaaggtagtttttacctaccacagtgtctgtatcggagacagtgatctccatatgttacactaagggtgtaagtaattatcgggaacagtgtttcccataattttcttcatgcaatgacatcttcaaagcttgaagatcgttagtatctaacatgtatcccaactcctataattccctatcttttagttttagttgcagaaacattttgtggtcattaagcattgggtgggtaaattcaaccactgtaaaatgaaattactacaaaatttgaaatttagcttgggtttttgttacctttatggtttctccaggtcctctacttaatgagatagtagcatacatttataatgtttgctattgacaagtcattttaactttatcacattatttgcatgttacctcctataaacttagtgcggacaagttttaatccagaattgaccttttgacttaaagcagagggactttgtatagaaggtttgggggctgtggggaaggagagtcccctgaaggtctgacacgtctgcctacccattcgtggtgatcaattaaatgtaggtatgaataagttcgaagctccgtgagtgaaccatcattataaacgtgatgatcagctgtttgtcatagggcagttggaaacggcctcctagggaaaagttcatagggtctcttcaggttcttagtgtcacttacctagatttacagcctcacttgaatgtgtcactactcacagtctctttaatcttcagttttatctttaatctcctcttttatcttggactgacatttagcgtagctaagtgaaaaggtcatagctgagattcctggttcgggtgttacgcacacgtacttaaatgaaagcatgtggcatgttcatcgtataacacaatatgaatacagggcatgcattttgcagcagtgagtctcttcagaaaacccttttctacagttagggttgagttacttcctatcaagccagtacgtgctaacaggctcaatattcctgaatgaaatatcagactagtgacaagctcctggtcttgagatgtcttctcgttaaggagatgggccttttggaggtaaaggataaaatgaatgagttctgtcatgattcactattctagaacttgcatgacctttactgtgttagctctttgaatgttcttgaaattttagactttctttgtaaacaaatgatatgtccttatcattgtataaaagctgttatgtgcaacagtgtggagattccttgtctgatttaataaaatacttaaacactga

SEQ ID NO: 1960 - DNA, 32 bp, Homo sapiens
gatccttcttaatctaattaccctaggtctaa

SEQ ID NO: 1961 - DNA, 5397 bp, Homo sapiens
cagtgcgcccatcgcgcggctcctcggggcacctgctgccttggcgccttttcccttggccttcgcctcgcccgcagcgccctccgcatagggccccgcccgctgcgcgcgcatccccgccccccgggcgatctgtcagagcacctcgcgagcgtacgtgcctcaggaagtgacgcacagcccccctgggggccgggggcggggccaggctataaaccgccggttaggggccgccatcccctcagagcgtcgggatatcgggtggcggctcgggacggaggacgcgctagtgtgagtgcgggcttctagaactacaccgaccctcgtgtcctcccttcatcctgcggggctggctggagcggccgctccggtgctgtccagcagccatagggagccgcacggggagcgggaaagcggtcgcggccccaggcggggcggccgggatggagcggggccgcgagcctgtggggaaggggctgtggcggcgcctcgagcggctgcaggttcttctgtgtggcagttcagaatgatggatcaagctagatcagcattctctaacttgtttggtggagaaccattgtcatatacccggttcagcctggctcggcaagtagatggcgataacagtcatgtggagatgaaacttgctgtagatgaagaagaaaatgctgacaataacacaaaggccaatgtcacaaaaccaaaaaggtgtagtggaagtatctgctatgggactattgctgtgatcgtctttttcttgattggatttatgattggctacttgggctattgtaaaggggtagaaccaaaaactgagtgtgagagactggcaggaaccgagtctccagtgagggaggagccaggagaggacttccctgcagcacgtcgcttatattgggatgacctgaagagaaagttgtcggagaaactggacagcacagacttcaccggcaccatcaagctgctgaatgaaaattcatatgtccctcgtgaggctggatctcaaaaagatgaaaatcttgcgttgtatgttgaaaatcaatttcgtgaatttaaactcagcaaagtctggcgtgatcaacattttgttaagattcaggtcaaagacagcgctcaaaactcggtgatcatagttgataagaacggtagacttgtttacctggtggagaatcctgggggttatgtggcgtatagtaaggctgcaacagttactggtaaactggtccatgctaattttggtactaaaaaagattttgaggatttatacactcctgtgaatggatctatagtgattgtcagagcagggaaaatcacctttgcagaaaaggttgcaaatgctgaaagcttaaatgcaattggtgtgttgatatacatggaccagactaaatttcccattgttaacgcagaactttcattctttggacatgctcatctggggacaggtgacccttacacacctggattcccttccttcaatcacactcagtttccaccatctcggtcatcaggattgcctaatatacctgtccagacaatctccagagctgctgcagaaaagctgtttgggaatatggaaggagactgtccctctgactggaaaacagactctacatgtaggatggtaacctcagaaagcaagaatgtgaagctcactgtgagcaatgtgctgaaagagataaaaattcttaacatctttggagttattaaaggctttgtagaaccagatcactatgttgtagttggggcccagagagatgcatggggccctggagctgcaaaatccggtgtaggcacagctctcctattgaaacttgcccagatgttctcagatatggtcttaaaagatgggtttcagcccagcagaagcattatctttgccagttggagtgctggagactttggatcggttggtgccactgaatggctagagggatacctttcgtccctgcatttaaaggctttcacttatattaatctggataaagcggttcttggtaccagcaacttcaaggtttctgccagcccactgttgtatacgcttattgagaaaacaatgcaaaatgtgaagcatccggttactgggcaatttctatatcaggacagcaactgggccagcaaagttgagaaactcactttagacaatgctgctttccctttccttgcatattctggaatcccagcagtttctttctgtttttgcgaggacacagattatccttatttgggtaccaccatggacacctataaggaactgattgagaggattcctgagttgaacaaagtggcacgagcagctgcagaggtcgctggtcagttcgtgattaaactaacccatgatgttgaattgaacctggactatgagaggtacaacagccaactgctttcatttgtgagggatctgaaccaatacagagcagacataaaggaaatgggcctgagtttacagtggctgtattctgctcgtggagacttcttccgtgctacttccagactaacaacagatttcgggaatgctgagaaaacagacagatttgtcatgaagaaactcaatgatcgtgtcatgagagtggagtatcacttcctctctccctacgtatctccaaaagagtctcctttccgacatgtcttctggggctccggctctcacacgctgccagctttactggagaacttgaaactgcgtaaacaaaataacggtgcttttaatgaaacgctgttcagaaaccagttggctctagctacttggactattcagggagctgcaaatgccctctctggtgacgtttgggacattgacaatgagttttaaatgtgatacccatagcttccatgagaacagcagggtagtctggtttctagacttgtgctgatcgtgctaaattttcagtagggctacaaaacctgatgttaaaattccatcccatcatcttggtactactagatgtctttaggcagcagcttttaatacagggtagataacctgtacttcaagttaaagtgaataaccacttaaaaaatgtccatgatggaatattcccctatctctagaattttaagtgctttgtaatgggaactgcctctttcctgttgttgttaatgaaaatgtcagaaaccagttatgtgaatgatctctctgaatcctaagggctggtctctgctgaaggttgtaagtggtcgcttactttgagtgatcctccaacttcatttgatgctaaataggagataccaggttgaaagaccttctccaaatgagatctaagcctttccataaggaatgtagctggtttcctcattcctgaaagaaacagttaactttcagaagagatgggcttgttttcttgccaatgaggtctgaaatggaggtccttctgctggataaaatgaggttcaactgttgattgcaggaataaggccttaatatgttaacctcagtgtcatttatgaaaagaggggaccagaagccaaagacttagtatattttcttttcctctgtcccttcccccataagcctccatttagttctttgttatttttgtttcttccaaagcacattgaaagagaaccagtttcaggtgtttagttgcagactcagtttgtcagactttaaagaataatatgctgccaaattttggccaaagtgttaatcttaggggagagctttctgtccttttggcactgagatatttattgtttatttatcagtgacagagttcactataaatggtgtttttttaatagaatataattatcggaagcagtgccttccataattatgacagttatactgtcggttttttttaaataaaagcagcatctgctaataaaacccaacagatactggaagttttgcatttatggtcaacacttaagggttttagaaaacagccgtcagccaaatgtaattgaataaagttgaagctaagatttagagatgaattaaatttaattaggggttgctaagaagcgagcactgaccagataagaatgctggttttcctaaatgcagtgaattgtgaccaagttataaatcaatgtcacttaaaggctgtggtagtactcctgcaaaattttatagctcagtttatccaaggtgtaactctaattcccattttgcaaaatttccagtacctttgtcacaatcctaacacattatcgggagcagtgtcttccataatgtataaagaacaaggtagtttttacctaccacagtgtctgtatcggagacagtgatctccatattttcttcatgcaatgacatcttcaaagcttgaagatcgttagtatctaacatgtatcccaactcctataattccctatcttttagttttagttgcagaaacattttgtggtcattaagcatgtaaaatgaaattactacaaaatttgaaatttagcttgggtttttgttacctttatggtttctccaggtcctctacttaatgagatagtagcatacatttataatgtttgctattgacaagtcattttaactttatcacattatttgcatgttacctcctataaacttagtgcggacaagttttaatccagaattgaccttttgacttaaagcagagggactttgtatagaaggtttgggggctgtggggaaggagagtcccctgaaggtctgacacgtctgcctacccattcgtggtgatcaattaaatgtaggtatgaataagttcgaagctccgtgagtgaaccatcattataaacgtgatgatcagctgtttgtcatagggcagttggaaacggcctcctagggaaaagttcatagggtctcttcaggttcttagtgtcacttacctagatttacagcctcacttgaatgtgtcactactcacagtctctttaatcttcagttttatctttaatctcctcttttatcttggactgacatttagcgtagctaagtgaaaaggtcatagctgagattcctggttcgggtgttacgcacacgtacttaaatgaaagcatgtggcatgttcatcgtataacacaatatgaatacagggcatgcattttgcagcagtgagtctcttcagaaaacccttttctacagttagggttgagttacttcctatcaagccagtacgtgctaacaggctcaatattcctgaatgaaatatcagactagtgacaagctcctggtcttgagatgtcttctcgttaaggagatgggccttttggaggtaaaggataaaatgaatgagttctgtcatgattcactattctagaacttgcatgacctttactgtgttagctctttgaatgttcttgaaattttagactttctttgtaaacaaatgatatgtccttatcattgtataaaagctgttatgtgcaacagtgtggagattccttgtctgatttaataaaatacttaaacactga

SEQ ID NO: 1962 - DNA, 5397 bp, Homo sapiens; identical to SEQ ID NO: 1961

SEQ ID NO: 1963 - DNA, 5397 bp, Homo sapiens; identical to SEQ ID NO: 1961

SEQ ID NO: 1964 - DNA, 5324 bp, Homo sapiens
ccgcgcgctctcgccccgggagggagtcacaggttcgtacacgcgaggccgggcgcgcgcagccggcaggcgggtgaagtcttcccaggtgctgcaggcggtgctgaggcacagggtctgctgcaggagcagcggcccgaacccgctccagcggcccgccgccgccagcggttcccgcgtcgcgtgtgtacccccgcgcactgaaggaggtccgccagccctcaccagcccccgcggaccgtgcaatggcccagcgtaagaatgccaagagcagcggcaacagcagcagcagcggctccggcagcggtagcacgagtgcgggcagcagcagccccggggcccggagagagacaaagcatggaggacacaagaatgggaggaaaggcggactctcaggaacttcattcttcacgtggtttatggtgattgcattgctgggcgtctggacatctgtagctgtcgtttggtttgatcttgttgactatgaggaagttctaggaaaactaggaatctatgatgctgatggtgatggagattttgatgtggatgatgccaaagttttattaggacttaaagagagatctacttcagagccagcagtcccgccagaagaggctgagccacacactgagcccgaggagcaggttcctgtggaggcagaaccccagaatatcgaagatgaagcaaaagaacaaattcagtcccttctccatgaaatggtacacgcagaacatgttgagggagaagacttgcaacaagaagatggacccacaggagaaccacaacaagaggatgatgagtttcttatggcgactgatgtagatgatagatttgagaccctggaacctgaagtatctcatgaagaaaccgagcatagttaccacgtggaagagacagtttcacaagactgtaatcaggatatggaagagatgatgtctgagcaggaaaatccagattccagtgaaccagtagtagaagatgaaagattgcaccatgatacagatgatgtaacataccaagtctatgaggaacaagcagtatatgaacctctagaaaatgaagggatagaaatcacagaagtaactgctccccctgaggataatcctgtagaagattcacaggtaattgtagaagaagtaagcatttttcctgtggaagaacagcaggaagtaccaccagaaacaaatagaaaaacagatgatccagaacaaaaagcaaaagttaagaaaaagaagcctaaacttttaaataaatttgataagactattaaagctgaacttgatgctgcagaaaaactccgtaaaaggggaaaaattgaggaagcagtgaatgcatttaaagaactagtacgcaaataccctcagagtccacgagcaagatatgggaaggcgcagtgtgaggatgatttggctgagaagaggagaagtaatgaggtgctacgtggagccatcgagacctaccaagaggtggccagcctacctgatgtccctgcagacctgctgaagctgagtttgaagcgtcgctcagacaggcaacaatttctaggtcatatgagaggttccctgcttaccctgcagagattagttcaactatttcccaatgatacttccttaaaaaatgaccttggcgtgggatacctcttgataggagataatgacaatgcaaagaaagtttatgaagaggtgctgagtgtgacacctaatgatggctttgctaaagtccattatggcttcatcctgaaggcacagaacaaaattgctgagagcatcccatatttaaaggaaggaatagaatccggagatcctggcactgatgatgggagattttatttccacctgggggatgccatgcagagggttgggaacaaagaggcatataagtggtatgagcttgggcacaagagaggacactttgcatctgtctggcaacgctcactctacaatgtgaatggactgaaagcacagccttggtggaccccaaaagaaacgggctacacagagttagtaaagtctttagaaagaaactggaagttaatccgagatgaaggccttgcagtgatggataaagccaaaggtctcttcctgcctgaggatgaaaacctgagggaaaaaggggactggagccagttcacgctgtggcagcaaggaagaagaaatgaaaatgcctgcaaaggagctcctaaaacctgtaccttactagaaaagttccccgagacaacaggatgcagaagaggacagatcaaatattccatcatgcaccccgggactcacgtgtggccgcacacagggcccacaaactgcaggctccgaatgcacctgggcttggtgattcccaaggaaggctgcaagattcgatgtgccaacgagaccaagacctgggaggaaggcaaggtgctcatctttgatgactcctttgagcacgaggtatggcaggatgcctcatctttccggctgatattcatcgtggatgtgtggcatccggaactgacaccacagcagagacgcagccttccagcaatttagcatgaattcatgcaagcttgggaaactctggagagaggctgcctttctggttccatctccttgggtgtgaggatagaatttcgaacaccaagagtcaattcccttgacttgcagcccgagtaattcaaagcctcctcctagggtcagaagacactaaagggaatatttgcctcgctgcaattcatttaggaaacaccctgctgtgtgtcatctcatgacagcactggtcttctgccagtatttaaggtgaacatttgatagcttctaccttaccagccaaagatattttttccacatagaataggtctaattcaatgtataatgagaacatatgtagaaactgtgaatggattgctttagtttgtaatttttctatgcagttatatttttctagtgtagctagactattttgtcatcatgtaccactacatttttgtttattttaatgacaagctgtataaatgctttacttctagctatttaatggtagcattactggggaactcagacttccctcttttaattcttcttagtaaaagatactcatgaaaaaagcagttttattttcctaacaaaaaagaaagagctcattatgtcagtgtctatgaactgtacccatcccaactctcaaatcgtttggttttttttatcttgattgagatcctcttctcactatgctagtggtggagatattgacaaaatcctatttctttcaaagaggaacttttcacaccgaaaaaagagcatggaattattttatattgttataaaaatcccagatgcaaatttttttaatgccaattattagagcttctggggaaaaagtatagttcacggaaataaaactatgttctttcagggttgggtggataggtggctgctagggtgtctggctcctggcggctttgccatccatgaggcaagggctgggaacacagtgtctttgcctatggtagatccatgtgaatgtcaggaagccagctcttcagtcttggagatgatttctgctacaattctgtagaaagattaaggatggcagagtaaaaggttaccaagaatgccaggatgtttttcttgggcgtaggaggtccagattactttcctttttgatgaaagagtttggaagactgtcccatctctctggcttgagaaatctctgccattttaaacatcactgtgaaatagcaattattatcatctgtatttagttttaacattacccacaacatagaaataataggtaaaaatcgtcttgcctactcattccaaagatgatcaagtcattaatctagcaaagtattcatgtatcagattttgtatattttgaatcaaagctaactaggaatgttagatataagaatgtaatgatattcatgcactgaattctaagccaatatgaacaaaaatgctgcatgaatggcacatataggtcaccaaagttcattcacaggtagaaaaaacttgtgctttcttttccatctaaaaacaaaaggagactttctttatctcatttaaagaacagctctttgaaattgaaattgaccctttttgcttgaccttaaggagattagcttccagtagatgagtttgcaaaatacttttcctgttcttttgttttgctggtattgaaaacatcccactaaatcagatgaagaggcatgggaggaaaaatatccaaattaattactaaaatcgagaagagaaggcaaactcttgaaaagtaaaaaggtgtttgtgaccttcagtatttattgaacagaggaaataactgacaagggcaatacaattcaatgttcatgtagtaacattcatgtcacttgttgaatttggttctcatatgtatattgcatacacataaattcaaactataagtcgtcatttttgagccatcatcttacattcatgtaatgaaattatggaagagagtaaaaactagctcttaacttagtaaatataatatggtatttaaaatcaggtcactacagtaaggttctaagtattgccaattgaaaagctagaaatggtattactgttgcaaagtgttgtcaataattgactccaatagcattgtaaatacttgtatcccacaactattttaaacccaagcaataaaatggattttctaattcacttcaattctttatttctcttacctatctatgtcttggtacataagaaaagtgtttccatcactgcattggtagaattatttcagtgttattatttttgtgatttcgtatgtctacacaaaaatgaattagtttaatttatattgtgatacagttgtttgagaaatatttttaattctgtttcaactttatttctccaagtgtataatataaaaattacttctgttattgttctctaccaataggggaaaaaattaaaacattagatccattgagaaagagatgatgtaataaataattaagattagtaataatattatcaggggtgattatgaccagttgaataatctctttcccttgaattatttagctaacaaattaactctcccaaatatttaaaataatgtaaaatcatattttactgcccattattaactaaaatatttttgtttgactttgagcaccaactggtaatactaataaatacccatgtcatgcagatggctgggcgaataagagatgtctaaaaatatgcactggtcttggaaaacatggcacaagtaaggatatcatatatgatgtctgtttattttatgtctgatttcttttgaatgagtagttggggactccatttctaaggagactaggtaaataaaatgacctttgacatttc

SEQ ID NO: 1965 - DNA, 2281 bp, Homo sapiens
ggggctgaggcgcgatggcaggtgtcggggctgggcctctgcgggcgatggggcggcaggccctgctgcttctcgcgctgtgcgccacaggcgcccaggggctctacttccacatcggcgagaccgagaagcgctgtttcatcgaggaaatccccgacgagaccatggtcatcggcaactatcgtacccagatgtgggataagcagaaggaggtcttcctgccctcgacccctggcctgggcatgcacgtggaagtgaaggaccccgacggcaaggtggtgctgtcccggcagtacggctcggagggccgcttcacgttcacctcccacacgcccggtgaccatcaaatctgtctgcactccaattctaccaggatggctctcttcgctggtggcaaactgcgtgtgcatctcgacatccaggttggggagcatgccaacaactaccctgagattgctgcaaaagataagctgacggagctacagctccgcgcccgccagttgcttgatcaggtggaacagattcagaaggagcaggattaccaaaggtatcgtgaagagcgcttccgactgacgagcgagagcaccaaccagagggtcctatggtggtccattgctcagactgtcatcctcatcctcactggcatctggcagatgcgtcacctcaagagcttctttgaggccaagaagctggtgtagtgccctctttgtatgacccttcctttttacctcatttatttggtactttccccacacagtcctttatccacctggatttttagggaaaaaaatgaaaaagaataagtcacattggttccatggccacaaaccattcagatcagccacttgctgaccctggttcttaaggacacatgacattagtccaatctttcaaaatcttgtcttagggcttgtgaggaatcagaactaacccaggactcagtcctgcttcttttgcctcgagtgattttcctctgtttttcactaaataagcaaatgaaaactctctccattaccttctgctttctctttgtccacttacgcagtaggtgactggcatgtgccacagagcaggccctgcctcactgtctgctggtcagttctgggttcacttaatggctttgtgaatgtaaataaggggcaggtcttggccctagaggattgagatgtttttctatatcttagaactatttttggataaattatatattttccttcctagtagaagtgttactgcctgtaactagctcaaaataccaatgcagtttctgcattctgggttttgtttttcctttttttttttttttttttttttttgagttttgctctcgtcgcccaggctggagtgcaatggcgtgatctcagctcactggcaacatctgcctcccgggttcaaatgattctcctgcctcagtctcctgagtagctgggattacaggtgcccgccaccacgctcagctaatttttgtatttttagtagagatggggttttaccatgttggccaggctggtcttagactcctgacctcagttgatccacctgcctcagcctctgcattcagtttattcacatatttttggtaactcccatggcagctcctaggatttcagcggtctgtgggccagaaagcaggcaccagggctgacctcaaggccgtatcagagggccaagcagagttcttttggatacctgcttttcatcccacagggccttagagtcagaggtaaggtagcaacagagctagaatggggcaatgcactcttaccctccttctcaacttttatttaagctgtgctaaatgttttcttcaagggaaccagatttagttctttacagaattttccagtgaaataaaacatgttgtaatagctgtgtttgagatgaaataagaggttgtgggtagaggggaggcacctaaaggaaaagaggaaaggtgcctgggctacctatgcagataacctggagtggacttcactgtggactcgtggtactaaggcttggcctggacaggcagtctagggggtatgggaatacacggtgtggttgttcaactatttgcaaaggtcaaccaaatagaccacatgttcgcaaagtatcatctgaggaaattaagtaccttcttagccctctcagtcataaatttgaacaaattttaatacacttccctcatgcccttctatataaaacttaataccattagttccccattcttgacattttatttcagtttttattatatatttatttgaaatatttattaaattatctgacctacagaact

SEQ ID NO: 1966 - DNA, 1048 bp, Homo sapiens
ggcgcttaggggctgaggcgcgatggcaggtgtcggggctgggcctctgcgggcgatggggcggcaggccctgctgcttctcgcgctgtgcgccacaggcgcccaggggctctacttccacatcggcgagaccgagaagcgctgtttcatcgaggaaatccccgacgagaccatggtcatcggcaactatcgtacccagatgtgggataagcagaaggaggtcttcctgccctcgacccctggcctgggcatgcacgtggaagtgaaggaccccgacggcaaggtggtgctgtcccggcagtacggctcggagggccgcttcacgttcacctcccacacgcccggtgaccatcaaatctgtctgcactccaattctaccaggatggctctcttcgctggtggcaaactgcgtgtgcatctcgacatccaggttggggagcatgccaacaactaccctgagattgctgcaaaagataagctgacggagctacagctccgcgcccgccagttgcttgatcaggtggaacagattcagaaggagcaggattaccaaaggtatcgtgaagagcgcttccgactgacgagcgagagcaccaaccagagggtcctatggtggtccattgctcagactgtcatcctcatcctcactggcatctggcagatgcgtcacctcaagagcttctttgaggccaagaagctggtgtagtgccctctttgtatgacccttcctttttacctcatttatttggtactttccccacacagtcctttatccgcctggatttttagggaaaaaaatgaaaaagaataagtcacattggttccatggccacaaaccattcagatcagccacttgctgaccctggttcttaaggacacatgacattagtccaatctttcaaaatcttgtcttagggcttgtgaggaatcagaactaacccaggactcagtcctgcttcttttgcctcgagtgattttcctctgtttttcactaaataagcaaatgaaaactctctccattaaaaaaaaaaaaaaaaaaaaaaaaaaa

SEQ ID NO: 1967 - DNA, 664 bp, Homo sapiens
aggcgcgatggcaggtgtcggggctgggcctctgcgggcgatggggcggcaggccctgctgcttctcgcgctgtgcgccacaggcgcccaggggctctacttccacatcggcgagaccgagaagcgctgtttcatcgaggaaatccccgacgagaccatggtcatcggcaactatcgtacccagatgtgggataagcagaaggaggtcttcctgccctcgacccctggcctgggcatgcacgtggaagtgaaggaccccgacggcaaggtggtgctgtcccggcagtacggctcggagggccgcttcacgttcacctcccacacgcccggtgaccatcaaatctgtctgcactccaattctaccaggatggctctcttcgctggtggcaaactgcgtgtgcatctcgacatccaggttggggagcatgccaacaactaccctgagattgctgcaaaagataagctgacggagctacagctccgcgcccgccagttgcttgatcaggtggaacagattcagaaggagcaggattaccaaagggcaagtgcatatctccttgtaatttgagagggcagttgacctttatacccactatacctactcaagtttctgcttgggagatcagctctgcagagaatggaatgagaagtattggtttagata

SEQ ID NO: 1968 - DNA, 1515 bp, Homo sapiens; identical to SEQ ID NO: 1839

SEQ ID NO: 1969 - DNA, 1389 bp, Homo sapiens
gggggactgggagcgggcggcgcggccatggcgggctgctgctccgcgctggcggccttcctgttcgagtacgacacgccgcgcatcgtgctcatccgcagccgcaaagtggggctcatgaaccgcgccgtgcaactgctcatcctggcctacgtcatcgggtgggtgtttgtgtgggaaaagggctaccaggaaactgactccgtggtcagctccgttacgaccaaggtcaagggcgtggctgtgaccaacacttctaaacttggattccggatctgggatgtggcggattatgtgataccagctcaggaggaaaactccctcttcgtcatgaccaacgtgatcctcaccatgaaccagacacagggcctgtgccccgagattccagatgcgaccactgtgtgtaaatcagatgccagctgtactgccggctctgccggcacccacagcaacggagtctcaacaggcaggtgcgtagctttcaacgggtccgtcaagacgtgtgaggtggcggcctggtgcccggtggaggatgacacacacgtgccacaacctgcttttttaaaggctgcagaaaacttcactcttttggttaagaacaacatctggtatcccaaatttaatttcagcaagaggaatatccttcccaacatcaccactacttacctcaagtcgtgcatttatgatgctaaaacagatcccttctgccccatattccgtcttggcaaaatagtggagaacgcaggacacagtttccaggacatggccgtggagggaggcatcatgggcatccaggtcaactgggactgcaacctggacagagccgcctccctctgcttgcccaggtactccttccgccgcctcgatacacgggacgttgagcacaacgtatctcctggctacaatttcaggtttgccaagtactacagagacctggctggcaacgagcagcgcacgctcatcaaggcctatggcatccgcttcgacatcattgtgtttgggaaggcagggaaatttgacatcatccccactatgatcaacatcggctctggcctggcactgctaggcatggcgaccgtgctgtgtgacatcatagtcctctactgcatgaagaaaagactctactatcgggagaagaaatataaatatgtggaagattacgagcagggtcttgctagtgagctggaccagtgaggcctaccccacacctgggctctccacagccccatcaaagaacagagaggaggaggagggagaaatggccaccacatcaccccagagaaatttctggaatctgattgagtctccactccacaagcactcagggttccccagcagctcctgtgtgttgtgtgcaggatctgtttgcccactcggcccaggaggtca

SEQ ID NO: 1970 - DNA, 1922 bp, Homo sapiens
cccctagagggtcatcgttcccgacggggaggtggcgccctcccccgggccccgggccccgaccgcccgtgctgcctccttccgggccctcctccgcgatgacggcgccgccagcaggccaggcggactgggcggggctccgagcggggactgggacccagaccgactaggggactgggagcgggcggcgcggccatggcgggctgctgcgccgcgctggcggccttcctgttcgagtacgacacgccgcgcatcgtgctcatccgcagccgcaaagtggggctcatgaaccgcgccgtgcaactgctcatcctggcctacgtcatcgggtgggtgtttgtgtgggaaaagggctaccaggaaactgactccgtggtcagctccgttacgaccaaggtcaagggcgtggctgtgaccaacacttctaaacttggattccggatctgggatgtggcggattatgtgataccagctcaggaggaaaactccctcttcgtcatgaccaacgtgatcctcaccatgaaccagacacagggcctgtgccccgagattccagatgcgaccactgtgtgtaaatcagatgccagctgtactgccggctctgccggcacccacagcaacggagtctcaacaggcaggtgcgtagctttcaacgggtctgtcaagacgtgtgaggtggcggcctggtgcccggtggaggatgacacacacgtgccacaacctgcttttttaaaggctgcagaaaacttcactcttttggttaagaacaacatctggtatcccaaatttaatttcagcaagaggaatatccttcccaacatcaccactacttacctcaagtcgtgcatttatgatgctaaaacagatcccttctgccccatattccgtcttggcaaaatagtggagaacgcaggacacagtttccaggacatggccgtggagggaggcatcatgggcatccaggtcaactgggactgcaacctggacagagccgcctccctctgcttgcccaggtactccttccgccgcctcgatacacgggacgttgagcacaacgtatctcctggctacaatttcaggtttgccaagtactacagagacctggctggcaacgagcagcgcacgctcatcaaggcctatggcatccgcttcgacatcattgtgtttgggaaggcagggaaatttgacatcatccccactatgatcaacatcggctctggcctggcactgctaggcatggcgaccgtgctgtgtgacatcatagtcctctactgcatgaagaaaagactctactatcgggagaagaaatataaatatgtggaagattacgagcagggtcttgctagtgagctggaccagtgaggcctaccccacacctgggctctccacagccccatcaaagaacagagaggaggaggagggagaaatggccaccacatcaccccagagaaatttctggaatctgattgagtctccactccacaagcactcagggttccccagcagctcctgtgtgttgtgtgcaggatctgtttgcccactcggcccaggaggtcagcagtctgttcttggctgggtcaactctgcttttcccgcaacctggggttgtcgggggagcgctggcccgacgcagtggcactgctgtggctttcagggctggagctggctttgctcagaagcctcctgtctccagctctctccaggacaggcccagtcctctgaggcacggcggctctgttcaagcactttatgcggcaggggaggccgcctggctgcagtcactagacttgtagcaggcctgggctgcaggcttccccccgaccattccctgcagccatgcggcagagctggcatttctcctcagagaagcgctgtgctaaggtgatcgaggaccagacattaaagcgtgattttcttaatcc

SEQ ID NO: 1971 - DNA, 1653 bp, Homo sapiens
ggggactgggagcgggcggcgcggccatggcgggctgctgcgccgcgctggcggccttcctgttcgagtacgacacgccgcgcatcgtgctcatccgcagccgcaaagtggggctcatgaaccgcgccgtgcaactgctcatcctggcctacgtcatcgggtgctaccatccccatttggcagaagtggaaatggagtcccctagaaggaggaaaactccctcttcgtcatgaccaacgtgatcctcaccatgaaccagacacagggcctgtgccccgagattccagatgcgaccactgtgtgtaaatcagatgccagctgtactgccggctctgccggcacccacagcaacggagtctcaacaggcaggtgcgtagctttcaacgggtctgtcaagacgtgtgaggtggcggcctggtgcccggtggaggatgacacacacgtgccacaacctgcttttttaaaggctgcagaaaacttcactcttttggttaagaacaacatctggtatcccaaatttaatttcagcaagaggaatatccttcccaacatcaccactacttacctcaagtcgtgcatttatgatgctaaaacagatcccttctgccccatattccgtcttggcaaaatagtggagaacgcaggacacagtttccaggacatggccgtggagggaggcatcatgggcatccaggtcaactgggactgcaacctggacagagccgcctccctctgcttgcccaggtactccttccgccgcctcgatacacgggacgttgagcacaacgtatctcctggctacaatttcaggtttgccaagtactacagagacctggctggcaacgagcagcgcacgctcatcaaggcctatggcatccgcttcgacatcattgtgtttgggaaggcagggaaatttgacatcatccccactatgatcaacatcggctctggcctggcactgctaggcatggcgaccgtgctgtgtgacatcatagtcctctactgcatgaagaaaagactctactatcgggagaagaaatataaatatgtggaagattacgagcagggtcttgctagtgagctggaccagtgaggcctaccccacacctgggctctccacagccccatcaaagaacagagaggaggaggagggagaaatggccaccacatcaccccagagaaatttctggaatctgattgagtctccactccacaagcactcagggttccccagcagctcctgtgtgttgtgtgcaggatctgtttgcccactcggcccaggaggtcagcagtctgttcttggctgggtcaactctgcttttcccgcaacctggggttgtcgggggagcgctggcccgacgcagtggcactgctgtggctttcagggctggagctggctttgctcagaagcctcctgtctccagctctctccaggacaggcccagtcctctgaggcacggcggctctgttcaagcactttatgcggcaggggaggccgcctggctgcagtcactagacttgtagcaggcctgggctgcaggcttccccccgaccattccctgcagccatgcggcagagctggcatttctcctcagagaagcgctgtgctaaggtgatcgaggaccagacattaaagcgtgattttcttaatcc

SEQ ID NO: 1972 - DNA, 1653 bp, Homo sapiens; identical to SEQ ID NO: 1971

SEQ ID NO: 1973 - DNA, 1653 bp, Homo sapiens; identical to SEQ ID NO: 1971

SEQ ID NO: 1974 - DNA, 6368 bp, Homo sapiens
ccatggacctgcgccctgagctgcccaccaccctgggccccgtcagcctgcgccagctggggctggagcacacccgctacccctgtctggaccttggtgccatgttgctctacaccctgaccttctggctcctgctgcgccagtttgtgaaagagaagctgctgaagtgggcagagtctccagctgcgctgacggaggtcaccgtggcagacacagagcctacgcggacgcagacgctgttgcagagcctgggggagctggtgaagggcgtgtacgccaagtactggatctatgtgtgtgctggcatgttcatcgtggtcagcttcgccggccgcctcgtggtctacaagattgtctacatgttcctcttcctgctctgcctcaccctcttccaggtctactacagcctgtggcggaagctgctcaaggccttctggtggctcgtggtggcctacaccatgctggtcctcatcgccgtctacaccttccagttccaggacttccctgcctactggcgcaacctcactggcttcaccgacgagcagctgggggacctgggcctggagcagttcagcgtatccgagctcttctccagcatcctggtgcccggcttcttcctcctggcctgcatcctgcagctgcactacttccacaggcccttcatgcagctcaccgacatggagcacgtgtccctgcctggcacgcgcctcccgcgctgggctcacaggcaggatgcagtgagtgggaccccactgctgcgggaggagcagcaggagcatcagcagcagcagcaggaggaggaggaggaggaggactccagggacgaggggctgggcgtggccactccccaccaggccacgcaggtgcctgaaggggcagccaagtggggcctggtggctgagcgcctgctggagctggcagccggcttctcggacgtcctctcacgcgtgcaggtgttcctgcggcggctgctggagcttcacgttttcaagctggtggccctgtacaccgtctgggtggccctgaaggaggtgtcggtgatgaacctgctgctggtggtgctgtgggccttcgccctgccctacccacgcttccggcccatggcctcctgcctgtccaccgtgtggacctgcgtcatcatcgtgtgtaagatgctgtaccagctcaaggttgtcaacccccaggagtattccagcaactgcaccgagcccttccccaacagcaccaacttgctgcccacggagatcagccagtccctgctgtaccgggggcccgtggaccctgccaactggtttggggtgcggaaagggttccccaacctgggctacatccagaaccacctgcaagtgctgctgctgctggtattcgaggccatcgtgtaccggcgccaggagcactaccgccggcagcaccagctggccccgctgcctgcccaggccgtgtttgccagcggcacccgccagcagctggaccaggatctgctcggctgcctcaagtacttcatcaacttcttcttctacaaattcgggctggagatctgcttcctgatggccgtgaacgtgatcgggcagcgcatgaactttctggtgaccctgcacggttgctggctggtggccatcctcacccgcaggcaccgccaggccattgcccgcctctggcccaactactgcctcttcctggcgctgttcctgctgtaccagtacctgctgtgcctggggatgcccccggccctgtgcattgattatccctggcgctggagccgggccgtccccatgaactccgcactcatcaagtggctgtacctgcctgatttcttccgggcccccaactccaccaacctcatcagcgactttctcctgctgctgtgcgcctcccagcagtggcaggtgttctcagctgagcgcacagaggagtggcagcgcatggctggcgtcaacaccgaccgcctggagccgctgcggggggagcccaaccccgtgcccaactttatccactgcaggtcctaccttgacatgctgaaggtggccgtcttccgatacctgttctggctggtgctggtggtggtgtttgtcacgggggccacccgcatcagcatcttcgggctgggctacctgctggcctgcttctacctgctgctcttcggcacggccctgctgcagagggacacacgggcccgcctcgtgctgtgggactgcctcattctgtacaacgtcaccgtcatcatctccaagaacatgctgtcgctcctggcctgcgtcttcgtggagcagatgcagaccggcttctgctgggtcatccagctcttcagccttgtatgcaccgtcaagggctactatgaccccaaggagatgatggacagagaccaggactgcctgctgcctgtggaggaggctggcatcatctgggacagcgtctgcttcttcttcctgctgctgcagcgccgcgtcttccttagccattactacctgcacgtcagggccgacctccaggccaccgccctgctagcctccaggggcttcgccctctacaacgctgccaacctcaagagcattgacttccaccgcaggatagaggagaagtccctggcccagctgaaaagacagatggagcgtatccgtgccaagcaggagaagcacaggcagggccgggtggaccgcagtcgcccccaggacaccctgggccccaaggaccccggcctggagccagggcccgacagtccagggggctcctccccgccacggaggcagtggtggcggccctggctggaccacgccacagtcatccactccggggactacttcctgtttgagtccgacagtgaggaagaggaggaggctgttcctgaagacccgaggccgtcggcacagagtgccttccagctggcgtaccaggcatgggtgaccaacgcccaggcggtgctgaggcggcggcagcaggagcaggagcaggcaaggcaggaacaggcaggacagctacccacaggaggtggtcccagccaggaggtggagccagcagagggccccgaggaggcagcggcaggccggagccatgtggtgcagagggtgctgagcacggcgcagttcctgtggatgctggggcaggcgctagtggatgagctgacacgctggctgcaggagttcacccggcaccacggcaccatgagcgacgtgctgcgggcagagcgctacctcctcacacaggagctcctgcagggcggcgaagtgcacaggggcgtgctggatcagctgtacacaagccaggccgaggccacgctgccaggccccaccgaggcccccaatgccccaagcaccgtgtccagtgggctgggcgcggaggagccactcagcagcatgacagacgacatgggcagccccctgagcaccggctaccacacgcgcagtggcagtgaggaggcagtcaccgaccccggggagcgtgaggctggtgcctctctgtaccagggactgatgcggacggccagcgagctgctcctggacaggcgcctgcgcatcccagagctggaggaggcagagctgtttgcggaggggcagggccgggcgctgcggctgctgcgggccgtgtaccagtgtgtggccgcccactcggagctgctctgctacttcatcatcatcctcaaccacatggtcacggcctccgccggctccctggtgctgcccgtgctcgtcttcctgtgggccatgctgtcgatcccgaggcccagcaagcgcttctggatgacggccatcgtcttcaccgagatcgcggtggtcgtcaagtacctgttccagtttgggttcttcccctggaacagccacgtggtgctgcggcgctacgagaacaagccctacttcccgccccgcatcctgggcctggagaagactgacggctacatcaagtacgacctggtgcagctcatggcccttttcttccaccgctcccagctgctgtgctatggcctctgggaccatgaggaggactcaccatccaaggagcatgacaagagcggcgaggaggagcagggagccgaggaggggccaggggtgcctgcggccaccaccgaagaccacattcaggtggaagcgagggtcggacccacggacgggaccccagaaccccaagtggagctcaggccccgtgatacgaggcgcatcagtctacgttttagaagaaggaagaaggagggcccagcacggaaaggagcggcagccatcgaagctgaggacagggaggaagaagagggggaggaagagaaagaggcccccacggggagagagaagaggccaagccgctctggaggaagagtaagggcggccgggcggcggctgcagggcttctgcctgtccctggcccagggcacatatcggccgctacggcgcttcttccacgacatcctgcacaccaagtaccgcgcagccaccgacgtctatgccctcatgttcctggctgatgttgtcgacttcatcatcatcatttttggcttctgggcctttgggaagcactcggcggccacagacatcacgtcctccctatcagacgaccaggtacccgaggctttcctggtcatgctgctgatccagttcagtaccatggtggttgaccgcgccctctacctgcgcaagaccgtgctgggcaagctggccttccaggtggcgctggtgctggccatccacctatggatgttcttcatcctgcccgccgtcactgagaggatgttcaaccagaatgtggtggcccagctctggtacttcgtgaagtgcatctacttcgccctgtccgcctaccagatccgctgcggctaccccacccgcatcctcggcaacttcctcaccaagaagtacaatcatctcaacctcttcctcttccaggggttccggctggtgccgttcctggtggagctgcgggcagtgatggactgggtgtggacggacaccacgctgtccctgtccagctggatgtgtgtggaggacatctatgccaacatcttcatcatcaaatgcagccgagagacagagaagaaatacccgcagcccaaagggcagaagaagaagaagatcgtcaagtacggcatgggtggcctcatcatcctcttcctcatcgccatcatctggttcccgctgctcttcatgtcgctggtgcgctccgtggttggggttgtcaaccagcccatcgatgtcaccgtcaccctcaagctgggcggctatgagccgctgttcaccatgagcgcccagcagccgtccatcatccccttcacggcccaggcctatgaggagctgtcccggcagtttgacccccagccgctggccatgcagttcatcagccagtacagccctgaggacatcgtcacggcgcagattgagggcagctccggggcgctgtggcgcatcagtccccccagccgtgcccagatgaagcgggagctctacaacggcacggccgacatcaccctgcgcttcacctggaacttccagagggacctggcgaagggaggcactgtggagtatgccaacgagaagcacatgctggccctggcccccaacagcactgcacggcggcagctggccagcctgctcgagggcacctcggaccagtctgtggtcatccccaatctcttccccaagtacatccgtgcccccaacgggcccgaagccaaccctgtgaagcagctgcagcccaatgaggaggccgactacctcggcgtgcgtatccagctgcggagggagcagggtgcgggggccaccggcttcctcgaatggtgggtcatcgagctgcaggagtgccggaccgactgcaacctgctgcccatggtcattttcagtgacaaggtcagcccaccgagcctcggcttcctggctggctacggcatcatggggctgtacgtgtccatcgtgctggtcatcggcaagttcgtgcgcggattcttcagcgagatctcgcactccattatgttcgaggagctgccgtgcgtggaccgcatcctcaagctctgccaggacatcttcctggtgcgggagactcgggagctggagctggaggaggagttgtacgccaagctcatcttcctctaccgctcaccggagaccatgatcaagtggactcgtgagaaggagtaggagctgctgctggcgcccgagagggaaggagccggcctgctgggcagcgtggccacaaggggcggcactcctcaggccgggggagccactgccccgtccaaggccgccagctgtgatgcatcctcccggcctgcctgagccctgatgctgctgtcagagaaggacactgcgtccccacggcctgcgtggcgctgccgtcccccacgtgtactgtagagttttttttttaattaaaaaatgttttatttatacaaatgg

SEQ ID NO: 1975 - DNA, 8607 bp, Homo sapiens
atgctgggctcagttcgcctgtctgtggggtgggatggtgccacccttaggttgttgggaggacccaaggagagtgatgcctccagccatggcagctggcccagctccggcccgcagcctggctccttcagggccaggaacccccaggtcatggactccaaccctcgggctctcctgcttcccaggctgccagtgtccacacactctcaggcactgtcattggagccttttaaccacacgggaaagcaggcaggagccctgcctggtgtccacaccacactaaggtgccctgccacgggcttcgaacccaaccctggtgcacttgttgagcattggacgttcctggcagcctgcctgctccgcttcagcggactctcgctggtctacctgctcttcctgctgctgctgccctggttccccggccccacccgatgcggcctccaaaggctggacctgaaggacatccccaacgccatccggctggtggcccctgacctgggcatcttggtggtctcctctgtctgcctcggcatctgcgggcgccttgcaaggaacacccggcagagcccacatccacgggagctggatgatgatgagagggatgtggatgccagcccgacggcagggctgcaggaagcagcaacgctggcccctacacggaggtcacggctggccgctcgtttccgagtcacggcccactggctgctggtggcggctgggcgggtcctggccgtaacactgcttgcactggcaggcatcgcccacccctcggccctctccagtgtctacctgctgctcttcctggccctctgcacctggtgggcctgccactttcccatcagcactcggggcttcagcagactctgcgccgcggtggggtgcttcggcgccggccatctcatctgcctctactgctaccagatgcccttggcacaggctctgctcccgcctgccggcatctgggctagggtgctgggtctcaaggacttcgtgggtcccaccaactgctccagcccccacgcgctggtcctcaacaccggcctggactggcctgtgtatgccagccccggcgtcctcctgctgctgtgctacgccacggcctctctgcgcaagctccgcgcgtaccgcccctccggccagaggaaggaggcggcaaaggggtatgaggctcgggagctggagctagcagagctggaccagtggccccaggaacgggagtctgaccagcacgtggtgcccacagcacccgacaccgaggctgataactgcatcgtgcacgagctgaccggccagagctccctcctgcggcggcctgtgcggcccaagcgggctgagcccagggaggcgtctccgctccacagcctgggccacctcatcatggaccagagctatgtgtgcgcgctcattgccatgatggtatggagcatcacctaccacagctggctgaccttcgtactgctgctctgggcctgcctcatctggacggtgcgcagccgccaccaactggccatgctgtgctcgccctgcatcctgctgtatgggatgacgctgtgctgcctacgctacgtgtgggccatggacctgcgccctgagctgcccaccaccctgggccccgtcagcctgcgccagctggggctggagcacacccgctacccctgtctggaccttggtgccatgttgctctacaccctgaccttctggctcctgctgcgccagtttgtgaaagagaagctgctgaagtgggcagagtctccagctgcgctgacggaggtcaccgtggcagacacagagcccacgcggacgcagacgctgttgcagagcctgggggagctggtgaagggcgtgtacgccaagtactggatctatgtgtgtgctggcatgttcatcgtggtcagcttcgccggccgcctcgtggtctacaagattgtctacatgttcctcttcctgctctgcctcaccctcttccaggtctactacagcctgtggcggaagctgctcaaggccttctggtggctcgtggtggcctacaccatgctggtcctcatcgccgtctacaccttccagttccaggacttccctgcctactggcgcaacctcactggcttcaccgacgagcagctgggggacctgggcctggagcagttcagcgtgtccgagctcttctccagcatcctggtgcccggcttcttcctcctggcctgcatcctgcagctgcactacttccacaggcccttcatgcagctcaccgacatggagcacgtgtccctgcctggcacgcgcctcccgcgctgggctcacaggcaggatgcagtgagtgggaccccactgctgcgggaggagcagcaggagcatcagcagcagcagcaggaggaggaggaggaggaggaggactccagggacgaggggctgggcgtggccactccccaccaggccacgcaggtgcctgaaggggcagccaagtggggcctggtggctgagcggctgctggagctggcagccggcttctcggacgtcctctcacgcgtgcaggtgttcctgcggcggctgctggagcttcacgttttcaagctggtggccctgtacaccgtctgggtggccctgaaggaggtgtcggtgatgaacctgctgctggtggtgctgtgggccttcgccctgccctacccacgcttccggcccatggcctcctgcctgtccaccgtgtggacctgcgtcatcatcgtgtgtaagatgctgtaccagctcaaggttgtcaacccccaggagtattccagcaactgcaccgagcccttccccaacagcaccaacttgctgcccacggagatcagccagtccctgctgtaccgggggcccgtggaccctgccaactggtttggggtgcggaaagggttccccaacctgggctacatccagaaccacctgcaagtgctgctgctgctggtattcgaggccatcgtgtaccggcgccaggagcactaccgccggcagcaccagctggccccgctgcctgcccaggccgtgtttgccagcggcacccgccagcagctggaccaggatctgctcggctgcctcaagtacttcatcaacttcttcttctacaaattcgggctggagatctgcttcctgatggccgtgaacgtgatcgggcagcgcatgaactttctggtgaccctgcacggttgctggctggtggccatcctcacccgcaggcaccgccaggccattgcccgcctctggcccaactactgcctcttcctggcgctgttcctgctgtaccagtacctgctgtgcctggggatgcccccggccctgtgcattgattatccctggcgctggagccgggccgtccccatgaactccgcactcatcaagtggctgtacctgcctgatttcttccgggcccccaactccaccaacctcatcagcgactttctcctgctgctgtgcgcctcccagcagtggcaggtgttctcagctgagcgcacagaggagtggcagcgcatggctggcgtcaacaccgaccgcctggagccgctgcggggggagcccaaccccgtgcccaactttatccactgcaggtcctaccttgacatgctgaaggtggccgtcttccgatacctgttctggctggtgctggtggtggtgtttgtcacgggggccacccgcatcagcatcttcgggctgggctacctgctggcctgcttctacctgctgctcttcggcacggccctgctgcagagggacacacgggcccgcctcgtgctgtgggactgcctcattctgtacaacgtcaccgtcatcatctccaagaacatgctgtcgctcctggcctgcgtcttcgtggagcagatgcagaccggcttctgctgggtcatccagctcttcagccttgtatgcaccgtcaagggctactatgaccccaaggagatgatggacagagaccaggactgcctgctgcctgtggaggaggctggcatcatctgggacagcgtctgcttcttcttcctgctgctgcagcgccgcgtcttccttagccattactacctgcacgtcagggccgacctccaggccaccgccctgctagcctccaggcagggcttcgccctctacaacgctgccaacctcaagagcattgacttccaccgcaggatagaggagaagtccctggcccagctgaaaagacagatggagcgtatccgtgccaagcaggagaagcacaggcagggccgggtggaccgcagtcgcccccaggacaccctgggccccaaggaccccggcctggagccagggcccgacagtccagggggctcctccccgccacggaggcagtggtggcggccctggctggaccacgccacagtcatccactccggggactacttcctgtttgagtccgacagtgaggaagaggaggaggctgttcctgaagacccgaggccgtcggcacagagtgccttccagctggcgtaccaggcatgggtgaccaacgcccaggcggtgctgaggcggcggcagcaggagcaggagcaggcaaggcaggaacaggcaggacagctacccacaggaggtggtcccagccaggaggtggagccagcagagggccccgaggaggcagcggcaggccggagccatgtggtgcagagggtgctgagcacggcgcagttcctgtggatgctggggcaggcgctagtggatgagctgacacgctggctgcaggagttcacccggcaccacggcaccatgagcgacgtgctgcgggcagagcgctacctcctcacacaggagctcctgcagggcggcgaagtgcacaggggcgtgctggatcagctgtacacaagccaggccgaggccacgctgccaggccccaccgaggcccccaatgccccaagcaccgtgtccagtgggctgggcgcggaggagccactcagcagcatgacagacgacatgggcagccccctgagcaccggctaccacacgcgcagtggcagtgaggaggcagtcaccgaccccggggagcgtgaggctggtgcctctctgtaccagggactgatgcggacggccagcgagctgctcctggacaggcgcctgcgcatcccagagctggaggaggcagagctgtttgcggaggggcagggccgggcgctgcggctgctgcgggccgtgtaccagtgtgtggccgcccactcggagctgctctgctacttcatcatcatcctcaaccacatggtcacggcctccgccggctcgctggtgctgcccgtgctcgtcttcctgtgggccatgctgtcgatcccgaggcccagcaagcgcttctggatgacggccatcgtcttcaccgagatcgcggtggtcgtcaagtacctgttccagtttgggttcttcccctggaacagccacgtggtgctgcggcgctacgagaacaagccctacttcccgccccgcatcctgggcctggagaagactgacggctacatcaagtacgacctggtgcagctcatggcccttttcttccaccgctcccagctgctgtgctatggcctctgggaccatgaggaggactcaccatccaaggagcatgacaagagcggcgaggaggagcagggagccgaggaggggccaggggtgcctgcggccaccaccgaagaccacattcaggtggaagcgagggtcggacccacggacgggaccccagaaccccaagtggagctcaggccccgtgatacgaggcgcatcagtctacgttttagaagaaggaagaaggagggcccagcacggaaaggagcggcagccatcgaagctgaggacagggaggaagaagagggggaggaagagaaagaggcccccacggggagagagaagaggccaagccgctctggaggaagagtaagggcggccgggcggcggctgcagggcttctgcctgtccctggcccagggcacatatcggccgctacggcgcttcttccacgacatcctgcacaccaagtaccgcgcagccaccgacgtctatgccctcatgttcctggctgatgttgtcgacttcatcatcatcatttttggcttctgggcctttgggaagcactcggcggccacagacatcacgtcctccctatcagacgaccaggtacccgaggctttcctggtcatgctgctgatccagttcagtaccatggtggttgaccgcgccctctacctgcgcaagaccgtgctgggcaagctggccttccaggtggcgctggtgctggccatccacctatggatgttcttcatcctgcccgccgtcactgagaggatgttcaaccagaatgtggtggcccagctctggtacttcgtgaagtgcatctacttcgccctgtccgcctaccagatccgctgcggctaccccacccgcatcctcggcaacttcctcaccaagaagtacaatcatctcaacctcttcctcttccaggggttccggctggtgccgttcctggtggagctgcgggcagtgatggactgggtgtggacggacaccacgctgtccctgtccagctggatgtgtgtggaggacatctatgccaacatcttcatcatcaaatgcagccgagagacagagaagaaatacccgcagcccaaagggcagaagaagaagaagatcgtcaagtacggcatgggtggcctcatcatcctcttcctcatcgccatcatctggttcccgctgctcttcatgtcgctggtgcgctccgtggttggggttgtcaaccagcccatcgatgtcaccgtcaccctgaagctgggcggctatgagccgctgttcaccatgagcgcccagcagccgtccatcatccccttcacggcccaggcctatgaggagctgtcccggcagtttgacccccagccgctggccatgcagttcatcagccagtacagccctgaggacatcgtcacggcgcagattgagggcagctccggggcgctgtggcgcatcagtccccccagccgtgcccagatgaagcgggagctctacaacggcacggccgacatcaccctgcgcttcacctggaacttccagaggttcgtcctggacttggggcagtgcctgggtgggtggacccactacagtgggtcacgctgtgttcccacccccagggacctggcgaagggaggcactgtggagtatgccaacgagaagcacatgctggccctggcccccaacagcactgcacggcggcagctggccagcctgctcgagggcacctcggaccagtctgtgtgagtgaagggcccgggtggtgggcaggagggctgtgccaggttggctgggccaggcctgacctgccagcacctccctgcagggtcatccccaatctcttccccaagtacatccgtgcccccaacgggcccgaagccaaccctgtgaagcagctgcagcccagtgagtatgggcgtgggggttgggggaggctagagaggggtgacctgcggcctcaacgatcttctccctccatcccagatgaggaggccgactacctcggcgtgcgtatccagctgcggagggagcagggtgcgggggccaccggcttcctcgaatggtgggtcatcgagctgcaggagtgccggaccgactgcaacctgctgcccatggtcattttcagtgacaaggtcagcccaccgagcctcggcttcctggctggctacgggtgagtgagtggctgggggggcaccccgcagctcggggggctccgggcggccccaggactcaccagcttcccccgcagcatcatggggctgtacgtgtccatcgtgctggtcatcggcaagttcgtgcgcggattcttcagcgagatctcgcactccattatgttcgaggagctgccgtgcgtggaccgcatcctcaagctctgccaggacatcttcctggtgcgggagactcgggagctggagctggaggaggagttgtacgccaagctcatcttcctctaccgctcaccggagaccatgatcaagtggactcgtgagaaggagtaggagctgctgctggcgcccgagagggaaggagccggcctgctgggcagcgtggccacaaggggcggcactcctcaggccgggggagccactgccccgtccaaggccgccagctgtgatgcatcctcccggcctgcctgagccctgatgctgctgtcagagaaggacactgcgtccccacggcctgcgtggcgctgccgtcccccacgtgtactgtagagttttttttttaattaaaaaatgttttatttatacaaatggacaatcagaggccagtcccccgtccttgccttccggctccagtgtggtgtaccaggtggccactgcctgctgtcccggcaagcacgtcctcacgctcagctctggcccgcctcgtcgtcactgtcctcaatcagacagtcccggatctcctgcaagccccaggccctctgtgtgcggagctgggcctcagccaggatgtacggcggcagggggtccagtgagggcccgcagggtctgcagaagctcctccttggcagtcagtgtcctcactgagcagaacagttgggaaagagcctcagtctgggcaggggcaggcggtcttgccaggttctgggggtccagcggg

SEQ ID NO: 1976 - DNA, 8351 bp, Homo sapiens
atgctgggctcagttcgcctgtctgtggggtgggatggtgccacccttaggttgttgggaggacccaaggagagtgatgcctccagccatggcagctggcccagctccggcccgcagcctggctccttcagggccaggaacccccaggtcatggactccaaccctcgggctctcctgcttcccaggctgccagtgtccacacactctcaggcactgtcattggagccttttaaccacacgggaaagcaggcaggagccctgcctggtgtccacaccacactaaggtgccctgccacgggcttcgaacccaaccctggtgcacttgttgagcattggacgttcctggcagcctgcctgctccgcttcagcggactctcgctggtctacctgctcttcctgctgctgctgccctggttccccggccccacccgatgcggcctccaaaggctggacctgaaggacatccccaacgccatccggctggtggcccctgacctgggcatcttggtggtctcctctgtctgcctcggcatctgcgggcgccttgcaaggaacacccggcagagcccacatccacgggagctggatgatgatgagagggatgtggatgccagcccgacggcagggctgcaggaagcagcaacgctggcccctacacggaggtcacggctggccgctcgtttccgagtcacggcccactggctgctggtggcggctgggcgggtcctggccgtaacactgcttgcactggcaggcatcgcccacccctcggccctctccagtgtctacctgctgctcttcctggccctctgcacctggtgggcctgccactttcccatcagcactcggggcttcagcagactctgcgccgcggtggggtgcttcggcgccggccatctcatctgcctctactgctaccagatgcccttggcacaggctctgctcccgcctgccggcatctgggctagggtgctgggtctcaaggacttcgtgggtcccaccaactgctccagcccccacgcgctggtcctcaacaccggcctggactggcctgtgtatgccagccccggcgtcctcctgctgctgtgctacgccacggcctctctgcgcaagctccgcgcgtaccgcccctccggccagaggaaggaggcggcaaaggggtatgaggctcgggagctggagctagcagagctggaccagtggccccaggaacgggagtctgaccagcacgtggtgcccacagcacccgacaccgaggctgataactgcatcgtgcacgagctgaccggccagagctccctcctgcggcggcctgtgcggcccaagcgggctgagcccagggaggcgtctccgctccacagcctgggccacctcatcatggaccagagctatgtgtgcgcgctcattgccatgatggtatggagcatcacctaccacagctggctgaccttcgtactgctgctctgggcctgcctcatctggacggtgcgcagccgccaccaactggccatgctgtgctcgccctgcatcctgctgtatgggatgacgctgtgctgcctacgctacgtgtgggccatggacctgcgccctgagctgcccaccaccctgggccccgtcagcctgcgccagctggggctggagcacacccgctacccctgtctggaccttggtgccatgttgctctacaccctgaccttctggctcctgctgcgccagtttgtgaaagagaagctgctgaagtgggcagagtctccagctgcgctgacggaggtcaccgtggcagacacagagcccacgcggacgcagacgctgttgcagagcctgggggagctggtgaagggcgtgtacgccaagtactggatctatgtgtgtgctggcatgttcatcgtggtcagcttcgccggccgcctcgtggtctacaagattgtctacatgttcctcttcctgctctgcctcaccctcttccaggtctactacagcctgtggcggaagctgctcaaggccttctggtggctcgtggtggcctacaccatgctggtcctcatcgccgtctacaccttccagttccaggacttccctgcctactggcgcaacctcactggcttcaccgacgagcagctgggggacctgggcctggagcagttcagcgtgtccgagctcttctccagcatcctggtgcccggcttcttcctcctggcctgcatcctgcagctgcactacttccacaggcccttcatgcagctcaccgacatggagcacgtgtccctgcctggcacgcgcctcccgcgctgggctcacaggcaggatgcagtgagtgggaccccactgctgcgggaggagcagcaggagcatcagcagcagcagcaggaggaggaggaggaggaggaggactccagggacgaggggctgggcgtggccactccccaccaggccacgcaggtgcctgaaggggcagccaagtggggcctggtggctgagcggctgctggagctggcagccggcttctcggacgtcctctcacgcgtgcaggtgttcctgcggcggctgctggagcttcacgttttcaagctggtggccctgtacaccgtctgggtggccctgaaggaggtgtcggtgatgaacctgctgctggtggtgctgtgggccttcgccctgccctacccacgcttccggcccatggcctcctgcctgtccaccgtgtggacctgcgtcatcatcgtgtgtaagatgctgtaccagctcaaggttgtcaacccccaggagtattccagcaactgcaccgagcccttccccaacagcaccaacttgctgcccacggagatcagccagtccctgctgtaccgggggcccgtggaccctgccaactggtttggggtgcggaaagggttccccaacctgggctacatccagaaccacctgcaagtgctgctgctgctggtattcgaggccatcgtgtaccggcgccaggagcactaccgccggcagcaccagctggccccgctgcctgcccaggccgtgtttgccagcggcacccgccagcagctggaccaggatctgctcggctgcctcaagtacttcatcaacttcttcttctacaaattcgggctggagatctgcttcctgatggccgtgaacgtgatcgggcagcgcatgaactttctggtgaccctgcacggttgctggctggtggccatcctcacccgcaggcaccgccaggccattgcccgcctctggcccaactactgcctcttcctggcgctgttcctgctgtaccagtacctgctgtgcctggggatgcccccggccctgtgcattgattatccctggcgctggagccgggccgtccccatgaactccgcactcatcaagtggctgtacctgcctgatttcttccgggcccccaactccaccaacctcatcagcgactttctcctgctgctgtgcgcctcccagcagtggcaggtgttctcagctgagcgcacagaggagtggcagcgcatggctggcgtcaacaccgaccgcctggagccgctgcggggggagcccaaccccgtgcccaactttatccactgcaggtcctaccttgacatgctgaaggtggccgtcttccgatacctgttctggctggtgctggtggtggtgtttgtcacgggggccacccgcatcagcatcttcgggctgggctacctgctggcctgcttctacctgctgctcttcggcacggccctgctgcagagggacacacgggcccgcctcgtgctgtgggactgcctcattctgtacaacgtcaccgtcatcatctccaagaacatgctgtcgctcctggcctgcgtcttcgtggagcagatgcagaccggcttctgctgggtcatccagctcttcagccttgtatgcaccgtcaagggctactatgaccccaaggagatgatggacagagaccaggactgcctgctgcctgtggaggaggctggcatcatctgggacagcgtctgcttcttcttcctgctgctgcagcgccgcgtcttccttagccattactacctgcacgtcagggccgacctccaggccaccgccctgctagcctccaggcagggcttcgccctctacaacgctgccaacctcaagagcattgacttccaccgcaggatagaggagaagtccctggcccagctgaaaagacagatggagcgtatccgtgccaagcaggagaagcacaggcagggccgggtggaccgcagtcgcccccaggacaccctgggccccaaggaccccggcctggagccagggcccgacagtccagggggctcctccccgccacggaggcagtggtggcggccctggctggaccacgccacagtcatccactccggggactacttcctgtttgagtccgacagtgaggaagaggaggaggctgttcctgaagacccgaggccgtcggcacagagtgccttccagctggcgtaccaggcatgggtgaccaacgcccaggcggtgctgaggcggcggcagcaggagcaggagcaggcaaggcaggaacaggcaggacagctacccacaggaggtggtcccagccaggaggtggagccagcagagggccccgaggaggcagcggcaggccggagccatgtggtgcagagggtgctgagcacggcgcagttcctgtggatgctggggcaggcgctagtggatgagctgacacgctggctgcaggagttcacccggcaccacggcaccatgagcgacgtgctgcgggcagagcgctacctcctcacacaggagctcctgcagggcggcgaagtgcacaggggcgtgctggatcagctgtacacaagccaggccgaggccacgctgccaggccccaccgaggcccccaatgccccaagcaccgtgtccagtgggctgggcgcggaggagccactcagcagcatgacagacgacatgggcagccccctgagcaccggctaccacacgcgcagtggcagtgaggaggcagtcaccgaccccggggagcgtgaggctggtgcctctctgtaccagggactgatgcggacggccagcgagctgctcctggacaggcgcctgcgcatcccagagctggaggaggcagagctgtttgcggaggggcagggccgggcgctgcggctgctgcgggccgtgtaccagtgtgtggccgcccactcggagctgctctgctacttcatcatcatcctcaaccacatggtcacggcctccgccggctcgctggtgctgcccgtgctcgtcttcctgtgggccatgctgtcgatcccgaggcccagcaagcgcttctggatgacggccatcgtcttcaccgagatcgcggtggtcgtcaagtacctgttccagtttgggttcttcccctggaacagccacgtggtgctgcggcgctacgagaacaagccctacttcccgccccgcatcctgggcctggagaagactgacggctacatcaagtacgacctggtgcagctcatggcccttttcttccaccgctcccagctgctgtgctatggcctctgggaccatgaggaggactcaccatccaaggagcatgacaagagcggcgaggaggagcagggagccgaggaggggccaggggtgcctgcggccaccaccgaagaccacattcaggtggaagcgagggtcggacccacggacgggaccccagaaccccaagtggagctcaggccccgtgatacgaggcgcatcagtctacgttttagaagaaggaagaaggagggcccagcacggaaaggagcggcagccatcgaagctgaggacagggaggaagaagagggggaggaagagaaagaggcccccacggggagagagaagaggccaagccgctctggaggaagagtaagggcggccgggcggcggctgcagggcttctgcctgtccctggcccagggcacatatcggccgctacggcgcttcttccacgacatcctgcacaccaagtaccgcgcagccaccgacgtctatgccctcatgttcctggctgatgttgtcgacttcatcatcatcatttttggcttctgggcctttgggaagcactcggcggccacagacatcacgtcctccctatcagacgaccaggtacccgaggctttcctggtcatgctgctgatccagttcagtaccatggtggttgaccgcgccctctacctgcgcaagaccgtgctgggcaagctggccttccaggtggcgctggtgctggccatccacctatggatgttcttcatcctgcccgccgtcactgagaggatgttcaaccagaatgtggtggcccagctctggtacttcgtgaagtgcatctacttcgccctgtccgcctaccagatccgctgcggctaccccacccgcatcctcggcaacttcctcaccaagaagtacaatcatctcaacctcttcctcttccaggggttccggctggtgccgttcctggtggagctgcgggcagtgatggactgggtgtggacggacaccacgctgtccctgtccagctggatgtgtgtggaggacatctatgccaacatcttcatcatcaaatgcagccgagagacagagaagaaatacccgcagcccaaagggcagaagaagaagaagatcgtcaagtacggcatgggtggcctcatcatcctcttcctcatcgccatcatctggttcccgctgctcttcatgtcgctggtgcgctccgtggttggggttgtcaaccagcccatcgatgtcaccgtcaccctgaagctgggcggctatgagccgctgttcaccatgagcgcccagcagccgtccatcatccccttcacggcccaggcctatgaggagctgtcccggcagtttgacccccagccgctggccatgcagttcatcagccagtacagccctgaggacatcgtcacggcgcagattgagggcagctccggggcgctgtggcgcatcagtccccccagccgtgcccagatgaagcgggagctctacaacggcacggccgacatcaccctgcgcttcacctggaacttccagagggacctggcgaagggaggcactgtggagtatgccaacgagaagcacatgctggccctggcccccaacagcactgcacggcggcagctggccagcctgctcgagggcacctcggaccagtctgtgtgagtgaagggcccgggtggtgggcaggagggctgtgccaggttggctgggccaggcctgacctgccagcacctccctgcagggtcatccccaatctcttccccaagtacatccgtgcccccaacgggcccgaagccaaccctgtgaagcagctgcagcccagtgagtatgggcgtgggggttgggggaggctagagaggggtgacctgcggcctcaacgatcttctccctccatcccagatgaggaggccgactacctcggcgtgcgtatccagctgcggagggagcagggtgcgggggccaccggcttcctcgaatggtgggtcatcgagctgcaggagtgccggaccgactgcaacctgctgcccatggtcattttcagtgacaaggtcagcccaccgagcctcggcttcctggctggctacgggtgagtgagtggctgggggggcaccccgcagctcggggggctccgggcggccccaggactcaccagcttcccccgcagcatcatggggctgtacgtgtccatcgtgctggtcatcggcaagttcgtgcgcggattcttcagcgagatctcgcactccattatgttcgaggagctgccgtgcgtggaccgcatcctcaagctctgccaggacatcttcctggtgcgggagactcgggagctggagctggaggaggagttgtacgccaagctcatcttcctctaccgctcaccggagaccatgatcaagtggactcgtgagaaggagtaggagctgctgctggcgcccgagagggaaggagccggcctgctgggcagcgtggccacaaggggcggcactcctcaggccgggggagccactgccccgtccaaggccgccagctgtgatgcatcctcccggcctgcctgagccctgatgctgctgtcagagaaggacactgcgtccccacggcctgcgtggcgctgccgtcccccacgtgtactgtagagttttttttttaattaaaaaatgttttatttatacaaatggacaatcagaggccagtcccccgtccttgccttccggctccagtgtggtgtaccaggtggccactgcctgctgtcccggcaagcacgtcctcacgctcagctctggcccgcctcgtcgtcactgtcctcaatcagacagtcccggatctcctgcaagccccaggcc

SEQ ID NO: 1977 - DNA, 7174 bp, Homo sapiens
aggaaggaggcggcaaaggggtatgaggctcgggagctggagctagcagagctggaccagtggccccaggaacgggagtctgaccagcacgtggtgcccacagcacccgacaccgaggctgataactgcatcgtgcacgagctgaccggccagagctccctcctgcggcggcctggtgagtaccgcacactgcaagtgcggcccaagcgggctgagcccagggaggcgtctccgctccacagcctgggccacctcatcatggaccagagctatgtgtgcgcgctcattgccatgatggtatggagcatcacctaccacagctggctgaccttcgtactgctgctctgggcctgcctcatctggacggtgcgcagccgccaccaactggccatgctgtgctcgccctgcatcctgctgtatgggatgacgctgtgctgcctacgctacgtgtgggccatggacctgcgccctgagctgcccaccaccctgggccccgtcagcctgcgccagctggggctggagcacacccgctacccctgtctggaccttggtgccatgttgctctacaccctgaccttctggctcctgctgcgccagtttgtgaaagagaagctgctgaagtgggcagagtctccagctgcgctgacggaggtcaccgtggcagacacagagcccacgcggacgcagacgctgttgcagagcctgggggagctggtgaagggcgtgtacgccaagtactggatctatgtgtgtgctggcatgttcatcgtggtcagcttcgccggccgcctcgtggtctacaagattgtctacatgttcctcttcctgctctgcctcaccctcttccaggtctactacagcctgtggcggaagctgctcaaggccttctggtggctcgtggtggcctacaccatgctggtcctcatcgccgtctacaccttccagttccaggacttccctgcctactggcgcaacctcactggcttcaccgacgagcagctgggggacctgggcctggagcagttcagcgtgtccgagctcttctccagcatcctggtgcccggcttcttcctcctggcctgcatcctgcagctgcactacttccacaggcccttcatgcagctcaccgacatggagcacgtgtccctgcctggcacgcgcctcccgcgctgggctcacaggcaggatgcagtgagtgggaccccactgctgcgggaggagcagcaggagcatcagcagcagcagcaggaggaggaggaggaggaggaggactccagggacgaggggctgggcgtggccactccccaccaggccacgcaggtgcctgaaggggcagccaagtggggcctggtggctgagcggctgctggagctggcagccggcttctcggacgtcctctcacgcgtgcaggtgttcctgcggcggctgctggagcttcacgttttcaagctggtggccctgtacaccgtctgggtggccctgaaggaggtgtcggtgatgaacctgctgctggtggtgctgtgggccttcgccctgccctacccacgcttccggcccatggcctcctgcctgtccaccgtgtggacctgcgtcatcatcgtgtgtaagatgctgtaccagctcaaggttgtcaacccccaggagtattccagcaactgcaccgagcccttccccaacagcaccaacttgctgcccacggagatcagccagtccctgctgtaccgggggcccgtggaccctgccaactggtttggggtgcggaaagggttccccaacctgggctacatccagaaccacctgcaagtgctgctgctgctggtattcgaggccatcgtgtaccggcgccaggagcactaccgccggcagcaccagctggccccgctgcctgcccaggccgtgtttgccagcggcacccgccagcagctggaccaggatctgctcggctgcctcaagtacttcatcaacttcttcttctacaaattcgggctggagatctgcttcctgatggccgtgaacgtgatcgggcagcgcatgaactttctggtgaccctgcacggttgctggctggtggccatcctcacccgcaggcaccgccaggccattgcccgcctctggcccaactactgcctcttcctggcgctgttcctgctgtaccagtacctgctgtgcctggggatgcccccggccctgtgcattgattatccctggcgctggagccgggccgtccccatgaactccgcactcatcaagtggctgtacctgcctgatttcttccgggcccccaactccaccaacctcatcagcgactttctcctgctgctgtgcgcctcccagcagtggcaggtgttctcagctgagcgcacagaggagtggcagcgcatggctggcgtcaacaccgaccgcctggagccgctgcggggggagcccaaccccgtgcccaactttatccactgcaggtcctaccttgacatgctgaaggtggccgtcttccgatacctgttctggctggtgctggtggtggtgtttgtcacgggggccacccgcatcagcatcttcgggctgggctacctgctggcctgcttctacctgctgctcttcggcacggccctgctgcagagggacacacgggcccgcctcgtgctgtgggactgcctcattctgtacaacgtcaccgtcatcatctccaagaacatgctgtcgctcctggcctgcgtcttcgtggagcagatgcagaccggcttctgctgggtcatccagctcttcagccttgtatgcaccgtcaagggctactatgaccccaaggagatgatggacagagaccaggactgcctgctgcctgtggaggaggctggcatcatctgggacagcgtctgcttcttcttcctgctgctgcagcgccgcgtcttccttagccattactacctgcacgtcagggccgacctccaggccaccgccctgctagcctccaggcagggcttcgccctctacaacgctgccaacctcaagagcattgacttccaccgcaggatagaggagaagtccctggcccagctgaaaagacagatggagcgtatccgtgccaagcaggagaagcacaggcagggccgggtggaccgcagtcgcccccaggacaccctgggccccaaggaccccggcctggagccagggcccgacagtccagggggctcctccccgccacggaggcagtggtggcggccctggctggaccacgccacagtcatccactccggggactacttcctgtttgagtccgacagtgaggaagaggaggaggctgttcctgaagacccgaggccgtcggcacagagtgccttccagctggcgtaccaggcatgggtgaccaacgcccaggcggtgctgaggcggcggcagcaggagcaggagcaggcaaggcaggaacaggcaggacagctacccacaggaggtggtcccagccaggaggtggagccagcagagggccccgaggaggcagcggcaggccggagccatgtggtgcagagggtgctgagcacggcgcagttcctgtggatgctggggcaggcgctagtggatgagctgacacgctggctgcaggagttcacccggcaccacggcaccatgagcgacgtgctgcgggcagagcgctacctcctcacacaggagctcctgcagggcggcgaagtgcacaggggcgtgctggatcagctgtacacaagccaggccgaggccacgctgccaggccccaccgaggcccccaatgccccaagcaccgtgtccagtgggctgggcgcggaggagccactcagcagcatgacagacgacatgggcagccccctgagcaccggctaccacacgcgcagtggcagtgaggaggcagtcaccgaccccggggagcgtgaggctggtgcctctctgtaccagggactgatgcggacggccagcgagctgctcctggacaggcgcctgcgcatcccagagctggaggaggcagagctgtttgcggaggggcagggccgggcgctgcggctgctgcgggccgtgtaccagtgtgtggccgcccactcggagctgctctgctacttcatcatcatcctcaaccacatggtcacggcctccgccggctcgctggtgctgcccgtgctcgtcttcctgtgggccatgctgtcgatcccgaggcccagcaagcgcttctggatgacggccatcgtcttcaccgagatcgcggtggtcgtcaagtacctgttccagtttgggttcttcccctggaacagccacgtggtgctgcggcgctacgagaacaagccctacttcccgccccgcatcctgggcctggagaagactgacggctacatcaagtacgacctggtgcagctcatggcccttttcttccaccgctcccagctgctgtgctatggcctctgggaccatgaggaggactcaccatccaaggagcatgacaagagcggcgaggaggagcagggagccgaggaggggccaggggtgcctgcggccaccaccgaagaccacattcaggtggaagcgagggtcggacccacggacgggaccccagaaccccaagtggagctcaggccccgtgatacgaggcgcatcagtctacgttttagaagaaggaagaaggagggcccagcacggaaaggagcggcagccatcgaagctgaggacagggaggaagaagagggggaggaagagaaagaggcccccacggggagagagaagaggccaagccgctctggaggaagagtaagggcggccgggcggcggctgcagggcttctgcctgtccctggcccagggcacatatcggccgctacggcgcttcttccacgacatcctgcacaccaagtaccgcgcagccaccgacgtctatgccctcatgttcctggctgatgttgtcgacttcatcatcatcatttttggcttctgggcctttgggaagcactcggcggccacagacatcacgtcctccctatcagacgaccaggtacccgaggctttcctggtcatgctgctgatccagttcagtaccatggtggttgaccgcgccctctacctgcgcaagaccgtgctgggcaagctggccttccaggtggcgctggtgctggccatccacctatggatgttcttcatcctgcccgccgtcactgagaggatgttcaaccagaatgtggtggcccagctctggtacttcgtgaagtgcatctacttcgccctgtccgcctaccagatccgctgcggctaccccacccgcatcctcggcaacttcctcaccaagaagtacaatcatctcaacctcttcctcttccaggggttccggctggtgccgttcctggtggagctgcgggcagtgatggactgggtgtggacggacaccacgctgtccctgtccagctggatgtgtgtggaggacatctatgccaacatcttcatcatcaaatgcagccgagagacagagaagaaatacccgcagcccaaagggcagaagaagaagaagatcgtcaagtacggcatgggtggcctcatcatcctcttcctcatcgccatcatctggttcccgctgctcttcatgtcgctggtgcgctccgtggttggggttgtcaaccagcccatcgatgtcaccgtcaccctgaagctgggcggctatgagccgctgttcaccatgagcgcccagcagccgtccatcatccccttcacggcccaggcctatgaggagctgtcccggcagtttgacccccagccgctggccatgcagttcatcagccagtacagccctgaggacatcgtcacggcgcagattgagggcagctccggggcgctgtggcgcatcagtccccccagccgtgcccagatgaagcgggagctctacaacggcacggccgacatcaccctgcgcttcacctggaacttccagagggacctggcgaagggaggcactgtggagtatgccaacgagaagcacatgctggccctggcccccaacagcactgcacggcggcagctggccagcctgctcgagggcacctcggaccagtctgtggtcatccccaatctcttccccaagtacatccgtgcccccaacgggcccgaagccaaccctgtgaagcagctgcagcccaatgaggaggccgactacctcggcgtgcgtatccagctgcggagggagcagggtgcgggggccaccggcttcctcgaatggtgggtcatcgagctgcaggagtgccggaccgactgcaacctgctgcccatggtcattttcagtgacaaggtcagcccaccgagcctcggcttcctggctggctacggcatcatggggctgtacgtgtccatcgtgctggtcatcggcaagttcgtgcgcggattcttcagcgagatctcgcactccattatgttcgaggagctgccgtgcgtggaccgcatcctcaagctctgccaggacatcttcctggtgcgggagactcgggagctggagctggaggaggagttgtacgccaagctcatcttcctctaccgctcaccggagaccatgatcaagtggactcgtgagaaggagtaggagctgctgctggcgcccgagagggaaggagccggcctgctgggcagcgtggccacaaggggcggcactcctcaggccgggggagccactgccccgtccaaggccgccagctgtgatgcatcctcccggcctgcctgagccctgatgctgctgtcagagaaggacactgcgtccccacggcctgcgtggcgctgccgtcccccacgtgtactgtagagttttttttttaattaaaaaatgttttatttatacaaatggacaatcagaggccagtcccccgtccttgccttccggctccagtgtggtgtaccaggtggccactgcctgctgtcccggcaagcacgtcctcacgctcagctctggcccgcctcgtcgtcactgtcctcaatcagacagtcccggatctcctgcaagccccaggccctctgtgtgcggagctgggcctcagccaggatgtacggcggcagggggtccagtgagggcccgcagggtctgcagaagctcctccttggcagtcagtgtcctcactgagcagaacagttgggaaagagcctcagtctgggcaggggcaggcggtcttgccaggttctgggggtccagcggg

SEQ ID NO: 1978 - DNA, 5837 bp, Homo sapiens
ctgggaccttctcgcacatccctccttctccctggacctctcttcactcccctagcccctgcccgtggtctccctgtttctcaaacacctggtccccttccctgtgaaggtggctccaaggctggcagcccccgtgtccctggctggggagcggtggacctgccccagagctgtggctgtggtgggctccgggcagggccagggggcactgtggcctgggagggggcactgatgcctggcctcttgccagcccttccccaacagcaccaacttgctgcccacggagatcagccagtccctgctgtaccgggggcccgtggaccctgccaactggtttggggtgcggaaagggttccccaacctgggctacatccagaaccacctgcaagtgctgctgctgctggtattcgaggccatcgtgtaccggcgccaggagcactaccgccggcagcaccagctggccccgctgcctgcccaggccgtgtttgccagcggcacccgccagcagctggaccaggatctgctcggctgcctcaagtacttcatcaacttcttcttctacaaattcgggctggagatctgcttcctgatggccgtgaacgtgatcgggcagcgcatgaactttctggtgaccctgcacggttgctggctggtggccatcctcacccgcaggcaccgccaggccattgcccgcctctggcccaactactgcctcttcctggcgctgttcctgctgtaccagtacctgctgtgcctggggatgcccccggccctgtgcattgattatccctggcgctggagccgggccgtccccatgaactccgcactcatcaagtggctgtacctgcctgatttcttccgggcccccaactccaccaacctcatcagcgactttctcctgctgctgtgcgcctcccagcagtggcaggtgttctcagctgagcgcacagaggagtggcagcgcatggctggcgtcaacaccgaccgcctggagccgctgcggggggagcccaaccccgtgcccaactttatccactgcaggtcctaccttgacatgctgaaggtggccgtcttccgatacctgttctggctggtgctggtggtggtgtttgtcacgggggccacccgcatcagcatcttcgggctgggctacctgctggcctgcttctacctgctgctcttcggcacggccctgctgcagagggacacacgggcccgcctcgtgctgtgggactgcctcattctgtacaacgtcaccgtcatcatctccaagaacatgctgtcgctcctggcctgcgtcttcgtggagcagatgcagaccggcttctgctgggtcatccagctcttcagccttgtatgcaccgtcaagggctactatgaccccaaggagatgatggacagagaccaggactgcctgctgcctgtggaggaggctggcatcatctgggacagcgtctgcttcttcttcctgctgctgcagcgccgcgtcttccttagccattactacctgcacgtcagggccgacctccaggccaccgccctgctagcctccaggggcttcgccctctacaacgctgccaacctcaagagcattgacttccaccgcaggatagaggagaagtccctggcccagctgaaaagacagatggagcgtatccgtgccaagcaggagaagcacaggcagggccgggtggaccgcagtcgcccccaggacaccctgggccccaaggaccccggcctggagccagggcccgacagtccagggggctcctccccgccacggaggcagtggtggcggccctggctggaccacgccacagtcatccactccggggactacttcctgtttgagtccgacagtgaggaagaggaggaggctgttcctgaagacccgaggccgtcggcacagagtgccttccagctggcgtaccaggcatgggtgaccaacgcccaggcggtgctgaggcggcggcagcaggagcaggagcaggcaaggcaggaacaggcaggacagctacccacaggaggtggtcccagccaggaggtggagccagcagagggccccgaggaggcagcggcaggccggagccatgtggtgcagagggtgctgagcacggcgcagttcctgtggatgctggggcaggcgctagtggatgagctgacacgctggctgcaggagttcacccggcaccacggcaccatgagcgacgtgctgcgggcagagcgctacctcctcacacaggagctcctgcagggcggcgaagtgcacaggggcgtgctggatcagctgtacacaagccaggccgaggccacgctgccaggccccaccgaggcccccaatgccccaagcaccgtgtccagtgggctgggcgcggaggagccactcagcagcatgacagacgacatgggcagccccctgagcaccggctaccacacgcgcagtggcagtgaggaggcagtcaccgaccccggggagcgtgaggctggtgcctctctgtaccagggactgatgcggacggccagcgagctgctcctggacaggcgcctgcgcatcccagagctggaggaggcagagctgtttgcggaggggcagggccgggcgctgcggctgctgcgggccgtgtaccagtgtgtggccgcccactcggagctgctctgctacttcatcatcatcctcaaccacatggtcacggcctccgccggctcgctggtgctgcccgtgctcgtcttcctgtgggccatgctgtcgatcccgaggcccagcaagcgcttctggatgacggccatcgtcttcaccgagatcgcggtggtcgtcaagtacctgttccagtttgggttcttcccctggaacagccacgtggtgctgcggcgctacgagaacaagccctacttcccgccccgcatcctgggcctggagaagactgacggctacatcaagtacgacctggtgcagctcatggcccttttcttccaccgctcccagctgctgtgctatggcctctgggaccatgaggaggactcaccatccaaggagcatgacaagagcggcgaggaggagcagggagccgaggaggggccaggggtgcctgcggccaccaccgaagaccacattcaggtggaagcgagggtcggacccacggacgggaccccagaaccccaagtggagctcaggccccgtgatacgaggcgcatcagtctacgttttagaagaaggaagaaggagggcccagcacggaaaggagcggcagccatcgaagctgaggacagggaggaagaagagggggaggaagagaaagaggcccccacggggagagagaagaggccaagccgctctggaggaagagtaagggcggccgggcggcggctgcagggcttctgcctgtccctggcccagggcacatatcggccgctacggcgcttcttccacgacatcctgcacaccaagtaccgcgcagccaccgacgtctatgccctcatgttcctggctgatgttgtcgacttcatcatcatcatttttggcttctgggcctttgggaagcactcggcggccacagacatcacgtcctccctatcagacgaccaggtacccgaggctttcctggtcatgctgctgatccagttcagtaccatggtggttgaccgcgccctctacctgcgcaagaccgtgctgggcaagctggccttccaggtggcgctggtgctggccatccacctatggatgttcttcatcctgcccgccgtcactgagaggatgttcaaccagaatgtggtggcccagctctggtacttcgtgaagtgcatctacttcgccctgtccgcctaccagatccgctgcggctaccccacccgcatcctcggcaacttcctcaccaagaagtacaatcatctcaacctcttcctcttccaggggttccggctggtgccgttcctggtggagctgcgggcagtgatggactgggtgtggacggacaccacgctgtccctgtccagctggatgtgtgtggaggacatctatgccaacatcttcatcatcaaatgcagccgagagacagagaagaaatacccgcagcccaaagggcagaagaagaagaagatcgtcaagtacggcatgggtggcctcatcatcctcttcctcatcgccatcatctggttcccgctgctcttcatgtcgctggtgcgctccgtggttggggttgtcaaccagcccatcgatgtcaccgtcaccctgaagctgggcggctatgagccgctgttcaccatgagcgcccagcagccgtccatcatccccttcacggcccaggcctatgaggagctgtcccggcagtttgacccccagccgctggccatgcagttcatcagccagtacagccctgaggacatcgtcacggcgcagattgagggcagctccggggcgctgtggcgcatcagtccccccagccgtgcccagatgaagcgggagctctacaacggcacggccgacatcaccctgcgcttcacctggaacttccagaggttcgtcctggacttggggcagtgcctgggtgggtggacccactacagtgggtcacgctgtgttcccacccccagggacctggcgaagggaggcactgtggagtatgccaacgagaagcacatgctggccctggcccccaacagcactgcacggcggcagctggccagcctgctcgagggcacctcggaccacacctccctgcagggtcatccccaatctcttccccaagtacatccgtgcccccaacgggcccgaagccaaccctgtgaagcagctgcagcccaatgaggaggccgactacctcggcgtgcgtatccagctgcggagggagcagggtgcgggggccaccggcttcctcgaatggtgggtcatcgagctgcaggagtgccggaccgactgcaacctgctgcccatggtcattttcagtgacaaggtcagcccaccgagcctcggcttcctggctggctacggcatcatggggctgtacgtgtccatcgtgctggtcatcggcaagttcgtgcgcggattcttcagcgagatctcgcactccattatgttcgaggagctgccgtgcgtggaccgcatcctcaagctctgccaggacatcttcctggtgcgggagactcgggagctggagctggaggaggagttgtacgccaagctcatcttcctctaccgctcaccggagaccatgatcaagtggactcgtgagaaggagtaggagctgctgctggcgcccgagagggaaggagccggcctgctgggcagcgtggccacaaggggcggcactcctcaggccgggggagccactgccccgtccaaggccgccagctgtgatgcatcctcccggcctgcctgagccctgatgctgctgtcagagaaggacactgcgtccccacggcctgcgtggcgctgccgtcccccacgtgtactgtagagttttttttttaattaaaaaatgttttatttatacaaatggacaatcagaggccagtcccccgtccttgccttccggctccagtgtggtgtaccaggtggccactgcctgctgtcccggcaagcacgtcctcacgctcagctctggcccgcctcgtcgtcactgtcctcaatcagacagtcccggatctcctgcaagccccaggccctctgtgtgcggagctgggcctcagccaggatgtacggcggcagggggtccagtgagggccgcagggtctgcagaagctcctccttggcagtcagtgtcctcactgagcagaacagttgggaaagagcctcagtctgggcaggggcaggcggtcttgccaggttctgggggtccagcggg

SEQ ID NO: 1979 - DNA, 1271 bp, Homo sapiens
gttccggctggtgccgttcctggtggagctgcgggcagtgatggactgggtgtggacggacaccacgctgtccctgtccagctggatgtgtgtggaggacatctatgccaacatcttcatcatcaaatgcagccgagagacagagaaggttcatgaagatttgcccgttttcttctaaaagttctatagttttagctctgaagtttcgctctttgatccactttgagaaatacccgcagcccaaagggcagaagaagaagaagatcgtcaagtacggcatgggtggcctcatcatcctcttcctcatcgccatcatctggttcccgctgctcttcatgtcgctggtgcgctccgtggttggggttgtcaaccagcccatcgatgtcaccgtcaccctgaagctgggcggctatgagccgctgttcaccatgagcgcccagcagccgtccatcatccccttcacggcccaggcctatgaggagctgtcccggcagtttgacccccagccgctggccatgcagttcatcagccagtacagccctgaggacatcgtcacggcgcagattgagggcagctccggggcgctgtggcgcatcagtccccccagccgtgcccagatgaagcgggagctctacaacggcacggccgacatcaccctgcgcttcacctggaacttccagagggacctggcgaagggaggcactgtggagtatgccaacgagaagcacatgctggccctggcccccaacagcactgcacggcggcagctggccagcctgctcgagggcacctcggaccagtctgtggtcatccccaatctcttccccaagtacatccgtgcccccaacgggcccgaagccaaccctgtgaagcagctgcagcccaatgaggaggccgactacctcggcgtgcgtatccagctgcggagggagcagggtgcgggggccaccggcttcctcgaatggtgggtcatcgagctgcaggagtgccggaccgactgcaacctgctgcccatggtcattttcagtgacaagcatcatggggctgtacgtgtccatcgtgctggtcatcggcaagttcgtgcgcggattcttcagcgagatctcgcactccattatgttcgaggagctgccgtgcgtggaccgcatcctcaagctctgccaggacatcttcctggtgcgggagactcgggagctggagctggaggaggagttgtacgccaagctcatcttcctctaccgctcaccggagaccatgatcaagtggactcg

SEQ ID NO: 1980 - DNA, 8244 bp, Homo sapiens
atgctgggctcagttcgcctgtctgtggggtgggatggtgccacccttaggttgttgggaggacccaaggagagtgatgcctccagccatggcagctggcccagctccggcccgcagcctggctccttcagggccaggaacccccaggtcatggactccaaccctcgggctctcctgcttcccaggctgccagtgtccacacactctcaggcactgtcattggagccttttaaccacacgggaaagcaggcaggagccctgcctggtgtccacaccacactaaggtgccctgccacgggcttcgaacccaaccctggtgcacttgttgagcattggacgttcctggcagcctgcctgctccgcttcagcggactctcgctggtctacctgctcttcctgctgctgctgccctggttccccggccccacccgatgcggcctccaaaggctggacctgaaggacatccccaacgccatccggctggtggcccctgacctgggcatcttggtggtctcctctgtctgcctcggcatctgcgggcgccttgcaaggaacacccggcagagcccacatccacgggagctggatgatgatgagagggatgtggatgccagcccgacggcagggctgcaggaagcagcaacgctggcccctacacggaggtcacggctggccgctcgtttccgagtcacggcccactggctgctggtggcggctgggcgggtcctggccgtaacactgcttgcactggcaggcatcgcccacccctcggccctctccagtgtctacctgctgctcttcctggccctctgcacctggtgggcctgccactttcccatcagcactcggggcttcagcagactctgcgccgcggtggggtgcttcggcgccggccatctcatctgcctctactgctaccagatgcccttggcacaggctctgctcccgcctgccggcatctgggctagggtgctgggtctcaaggacttcgtgggtcccaccaactgctccagcccccacgcgctggtcctcaacaccggcctggactggcctgtgtatgccagccccggcgtcctcctgctgctgtgctacgccacggcctctctgcgcaagctccgcgcgtaccgcccctccggccagaggaaggaggcggcaaaggggtatgaggctcgggagctggagctagcagagctggaccagtggccccaggaacgggagtctgaccagcacgtggtgcccacagcacccgacaccgaggctgataactgcatcgtgcacgagctgaccggccagagctccctcctgcggcggcctgtgcggcccaagcgggctgagcccagggaggcgtctccgctccacagcctgggccacctcatcatggaccagagctatgtgtgcgcgctcattgccatgatggtatggagcatcacctaccacagctggctgaccttcgtactgctgctctgggcctgcctcatctggacggtgcgcagccgccaccaactggccatgctgtgctcgccctgcatcctgctgtatgggatgacgctgtgctgcctacgctacgtgtgggccatggacctgcgccctgagctgcccaccaccctgggccccgtcagcctgcgccagctggggctggagcacacccgctacccctgtctggaccttggtgccatgttgctctacaccctgaccttctggctcctgctgcgccagtttgtgaaagagaagctgctgaagtgggcagagtctccagctgcgctgacggaggtcaccgtggcagacacagagcccacgcggacgcagacgctgttgcagagcctgggggagctggtgaagggcgtgtacgccaagtactggatctatgtgtgtgctggcatgttcatcgtggtcagcttcgccggccgcctcgtggtctacaagattgtctacatgttcctcttcctgctctgcctcaccctcttccaggtctactacagcctgtggcggaagctgctcaaggccttctggtggctcgtggtggcctacaccatgctggtcctcatcgccgtctacaccttccagttccaggacttccctgcctactggcgcaacctcactggcttcaccgacgagcagctgggggacctgggcctggagcagttcagcgtgtccgagctcttctccagcatcctggtgcccggcttcttcctcctggcctgcatcctgcagctgcactacttccacaggcccttcatgcagctcaccgacatggagcacgtgtccctgcctggcacgcgcctcccgcgctgggctcacaggcaggatgcagtgagtgggaccccactgctgcgggaggagcagcaggagcatcagcagcagcagcaggaggaggaggaggaggaggaggactccagggacgaggggctgggcgtggccactccccaccaggccacgcaggtgcctgaaggggcagccaagtggggcctggtggctgagcggctgctggagctggcagccggcttctcggacgtcctctcacgcgtgcaggtgttcctgcggcggctgctggagcttcacgttttcaagctggtggccctgtacaccgtctgggtggccctgaaggaggtgtcggtgatgaacctgctgctggtggtgctgtgggccttcgccctgccctacccacgcttccggcccatggcctcctgcctgtccaccgtgtggacctgcgtcatcatcgtgtgtaagatgctgtaccagctcaaggttgtcaacccccaggagtattccagcaactgcaccgagcccttccccaacagcaccaacttgctgcccacggagatcagccagtccctgctgtaccgggggcccgtggaccctgccaactggtttggggtgcggaaagggttccccaacctgggctacatccagaaccacctgcaagtgctgctgctgctggtattcgaggccatcgtgtaccggcgccaggagcactaccgccggcagcaccagctggccccgctgcctgcccaggccgtgtttgccagcggcacccgccagcagctggaccaggatctgctcggctgcctcaagtacttcatcaacttcttcttctacaaattcgggctggagatctgcttcctgatggccgtgaacgtgatcgggcagcgcatgaactttctggtgaccctgcacggttgctggctggtggccatcctcacccgcaggcaccgccaggccattgcccgcctctggcccaactactgcctcttcctggcgctgttcctgctgtaccagtacctgctgtgcctggggatgcccccggccctgtgcattgattatccctggcgctggagccgggccgtccccatgaactccgcactcatcaagtggctgtacctgcctgatttcttccgggcccccaactccaccaacctcatcagcgactttctcctgctgctgtgcgcctcccagcagtggcaggtgttctcagctgagcgcacagaggagtggcagcgcatggctggcgtcaacaccgaccgcctggagccgctgcggggggagcccaaccccgtgcccaactttatccactgcaggtcctaccttgacatgctgaaggtggccgtcttccgatacctgttctggctggtgctggtggtggtgtttgtcacgggggccacccgcatcagcatcttcgggctgggctacctgctggcctgcttctacctgctgctcttcggcacggccctgctgcagagggacacacgggcccgcctcgtgctgtgggactgcctcattctgtacaacgtcaccgtcatcatctccaagaacatgctgtcgctcctggcctgcgtcttcgtggagcagatgcagaccggcttctgctgggtcatccagctcttcagccttgtatgcaccgtcaagggctactatgaccccaaggagatgatggacagagaccaggactgcctgctgcctgtggaggaggctggcatcatctgggacagcgtctgcttcttcttcctgctgctgcagcgccgcgtcttccttagccattactacctgcacgtcagggccgacctccaggccaccgccctgctagcctccaggggcttcgccctctacaacgctgccaacctcaagagcattgacttccaccgcaggatagaggagaagtccctggcccagctgaaaagacagatggagcgtatccgtgccaagcaggagaagcacaggcagggccgggtggaccgcagtcgcccccaggacaccctgggccccaaggaccccggcctggagccagggcccgacagtccagggggctcctccccgccacggaggcagtggtggcggccctggctggaccacgccacagtcatccactccggggactacttcctgtttgagtccgacagtgaggaagaggaggaggctgttcctgaagacccgaggccgtcggcacagagtgccttccagctggcgtaccaggcatgggtgaccaacgcccaggcggtgctgaggcggcggcagcaggagcaggagcaggcaaggcaggaacaggcaggacagctacccacaggaggtggtcccagccaggaggtggagccagcagagggccccgaggaggcagcggcaggccggagccatgtggtgcagagggtgctgagcacggcgcagttcctgtggatgctggggcaggcgctagtggatgagctgacacgctggctgcaggagttcacccggcaccacggcaccatgagcgacgtgctgcgggcagagcgctacctcctcacacaggagctcctgcagggcggcgaagtgcacaggggcgtgctggatcagctgtacacaagccaggccgaggccacgctgccaggccccaccgaggcccccaatgccccaagcaccgtgtccagtgggctgggcgcggaggagccactcagcagcatgacagacgacatgggcagccccctgagcaccggctaccacacgcgcagtggcagtgaggaggcagtcaccgaccccggggagcgtgaggctggtgcctctctgtaccagggactgatgcggacggccagcgagctgctcctggacaggcgcctgcgcatcccagagctggaggaggcagagctgtttgcggaggggcagggccgggcgctgcggctgctgcgggccgtgtaccagtgtgtggccgcccactcggagctgctctgctacttcatcatcatcctcaaccacatggtcacggcctccgccggctcgctggtgctgcccgtgctcgtcttcctgtgggccatgctgtcgatcccgaggcccagcaagcgcttctggatgacggccatcgtcttcaccgagatcgcggtggtcgtcaagtacctgttccagtttgggttcttcccctggaacagccacgtggtgctgcggcgctacgagaacaagccctacttcccgccccgcatcctgggcctggagaagactgacggctacatcaagtacgacctggtgcagctcatggcccttttcttccaccgctcccagctgctgtgctatggcctctgggaccatgaggaggactcaccatccaaggagcatgacaagagcggcgaggaggagcagggagccgaggaggggccaggggtgcctgcggccaccaccgaagaccacattcaggtggaagcgagggtcggacccacggacgggaccccagaaccccaagtggagctcaggccccgtgatacgaggcgcatcagtctacgttttagaagaaggaagaaggagggcccagcacggaaaggagcggcagccatcgaagctgaggacagggaggaagaagagggggaggaagagaaagaggcccccacggggagagagaagaggccaagccgctctggaggaagagtaagggcggccgggcggcggctgcagggcttctgcctgtccctggcccagggcacatatcggccgctacggcgcttcttccacgacatcctgcacaccaagtaccgcgcagccaccgacgtctatgccctcatgttcctggctgatgttgtcgacttcatcatcatcatttttggcttctgggcctttgggaagcactcggcggccacagacatcacgtcctccctatcagacgaccaggtacccgaggctttcctggtcatgctgctgatccagttcagtaccatggtggttgaccgcgccctctacctgcgcaagaccgtgctgggcaagctggccttccaggtggcgctggtgctggccatccacctatggatgttcttcatcctgcccgccgtcactgagaggatgttcaaccagaatgtggtggcccagctctggtacttcgtgaagtgcatctacttcgccctgtccgcctaccagatccgctgcggctaccccacccgcatcctcggcaacttcctcaccaagaagtacaatcatctcaacctcttcctcttccaggggttccggctggtgccgttcctggtggagctgcgggcagtgatggactgggtgtggacggacaccacgctgtccctgtccagctggatgtgtgtggaggacatctatgccaacatcttcatcatcaaatgcagccgagagacagagaagaaatacccgcagcccaaagggcagaagaagaagaagatcgtcaagtacggcatgggtggcctcatcatcctcttcctcatcgccatcatctggttcccgctgctcttcatgtcgctggtgcgctccgtggttggggttgtcaaccagcccatcgatgtcaccgtcaccctgaagctgggcggctatgagccgctgttcaccatgagcgcccagcagccgtccatcatccccttcacggcccaggcctatgaggagctgtcccggcagtttgacccccagccgctggccatgcagttcatcagccagtacagccctgaggacatcgtcacggcgcagattgagggcagctccggggcgctgtggcgcatcagtccccccagccgtgcccagatgaagcgggagctctacaacggcacggccgacatcaccctgcgcttcacctggaacttccagagggacctggcgaagggaggcactgtggagtatgccaacgagaagcacatgctggccctggcccccaacagcactgcacggcggcagctggccagcctgctcgagggcacctcggaccagtctgtggtcatccccaatctcttccccaagtacatccgtgcccccaacgggcccgaagccaaccctgtgaagcagctgcagcccaatgaggaggccgactacctcggcgtgcgtatccagctgcggagggagcagggtgcgggggccaccggcttcctcgaatggtgggtcatcgagctgcaggagtgccggaccgactgcaacctgctgcccatggtcattttcagtgacaaggtcagcccaccgagcctcggcttcctggctggctacggcatcatggggctgtacgtgtccatcgtgctggtcatcggcaagttcgtgcgcggattcttcagcgagatctcgcactccattatgttcgaggagctgccgtgcgtggaccgcatcctcaagctctgccaggacatcttcctggtgcgggagactcgggagctggagctggaggaggagttgtacgccaagctcatcttcctctaccgctcaccggagaccatgatcaagtggactcgtgagaaggagtaggagctgctgctggcgcccgagagggaaggagccggcctgctgggcagcgtggccacaaggggcggcactcctcaggccgggggagccactgccccgtccaaggccgccagctgtgatgcatcctcccggcctgcctgagccctgatgctgctgtcagagaaggacactgcgtccccacggcctgcgtggcgctgccgtcccccacgtgtactgtagagttttttttttaattaaaaaatgttttatttatacaaatggacaatcagaggccagtcccccgtccttgccttccggctccagtgtggtgtaccaggtggccactgcctgctgtcccggcaagcacgtcctcacgctcagctctggcccgcctcgtcgtcactgtcctcaatcagacagtcccggatctcctgcaagccccaggccctagagagaaagctgcagtgggcaccagccccgaggccccttacccacgcgccacggcagtgtgggccccagtacctctgtgtgcggagctgggcctcagccaggatgtacggcggcagggggtccagtgagggc

SEQ ID NO: 1981 - DNA, 1986 bp, Homo sapiens
gcgccggagcccaaaaacaaggactgcgcacgcgcggcggcaaggcccgggcattttgctgcgtcaccagccgccgcccggcctcaccacccctcgtttgcacgcacgcacgttcattctccgtcctcgcgccccttttcctacactttcctcttctccccgaccggaggagccgctctttccgcgcggtgcattctggggcccgaggtcgagcccgccgctgccgccgtcgcctgagggaagcgagaagaggccgcgaccggagagaaaaagcggagtcgccaccggagagaagtcgactccctagcagcagccgccgccagagaggcccgcccaccagttcgcccgtccccctgccccgttcacaatgcagcctgcttctgcaaagtggtacgatcgaagggactatgtcttcattgaattttgtgttgaagacagtaaggatgttaatgtaaattttgaaaaatccaaacttacattcagttgtctcggaggaagtgataattttaagcatttaaatgaaattgatctttttcactgtattgatccaaatgattccaagcataaaagaacggacagatcaattttatgttgtttacgaaaaggagaatctggccagtcatggccaaggttaacaaaagaaagggcaaagcttaattggcttagtgtcgacttcaataattggaaagactgggaagatgattcagatgaagacatgtctaattttgatcgtttctctgagatgatgaacaacatgggtggtgatgaggatgtagatttaccagaagtagatggagcagatgatgattcacaagacagtgatgatgaaaaaatgccagatctggagtaaggaatattgtcatcacctggattttgagaaagaaaaataacttctctgcaagatttcataattgagagaattcctgagttgatagctctaaaggcagatatgctgtatttgcctactttaacccatttttcaacctgtttgttttttaaaaggcttcactaagggttgatatgtaccattgtatggggcaattttaagtcagctaaggcaataaccttatgcatgaacatttcccagactttcatgaagctgttgaggtcctaggcaattaatgcagcagttgcgataaataaaaacatctcacctaagtctccttttcttcataacatagatactgacatgataggaagctctcagcttagggaaagagaataaattttagattatagaacatggattcaaaagtgactggaacaaattggctgacaccttactggtaacctgctattcttctggtgttatccttcaggattgttccactaaaatttatttttcaaaaaatttacttcacattattctatgtaagtgatgacttgtcagtgttccaggtgtatcttagctaaaactagagaatgccctaacttagatggtttttgaagcctatacaattggtattgtttgacccttaagcttttacatctcttagcatggaggacgaagaaagctgtacattgttgcttgagagtctgtacatttagtccagatttgtatttgcactgtcagtatggcaaatgagtgaaaaatgtttaatacactattggattttttatttcctttttttgattcagcttatacccgggctgaaaacctcaatttatgttcatgacagtggggatttttttaaatgtctacattctttctaataaactgttggaagacttcttggctgtccttttaagtgtctggcttactgtaatttttatgtatttaccatttactggaatggagtttatttgaggaagaatttgggattattcctctgtttgaaaaaagaggcttgctgtaatgtcacaggaaaccttttaaaagtggatctgtaatagcatattgtagatgcactttgcagcagttggaaaagaaagtgttgtgtgatttgattgaaataaaactaaatgtgttgtcctcctaaatctttg

SEQ ID NO: 1982 - DNA, 1986 bp, Homo sapiens; identical to SEQ ID NO: 1981

SEQ ID NO: 1983 - DNA, 2483 bp, Homo sapiens
ccggcctcaccacccctcgtttgcacgcacgcacgttcattctccgtcctcgcgccccttttcctacactttcctcttctccccgaccggaggagccgctctttccgcgcggtgcattctggggcccgaggtcgagcccaagcggagtcgccaccggagagaagtcgactccctagcagcagccgccgccagagaggcccgcccaccagttcgcccgtccccctgccccgttcacaatgtgagtgcgacaccccgccgagggaaggtcgccgagtgaggccgaggccgcgttgggggctccctggaagcggccccctagcctttctcgcatcggtggtggcagtcgttcctgcctgggggcgggaggtccaggatccttgttccggttaccgttggcgggtggaggacatttttcctccagatgtctgcttcccccacccctgaaccgttccttggcttccccatgccggaaatcctacttttacccctttggctgtctgggctactcgcctctttcggtaacttcaccctaggccttaagctcccggtagctgctcgccatgcggcgccctgaagcgtgaaccttcgtgggtcgcctctcggctgcttgggcgctccggttctgttgctttgtggtcccggggccaggccctgagtcgagtgcacctgtggtgggtgccgccaggtgcctggcggagctcctgggagagccccacgcggacctcgccgtgagctgcaggtactgctaggcaactagaaggaagccatgcccacgccgcaacatacttccctctccagtgtctgggtttcttgagtgtgggtacttccagtccgcctcctaactccagtctcttgaaaacacgggaggttgccaaaactcagccgcttccctggcagcgaggaggagttaccattgagcaggtagttccgcacgtgtcgactttggaaagatacggacattttctgtgtttcatgttctacttgaggcagcctgcttctgcaaagtggtacgatcgaagggactatgtcttcattgaattttgtgttgaagacagtaaggatgttaatgtaaattttgaaaaatccaaacttacattcagttgtctcggaggaagtgataattttaagcatttaaatgaaattgatctttttcactgtattgatccaaatgattccaagcataaaagaacggacagatcaattttatgttgtttacgaaaaggagaatctggccagtcatggccaaggttaacaaaagaaagggcaaagcttaattggcttagtgtcgacttcaataattggaaagactgggaagatgattcagatgaagacatgtctaattttgatcgtttctctgagatgatgaacaacatgggtggtgatgaggatgtagatttaccagaagtagatggagcagatgatgattcacaagacagtgatgatgaaaaaatgccagatctggagtaaggaatattgtcatcacctggattttgagaaagaaaaataacttctctgcaagatttcataattgagagaattcctgagttgatagctctaaaggcagatatgctgtatttgcctactttaacccatttttcaacctgtttgtttttcagctaaggcaataaccttatgcatgaacatttcccagactttcatgaagctgttgaggtcctaggcaattaatgcagcagttgcgataaataaaaacatctcacctaagtctccttttcttcataacatagatactgacatgataggaagctctcagcttagggaaagagaataaattttagattatagaacatggattcaaaagtgactggaacaaattggctgacaccttactggtaacctgctattcttctggtgttatccttcaggattgttccactaaaatttatttttcaaaaaatttacttcacattattctatgtaagtgatgacttgtcagtgttccaggtgtatcttagctaaaactagagaatgccctaacttagatggtttttgaagcctatacaattggtattgtttgacccttaagcttttacatctcttagcatggaggacgaagaaagctgtacattgttgcttgagagtctgtacatttagtccagatttgtatttgcactgtcagtatggcaaatgagtgaaaaatgtttaatacactattggattttttatttcctttttttgattcagcttatacccgggctgaaaacctcaatttatgttcatgacagtggggatttttttaaatgtctacattctttctaataaactgttggaagacttcttggctgtccttttaagtgtctggcttactgtaatttttatgtatttaccatttactggaatggagtttatttgaggaagaatttgggattattcctctgtttgaaaaaagaggcttgctgtaatgtcacaggaaaccttttaaaagtggatctgtaatagcatattgtagatgcactttgcagcag

SEQ ID NO: 1984 - DNA, 1986 bp, Homo sapiens; identical to SEQ ID NO: 1981

SEQ ID NO: 1985 - DNA, 1994 bp, Homo sapiens
ggccattacggccggggacccctcgtttgcacgcacgcacgttcgttctccgtcctcgcgccccttttcctacactttcctcttctccccgaccggaggagccgctctttccgcgcggtgcattctggggaccgaggtcgagcccgccgctgccgccgtcgcctgagggaagcgagaagaggccgcgaccggagagaaaaagcggagtcgccactggagaggagtcgactgcctagcagcagccgccccagagaggcccgcccacccgttcgcccgtccccctgccccgttcacaatgcaacctgcttctgcaaagtggtacgatcgaagggactacgtcttcattgaattttgtgttgaagacagtaaggatgttaatgtaaattttgaaaaatccaaacttacattcagttgtctcggaggaagtgataattttaagcatttaaatgaaattgatctttttcactgtattgatccaaatgattccaagcataaaagaacggacagatcaattttatgttgtttacgaaaaggagaatctggccagtcatggccaaggttaacaaaagaaagggcaaagcttaattggcttagtgtcgacttcaataattggaaagactgggaagatgattcagatgaagacatgtctaattttgatcgtttctctgagatgatgaacaacatgggtggtgatgaggatgtagatttaccagaagtagatggagcagatgatgattcacaagacagtgatgatgaaaaaatgccagatctggagtaaggaatattgtcatcacctggattttgagaaagaaaaacaacttctttgcaagatttcataattgagagaattcctgagttgatagctctaaaggcagatgctgtatttgcctactttaacccatttttcaacctgtttgttttttaaaaggcttcactaagggttgatatgtaccattgtatggggcaattttaagtcagctaaggcaataaccttatgcatgaacatttcccagactttcatgaagctgttgaggtcctaggcaattaatgcagcagttgtgataaataaaaacatctcacctaagtctccttttcttcataacatagatactgacatgataggaagctctcagcttagggaaagagaataaattttagattatagaacatggattcaaaagtggctggaacaaattggctgacaccttactggtaacctgctattcctctggtgttatccttcaggattgttccactaaaatttatttttcaaaagatttacttcacattattctatgtaagtgatcacttgtcagtgttccaggtgtatcttagctaaaactagagaatgccctaacttagatggtttttgaagcctgtacatttggtatcgtttgacccttaagcttttacatctcttagcatggaggacgaagaaagctgtacattgttgcttgagagtctgtacatttagtccagatttgtatttgcactgtcagtatggcaaatgagtgaaaaatgtttaatacactattggattttttatttctctttttgattcagcttataccagggctgaaaacctcaatttatgttcatgacagtggggatttttttaaatgtctacattctttctaataaactgttggaagacttcttggctgtccttttaagtgtctggcttactgtaatttttatgtatttaccatttactggaatggagtttatttgaggaagaatttgggattattcctctgtttgaaaaagaggcttgctgtaatgtcacaggaaaccttttaaaagtgtatctgtaatagcatattgtagatgcactttgcagcagttggaaaagaaagtgttgtgatttgattgaaataaaactaaatgtgttgtcctcctctaaaaaaaaaaaaaaaaaaaaaaaaaaaaaaaaaaaaaaaaaaaaaaaaaaaaaaaaaaaaaaaaaaaaaaaaaaaaaaaaaaaaaaaaaaaaa

SEQ ID NO: 1986 - DNA, 1986 bp, Homo sapiens; identical to SEQ ID NO: 1981

SEQ ID NO: 1987 - DNA, 2129 bp, Homo sapiens
ccgcgcgctccaggccggtcgctccaccccccggctcccgggactgtggactccacgaccctgtcctcggccctgtccgcgccgaagcagcccgggactgcgcagcgccccgcgtgccgacatgggaagtctctttctcatttgcctttgcattcaagcaaagaagatgcttatgatggagtcacatctgaaaacatgaggaatggactggttaatagtgaagtccataatgaagatggaagaaatggagatgtctctcagtttccatatgtggaatttacaggaagagatagtgtcacctgccctacttgtcagggaacaggaagaattcctagggggcaagaaaaccaactggtggcattgattccatatagtgatcagagattaaggccaagaagaacaaagctgtatgtgatggcttctgtgtttgtctgtctactcctttctggattggctgtgtttttccttttccctcgctctatcgacgtgaaatacattggtgtaaaatcagcctatgtcagttatgatgttcagaagcgtacaatttatttaaatatcacaaacacactaaatataacaaacaataactattactctgtcgaagttgaaaacatcactgcccaagttcaattttcaaaaacagttattggaaaggcacgcttaaacaacataagcattattggtccacttgatatgaaacaaattgattacacagtacctaccgttatagcagaggaaatgagttatatgtatgatttctgtactctgatatccatcaaagtgcataacatagtactcatgatgcaagttactgtgacaacaacatactttggccactctgaacagatatcccaggagaggtatcagtatgtcgactgtggaagaaacacaacttatcagttggggcagtctgaatatttaaatgtacttcagccacaacagtaaaaactggaagagatggatttaaagaagaaatatctattgatatttcctatactctcaatgaagaggtatttcctaataggagaccttaaattgaacaaacctaaagtttacacttctaagagtacagttaaaagtatgtggacctgcagttcttgtaactctccactctgtgttaatgatatatttgtactaggatcttttacttgaatctaaatttactggttgatttccttctccagcctatcccctacagggaaaagctgatacttcccctatagtacaataaataattatttaaaagtcatagctccagtcactactgaaaacataattttggtgataaacataatttgagaaacttaatttctgaatgtttttatagaaaattactgaaaatctattactcatggaagacttttaaagagtaaccttttttcctgttttataaattcccattgttatatggtagtatttcagctacacaatattttagcttttagctagacatttataggttttcatttgttgaaatggtaatcatctgcatgtttttgtcacttatttcaggttagtgattgcctaacacttataagccaaaataatctttgcaaaattccatacctaaaattttgaaagcccctaatgttttcacacatctttctgtattagttatagttttgtgaaatctttgtgtgatcttcaaacattatcatttaatgtacaatactgtaaataaactgtgcatggcttttatacagctttagtaaatgtcaaataaagtggtacagactcattacaacaagtttctcataaaaatacaataaataggaaaatgaaattcagaaacccatagactgggaataggttccagttacagcttggatctggcataaaataaatttgaaataaaatattttgatgctccatttttttatgttgcttttcatactaaagaatggtgtagacttgttttgcaactgttaggtacccagttatcaattttatcaatgttttagaggaggaaattatttttttggtagaaattgttcaagaaatccttaattgaatgtcattaaatgatggtggccaaaataaaacctatttagaaatttaaaaaaaaaaaaaaaaaaaaaaaaaaaaaaaaaaaaaaaaaaaaaaaaaaaaaaaaaaaaaaaaaaaaaaaa

SEQ ID NO: 1988 - DNA, 1928 bp, Homo sapiens
ggacgcgtgggcggtcgctccaccccccggctcccgggactgtggactccacgaccctgtcctcggccctgtccgcgccgaagcagcccgggactgcgcagcgccccgcgtgccgacatgggaaagtctctttctcatttgcctttgcattcaagcaaagaagatgcttatgatggagtcacatctgaaaacatgaggaatggactggttaatagtgaagtccataatgaagatggaagaaatggagatgtctctcagtttccatatgtggaatttacaggaagagatagtgtcacctgccctacttgtcagggaacaggaagaattcctagggggcaagaaaaccaactggtggcattgattccatatagtgatcagagattaaggccaagaagaacaaagctgtatgtgatggcttctgtgtttgtctgtctactcctttctggattggctgtgtttttccttttccctcgctctatcgacgtgaaatacattggtgtaaaatcagcctatgtcagttatgatgttcagaagcgtacaatttatttaaatatcacaaacacactaaatataacaaacaataactattactctgtcgaagttgaaaacatcactgcccaagttcaattttcaaaaacagttattggaaaggcacgcttaaacaacataagcattattggtccacttgatatgaaacaaattgattacacagtacctaccgttatagcagaggaaatgagttatatgtatgatttctgtactctgatatccatcaaagtgcataacatagtactcatgatgcaagttactgtgacaacaacatactttggccactctgaacagatatcccaggagaggtatcagtatgtcgactgtggaagaaacacaacttatcagttggggcagtctgaatatttaaatgtacttcagccacaacagtaaaaactggaagagatggatttaaagaagaaatatctattgatatttcctatactctcaatgaagaggtatttcctaataggagaccttaaattgaacaaacctaaagtttacacttctaagagtacagttaaaagtatgtggacctgcagttcttgtaactctccactctgtgttaatgatatatttgtactaggatcttttacttgaatctaaatttactggttgatttccttctccagcctatcccctacagggaaaagctgatacttcccctatagtacaataaataattatttaaaagtcatagctccagtcactactgaaaacataattttggtgataaacataatttgagaaacttaatttctgaatgtttttatagaaaattactgaaaatctattactcatggaagacttttaaagagtaaccttttttcctgttttataaattcccattgttatatggtagtatttcagctacacaatattttagcttttagctagacatttataggttttcatttgttgaaatggtaatcatctgcatgtttttgtcacttatttcaggttagtgattgcctaacacttataagccaaaataatctttgcaaaattccatacctaaaattttgaaagcccctaatgttttcacacatctttctgtattagttatagttttgtgaaatctttgtgtgatcttcaaacattatcatttaatgtacaatactgtaaataaactgtgcatggcttttatacagctttagtaaatgtcaaataaagtggtacagactcattacaacaagtttctcataaaaatacaataaataggaaaatgaaattcagaaacccatagactgggaataggttccagttacagcttggatctggcataaaataaatttgaaataaaatattttgatgctccaaaaaaaaaaaaaaaaaaaaaaaaaaaaaaaaaaaaaaaaaaaaaaaaaaaaaaaaaaaaa

SEQ ID NO: 1989 - DNA, 2619 bp, Homo sapiens
ggatccaggcgcgtagcggagatcccaggatcctgggtgctgtctgggcccgctccccaccatgacctcctcggggcctggaccccggttcctgctgctgctgccgctgctgctgccccctgcggcctcagcctccgaccggccccggggccgagacccggtcaacccagagaagctgctggtgatcactgtggccacagctgaaaccgaggggtacctgcgtttcctgcgctctgcggagttcttcaactacactgtgcggaccctgggcctgggagaggagtggcgagggggtgatgtggctcgaacagttggtggaggacagaaggtccggtggttaaagaaggaaatggagaaatacgctgaccgggaggatatgatcatcatgtttgtggatagctacgacgtgattctggccggcagccccacagagctgctgaagaagttcgtccagagtggcagccgcctgctcttctctgcagagagcttctgctggcccgagtgggggctggcggagcagtaccctgaggtgggcacggggaagcgcttcctcaattctggtggattcatcggttttgccaccaccatccaccaaatcgtgcgccagtggaagtacaaggatgatgacgacgaccagctgttctacacacggctctacctggacccaggactgagggagaaactcagccttaatctggatcataagtctcggatctttcagaacctcaacggggctttagatgaagtggttttaaagtttgatcggaaccgtgtgcgtatccggaacgtggcctacgacacgctccccattgtggtccatggaaacggtcccactaagctgcagctcaactacctgggaaactacgtccccaatggctggactcctgagggaggctgtggcttctgcaaccaggaccggaggacactcccgggggggcagcctcccccccgggtgtttctggccgtgtttgtggaacagcctactccgtttctgccccgcttcctgcagcggctgctactcctggactatccccccgacagggtcacccttttcctgcacaacaacgaggtcttccatgaaccccacatcgctgactcctggccgcagctccaggaccacttctcagctgtgaagctcgtggggccggaggaggctctgagcccaggcgaggccagggacatggccatggacctgtgtcggcaggaccccgagtgtgagttctacttcagcctggacgccgacgctgtcctcaccaacctgcagaccctgcgtatcctcattgaggagaacaggaaggtgatcgcccccatgctgtcccgccacggcaagctgtggtccaacttctggggcgccctgagccccgatgagtactacgcccgctccgaggactacgtggagctggtgcagcggaagcgagtgggtgtgtggaatgtaccatacatctcccaggcctatgtgatccggggtgataccctgcggatggagctgccccagagggatgtgttctcgggcagtgacacagacccggacatggccttctgtaagagctttcgagacaagggcatcttcctccatctgagcaatcagcatgaatttggccggctcctggccacttccagatacgacacggagcacctgcaccccgacctctggcagatcttcgacaaccccgtcgactggaaggagcagtacatccacgagaactacagccgggccctggaaggggaaggaatcgtggagcagccatgcccggacgtgtactggttcccactgctgtcagaacaaatgtgtgatgagctggtggcagagatggagcactacggccagtggtcaggcggccggcatgaggattcaaggctggctggaggctacgagaatgtgcccaccgtggacatccacatgaagcaggtggggtacgaggaccagtggctgcagctgctgcggacgtatgtgggccccatgaccgagagcctgtttcccggttaccacaccaaggcgcgggcggtgatgaactttgtggttcgctaccggccagacgagcagccgtctctgcggccacaccacgactcatccaccttcaccctcaacgttgccctcaaccacaagggcctggactatgagggaggtggctgccgcttcctgcgctacgactgtgtgatctcctccccgaggaagggctgggcactcctgcaccccggccgcctcacccactaccacgaggggctgccaacgacctggggcacacgctacatcatggtgtcctttgtcgacccctgacactcaaccactctgccaaacctgccctgccattgtgcctttttagggggcctggcccccgtcctgggagttgggggatgggtctctctgtctccccacttcctgagttcatgttccgcgtgcctgaactgaatatgtcaccttgctcccaagacacggccctctcaggaagctcccggagtccccgcctctctcctccgcccacaggggttcgtgggcacagggcttctggggactccccgcgtgataaattattaatgttccgcagtctcactctgaataaaggacagtttgtaaaaaaaaaaaaaaaaaaaaaaaaaaaaaaaaaaaaaaaaaaaaaa

SEQ ID NO: 1990 - DNA, 3128 bp, Homo sapiens
cagcccctggagcttctccgggcagaagaggaggtgggctggactgtcaaagaaagtggctggcttccgtgggcaatccgaggttcctagtggccctctgcagaaagctgaactcccagttcccccaggcctccgtcccgcggcggactcctaggcttcctccctccctgtcgccgccagcctctcgctctccccgtcttccgcccgcactctctgggcagggctgcggccaggacccgcccccgcgtcccgcccgaccctccgccaggggtcacttcccctgtccaggtttcagcttccacatgtgtcaagcggctggctcagcccagagtccctgtctcccgcccgccggcccgagccgccgcccctcccccgcctcccgtgcgcccgggacaatcctcgccttgtctgtggcgccggcatctggagctttctgtagcctccggatacgcctttttttcagggcgtagccccagccaagctgctccccgcggcggccgcacagcagcccgagcgccccctttccagagctcccctccggagctgggatccaggcgcgtagcggagatcccaggatcctgggtgctgtctgggcccgctccccaccatgacctcctcggggcctggaccccggttcctgctgctgctgccgctgctgctgccccctgcggcctcagcctccgaccggccccggggccgagacccggtcaacccagagaagctgctggtgatcactgtggccacagctgaaaccgaggggtacctgcgtttcctgcgctctgcggagttcttcaactacactgtgcggaccctgggcctgggagaggagtggcgagggggtgatgtggctcgaacagttggtggaggacagaaggtccggtggttaaagaaggaaatggagaaatacgctgaccgggaggatatgatcatcatgtttgtggatagctacgacgtgattctggccggcagccccacagagctgctgaagaagttcgtccagagtggcagccgcctgctcttctctgcagagagcttctgctggcccgagtgggggctggcggagcagtaccctgaggtgggcacggggaagcgcttcctcaattctggtggattcatcggttttgccaccaccatccaccaaatcgtgcgccagtggaagtacaaggatgatgacgacgaccagctgttctacacacggctctacctggacccaggactgagggagaaactcagccttaatctggatcataagtctcggatctttcagaacctcaacggggctttagatgaagtggttttaaagtttgatcggaaccgtgtgcgtatccggaacgtggcctacgacacgctccccattgtggtccatggaaacggtcccactaagctgcagctcaactacctgggaaactacgtccccaatggctggactcctgagggaggctgtggcttctgcaaccaggaccggaggacactcccgggggggcagcctcccccccgggtgtttctggccgtgtttgtggaacagcctactccgtttctgccccgcttcctgcagcggctgctactcctggactatccccccgacagggtcacccttttcctgcacaacaacgaggtcttccatgaaccccacatcgctgactcctggccgcagctccaggaccacttctcagctgtgaagctcgtggggccggaggaggctctgagcccaggcgaggccagggacatggccatggacctgtgtcggcaggaccccgagtgtgagttctacttcagcctggacgccgacgctgtcctcaccaacctgcagaccctgcgtatcctcattgaggagaacaggaaggtgatcgcccccatgctgtcccgccacggcaagctgtggtccaacttctggggcgccctgagccccgatgagtactacgcccgctccgaggactacgtggagctggtgcagcggaagcgagtgggtgtgtggaatgtaccatacatctcccaggcctatgtgatccggggtgataccctgcggatggagctgccccagagggatgtgttctcgggcagtgacacagacccggacatggccttctgtaagagctttcgagacaagggcatcttcctccatctgagcaatcagcatgaatttggccggctcctggccacttccagatacgacacggagcacctgcaccccgacctctggcagatcttcgacaaccccgtcgactggaaggagcagtacatccacgagaactacagccgggccctggaaggggaaggaatcgtggagcagccatgcccggacgtgtactggttcccactgctgtcagaacaaatgtgtgatgagctggtggcagagatggagcactacggccagtggtcaggcggccggcatgaggattcaaggctggctggaggctacgagaatgtgcccaccgtggacatccacatgaagcaggtggggtacgaggaccagtggctgcagctgctgcggacgtatgtgggccccatgaccgagagcctgtttcccggttaccacaccaaggcgcgggcggtgatgaactttgtggttcgctaccggccagacgagcagccgtctctgcggccacaccacgactcatccaccttcaccctcaacgttgccctcaaccacaagggcctggactatgagggaggtggctgccgcttcctgcgctacgactgtgtgatctcctccccgaggaagggctgggcactcctgcaccccggccgcctcacccactaccacgaggggctgccaacgacctggggcacacgctacatcatggtgtcctttgtcgacccctgacactcaaccactctgccaaacctgccctgccattgtgcctttttagggggcctggcccccgtcctgggagttgggggatgggtctctctgtctccccacttcctgagttcatgttccgcgtgcctgaactgaatatgtcaccttgctcccaagacacggccctctcaggaagctcccggagtccccgcctctctcctccgcccacaggggttcgtgggcacagggcttctggggactccccgcgtgataaattattaatgttccgcagtctcactctgaataaaggacagtttgtaagtcttga

SEQ ID NO: 1991 - DNA, 3128 bp, Homo sapiens; identical to SEQ ID NO: 1990

SEQ ID NO: 1992 - DNA, 16382 bp, Homo sapiens; identical to SEQ ID NO: 1612

SEQ ID NO: 1993 - DNA, 2239 bp, Homo sapiens
ccgaacactgtggcacaagctcaggccgcagacggtgccggccccgaggacgacactgaggcctcccgtgccgccgccccagccgaaggccctcctggcggcatccagccggaagccgcagaaccaaaacccacggccgaagccccgaaggccccccgagtggaggagatccctcagcgcatgaccaggaaccgggcgcagatgctcgcgaaccagagcaagcagggcccgcccccctccgagaaggagtgcgcccccacccctgccccggtcaccagggccaaggcccgcggctccgaggaggacgacgcccaggcccagcatccgcgcaaacgccgctttcagcgcttcacccagcagctgcagcagcagctgaacacgtccacgcagcagactcgggaggtgatccagcagacgctggccgccatcgtggacgccatcaagctggatgccatcgagccctaccacagcgacagggccaacccctacttcgaatacctgcagatcaggaagaagatcgaggagaagcgcaagatcctgtgctgtatcacgccgcaggcgccccagtgctacgccgagtacgtcacctacacgggctcctacctcctggacggcaagccgctcagcaagctccacatccccgtggtgagtgcggggcccgggagagccactgccttctctctctgggatgcgtctggggcccctagtcacggcttcctccagcccgtcttgtcccactcatggcccttgacctctctcgaccttctgccacctgaggagacacagccccacttctgctgtggaggcaaaagccggaagctgcccagctgttctgcagacccgaggtccttcctccagctggtccgtgccaggcctcggtctcctgacctccccctcaccctgggtgcaccccggtcccactcgtgtggggctcccccttcacgccgctcactctcccctctccactccccgtccaccaggacggcctcacgagagccaccccctgtgtctcctgcccctgccccgcccccttctcccttggacccgcgtgggttccctgagcctccatacctgcacgatgagtcccttcccccacctcctcccttgggcttctgggacagcagagctgcagctcccttggggcagcttggtcctcggcccccagcctcaccttgttccacctgaccctgtcagcccagttccccaggcatcatccctacctctgcaggctcaggtgaaacatctcggaatcacccccactcccccagctccttgcgctacgtctgggcccaaaatagatccctccaaatggggccctgctctgagcacattcccatgagggctgcctgccctgtgcactctctgccctgggccgcggggcccgactgggttcccacctcctcctacccactggggtctttcccagcaggcacagggattcctcatgggggaggcagagcccatccgtctgtcctcggtgacggcctgagctgtgcacggcctcccctgccctcctgttctcaggccccccagggtccatccagccccagcgtgtggcgttctggctcttccctggagtctcctcccagaccacgcgactccactcacactgtgcctagcggactgtgtggttgatgcagccgtctcgcttgagtgtgttgtgttatgcccagaacaggcttgccgtcaccaacggccatttccttctggggattcctgggcactgaaactcgcaggtggcgtgaggtacagccaggggccctccacacgcgttggctctgtgggcccaggccgcctgaggcccctcgccgtgctggccctgacctggctcagctacccagcacccccctggtgaggatgacggggtctgctgagcttgccctgagggtgaggctgggtctgtgctgctggccgacatgtcagcgacgttgtgcaggatccaggagcgggcgccctcgggccccaccctgccaagctctgagctctgctcccagggagcacgaggggcactgcacccacggtgacctctgcggtctttcccttccccgcgagcctgaccccagccgtccccggggaggctcatccacagaagacagagacggcagttgggtcatgacattcagaaaaacctgccccaggatctctcctcagtaagaccttctgatcttctgaccttctgtgctttttgttgttttgttttctcgtttaatggatcataacactagtctgactgctgtag

SEQ ID NO: 1994 - DNA, 2267 bp, Homo sapiens
gagagctgcagagaggaggaggggtcggggaggcccggctttataaaggcggctggaacaaccctgcccgccagaccccgtcgcccggatcccctgagctgcccgccatcccacgtgaccgcgccgccccccagctccaccgctgacccacccccaggcccgctcgccatggccctcttcggggccctcttcctagcgctgctggcaggcgcacatgcagagttcccaggctgcaagatccgcgtcacctccaaggcgctggagctggtgaagcaggaggggctgcgctttctggagcaagagctggagactatcaccattccggacctgcggggcaaagaaggccacttctactacaacatctctgaggtgaaggtcacagagctgcaactgacatcttccgagctcgatttccagccacagcaggagctgatgcttcaaatcaccaatgcctccttggggctgcgcttccggagacagctgctctactggttcttctatgatgggggctacatcaacgcctcagctgagggtgtgtccatccgcactggtctggagctctcccgggatcccgctggacggatgaaagtgtccaatgtctcctgccaggcctctgtctccagaatgcacgcggccttcgggggaaccttcaagaaggtgtatgattttctctccacgttcatcacctcagggatgcgcttcctcctcaaccagcagatctgccctgtcctctaccacgcagggacggtcctgctcaactccctcctggacaccgtgcctgtgcgcagttctgtggacgagcttgttggcattgactattccctcatgaaggatcctgtggcttccaccagcaacctggacatggacttccggggggccttcttccccctgactgagaggaactggagcctccccaaccgggcagtggagccccagctgcaggaggaagagcggatggtgtatgtggccttctctgagttcttcttcgactctgccatggagagctacttccgggcgggggccctgcagctgttgctggtgggggacaaggtgccccacgacctggacatgctgctgagggccacctactttgggagcattgtcctgctgagcccagcagtgattgactccccattgaagctggagctgcgggtcctggccccaccgcgctgcaccatcaagccctctggcaccaccatctctgtcactgctagcgtcaccattgccctggtcccaccagaccagcctgaggtccagctgtccagcatgactatggacgcccgtctcagcgccaagatggctctccgggggaaggccctgcgcacgcagctggacctgcgcaggttccgaatctattccaaccattctgcactggagtcgctggctctgatcccattacaggcccctctgaagaccatgctgcagattggggtgatgcccatgctcaatgagcggacctggcgtggggtgcagatcccactacctgagggcatcaactttgtgcatgaggtggtgacgaaccatgcgggattcctcaccatcggggctgatctccactttgccaaagggctgcgagaggtgattgagaagaaccggcctgctgatgtcagggcgtccactgcccccacaccgtccacagcagctgtctgagccctcaatccccaagctggcagctgtcattcaggaccccaacccctctcagcccctcttttcccacattcatagcctgtagtgccccctctaacccccagtgccacagagaagacgggatttgaagctgtacccaatttaattccataatcaatctatcaattacagtccgtccaccacctccctgtgggctgtcctgagctctgttgggttcctgggatggaatcagtgcatcataaagggcattctttaagcagagaaggggccaggccaccccattcaggaactgctgcgggaataaagtgctaacttgcccccaggctgtctatgggagaccctgggcccagtctgggatgtacagggctctgggaagggggcagtcctggcggcagaacccggcctgcaggggcactttgcttagaagaggactctcctagcgggagaggctgggaggggctgcatcaggccgtggagctggttgctgtggtcatcagtatggctgcttgttcaggaagcgggagaacatggtgaaggcagcgaggggcttgtcggtgggaaccatgtggccggcgccctgaggagcaatgttcgtgagctcctgaccccaccattccctc

SEQ ID NO: 1995 - DNA, 2267 bp, Homo sapiens; identical to SEQ ID NO: 1994

SEQ ID NO: 1996 - DNA, 2267 bp, Homo sapiens; identical to SEQ ID NO: 1994

SEQ ID NO: 1997 - DNA, 1750 bp, Homo sapiens
gtggccgccgtcgcccggatcccctgagctgcccgccatcccacgtgaccgcgccgccccccagctccaccgctgagcccgctcgccatggccctcttcggggccctcttcctagcgctgctggcaggcgcacatgcagagttcccaggctgcaagatccgcgtcacctccaaggcgctggagctggtgaagcaggaggggctgcgctttctggagcaagagctggagactatcaccattccggacctgcggggcaaagaaggccacttctactacaacatctctgaggtgaaggtcacagagctgcaactgacatcttccgagctcgatttccagccacagcaggagctgatgcttcaaatcaccaatgcctccttggggctgcgcttccggagacagctgctctactggttcttctatgatgggggctacatcaacgcctcagctgagggtgtgtccatccgcactggtctggagctctcccgggatcccgctggacggatgaaagtgtccaatgtctcctgccaggcctctgtctccagaatgcacgcggccttcgggggaaccttcaagaaggtgtatgattttctctccacgttcatcacctcagggatgcgcttcctcctcaaccagcagatctgccctgtcctctaccacgcagggacggtcctgctcaactccctcctggacaccgtgcctgtgcgcagttctgtggacgagcttgttggcattgactattccctcatgaaggatcctgtggcttccaccagcaacctggacatggacttccggggggccttcttccccctgactgagaggaactggagcctccccaaccgggcagtggagccccagctgcaggaggaagagcggatggtgtatgtggccttctctgagttcttcttcgactctgccatggagagctacttccgggcgggggccctgcagctgttgctggtgggggacaaggtgccccacgacctggacatgctgctgagggccacctactttgggagcattgtcctgctgagcccagcagtgattgactccccattgaagctggagctgcgggtcctggccccaccgcgctgcaccatcaagccctctggcaccaccatctctgtcactgctagcgtcaccattgccctggtcccaccagaccagcctgaggtccagctgtccagcatgactatggacgcccgtctcagcgccaagatggctctccgggggaaggccctgcgcacgcagctggacctgcgcaggttccgaatctattccaaccattctgcactggagtcgctggctctgatcccattacaggcccctctgaagaccatgctgcagattggggtgatgcccatgctcaatgagcggacctggcgtggggtgcagatcccactacctgagggcatcaactttgtgcatgaggtggtgacgaaccatgcgggattcctcaccatcggggctgatctccactttgccaaagggctgcgagaggtgattgagaagaaccggcctgctgatgtcagggcgtccactgcccccacaccgtccacagcagctgtctgagccctcaatccccaagctggcagctgtcattcaggaccccaacccctctcagcccctcttttcccacattcatagcctgtagtgccccctctaacccccagtgccacagagaagacgggatttgaagctgtacccaatttaattccataatcaatctatcaattacagtccgtccaccacc

SEQ ID NO: 1998 - DNA, 2267 bp, Homo sapiens; identical to SEQ ID NO: 1994

SEQ ID NO: 1999 - DNA, 2267 bp, Homo sapiens; identical to SEQ ID NO: 1994

SEQ ID NO: 2000 - DNA, 2031 bp, Homo sapiens
gaggcccggctttataaaggcggctggaacaaccctgcccgccagaccccgtcgcccggatcccctgagctgcccgccatcccacgtgaccgcgccgccccccagctccaccgctgagcccgctcgccatggccctcttcggggccctcttcctagcgctgctggcaggcgcacatgcagagttcccaggctgcaagatccgcgtcacctccaaggcgctggagctggtgaagcaggaggggctgcgctttctggagcaagagctggagactatcaccattccggacctgcggggcaaagaaggccacttctactacaacatctctgaggtgaaggtcacagagctgcaactgacatcttccgagctcgatttccagccacagcaggagctgatgcttcaaatcaccaatgcctccttggggctgcgcttccggagacagctgctctactggttcttgaaggtgtatgattttctctccacgttcatcacctcagggatgcgcttcctcctcaaccagcagatctgccctgtcctctaccacgcagggacggtcctgctcaactccctcctggacaccgtgcctgtgcgcagttctgtggacgagcttgttggcattgactattccctcatgaaggatcctgtggcttccaccagcaacctggacatggacttccggggggccttcttccccctgactgagaggaactggagcctccccaaccgggcagtggagccccagctgcaggaggaagagcggatggtgtatgtggccttctctgagttcttcttcgactctgccatggagagctacttccgggcgggggccctgcagctgttgctggtgggggacaaggtgccccacgacctggacatgctgctgagggccacctactttgggagcattgtcctgctgagcccagcagtgattgactccccattgaagctggagctgcgggtcctggccccaccgcgctgcaccatcaagccctctggcaccaccatctctgtcactgctagcgtcaccattgccctggtcccaccagaccagcctgaggtccagctgtccagcatgactatggacgcccgtctcagcgccaagatggctctccgggggaaggccctgcgcacgcagctggacctgcgcaggttccgaatctattccaaccattctgcactggagtcgctggctctgatcccattacaggcccctctgaagaccatgctgcagattggggtgatgcccatgctcaatgagcggacctggcgtggggtgcagatcccactacctgagggcatcaactttgtgcatgaggtggtgacgaaccatgcgggattcctcaccatcggggctgatctccactttgccaaagggctgcgagaggtgattgagaagaaccggcctgctgatgtcagggcgtccactgcccccacaccgtccacagcagctgtctgagccctcaatccccaagctggcagctgtcattcaggaccccaacccctctcagcccctcttttcccacattcatagcctgtagtgccccctctaacccccagtgccacagagaagacgggatttgaagctgtacccaatttaattccataatcaatctatcaattacagtccgtccaccacctccctgtgggctgtcctgagctctgttgggttcctgggatggaatcagtgcatcataaagggcattctttaagcagagaaggggccaggccaccccattcaggaactgctgcgggaataaagtgctaacttgcccccaggctgtctatgggagaccctgggcccagtctgggatgtacagggctctgggaagggggcagtcctggcggcagaacccggcctgcaggggcactttgcttagaagaggactctcctagccgggagaacatggtgaaggcagcgaggggcttgtcggtgggaaccatgtggccggcgccctgaggagcaatgttcgtgagctcctgaccccaccattccctcctccccatataactgctcactcgggggcaattccttc

SEQ ID NO: 2001 - DNA, 2267 bp, Homo sapiens; identical to SEQ ID NO: 1994

SEQ ID NO: 2002 - DNA, 1259 bp, Homo sapiens
acatggcggccttctgtgcccgccccctccgctaacgggcacgttactccgtccgaacgcagtagacgaaggcggcggcgatggcggcggggatagtggcttctcgcagactccgcgacctactgacccggcgactgacaggctccaactacccgggactcagtattagccttcgcctcactggctcctctgcacaagaggcggcttccggagtagccctcggtgaagccccagaccacagctatgagtcccttcgtgtgacgtctgcgcagaaacatgttctgcatgtccagctcaaccggcccaacaagaggaatgccatgaacaaggtcttctggagagagatggtagagtgcttcaacaagatttcgagagacgctgactgtcgggcggtggtgatctctggtgcaggaaaaatgttcactgcaggtattgacctgatggacatggcttcggacatcctgcagcccaaaggagatgatgtggcccggatcagctggtacctccgtgacatcatcactcgataccaggagaccttcaacgtcatcgagaggtgccccaagcccgtgattgctgccgtccatgggggctgcattggcggaggtgtggaccttgtcaccgcctgtgacatccggtactgtgcccaggatgctttcttccaggtgaaggaggtggacgtgggtttggctgccgatgtaggaacactgcagcgcctgcccaaggtcatcgggaaccagagcctggtcaacgagctggccttcaccgcccgcaagatgatggctgacgaggccctgggcagtgggctggtcagccgggtgttcccagacaaagaggtcatgctggatgctgccttagcgctggcggccgagatttccagcaagagccccgtggcggtgcagagcaccaaggtcaacctgctgtattcccgcgaccattcggtggccgagagcctcaactacgtggcgtcctggaacatgagcatgctgcagacccaagacctcgtgaagtcggtccaggccacgactgagaacaaggaactgaaaaccgtcaccttctccaagctctgagagccctcgcgtcccaggccccagccagggggccggccttgtcccgcctcatccacagaaagggaggatgggcgatgacagttgtttctatgccttctgacccagtttcccagtttataactttatgacaatgagtttctcaagcccaaggccttatcttcaccccacaaacaataaagcaaagtaaagaac

SEQ ID NO: 2003 - DNA, 1259 bp, Homo sapiens; identical to SEQ ID NO: 2002

SEQ ID NO: 2004 - DNA, 1259 bp, Homo sapiens; identical to SEQ ID NO: 2002

SEQ ID NO: 2005 - DNA, 1259 bp, Homo sapiens; identical to SEQ ID NO: 2002

SEQ ID NO: 2006 - DNA, 2269 bp, Homo sapiens
ccacccccggccccgaagctccgccacccgccgccatgagtagctttggagctggcaaaaccaaagaagttatcttcagtgtggaggatggctccgtgaaaatgttcctgaggggccgccctgtgcccatgatgatcccagacgagctggcacccacctacagcctggacacacgctcggagctgccttcttgccggctcaagctggagtgggtctatggctaccgtggccgagactgccgggccaacctttatttgctgcccaccggggagatagtgtactttgtggcctccgtagccgtgctatacagcgtggaggagcagaggcagcgacactacctgggacacaacgatgacatcaaatgcttggccatccacccagatatggtcaccatcgccacgggacaggtggcgggaaccactaaggaagggaagccgctgccgccccacgtgcgcatctgggactcagtttccctctccaccttacacgtgctgggcttgggggtgtttgacagagccgtgtgctgtgtgggcttctccaaatctaatggaggcaacctgctgtgtgcagtggatgaatccaatgatcacatgctctcggtgtgggactgggccaaggagaccaaggtggtggatgtcaagtgctccaatgaggctgtattggtggccaccttccaccccacggaccccactgtgcttatcacctgcgggaaatctcacatctacttctggaccttggaggggggcagcttgagcaagcggcaaggcctctttgagaaacatgagaaaccgaagtatgtgctgtgtgtgacctttttggaaggtggcgacgtggtcacgggggactctggggggaacctctatgtttggggcaaaggtgggaaccgtatcacacaggcggtgctgggcgcccacgacggcggcgtgtttgggctctgcgccctgcgggacgggacgctggtgtctggagggggccgtgatcggcgggtggtcctctggggttctgactacagcaagctgcaggaagtggaggtccctgaggactttggccctgtgcgcaccgtggcagagggccacggagacacactgtacgtggggaccacccgcaattccatcctgcagggctccgtgcacacaggcttctcactgctggtccagggccatgtggaagagctgtggggcctggccacacaccccagtcgggcccagtttgtgacctgcgggcaggataagctggtgcatctatggagctcagattcccaccagcccctgtggagcaggatcatcgaggaccctgcccgctcagccggcttccaccccagtggctctgtcctggctgtgggtacagtgactggcagatggctgctgctggacacggagacccatgacctggtggctatccacacagacggcaatgaacagatctcagtggtcagcttctccccagacggggcgtacctggccgtgggctcccacgacaacttggtgtacgtgtacacggtggaccagggcggccgcaaggtcagccgcctgggcaagtgctcgggccattccagttttatcacccacctggattgggcccaggacagcagctgctttgtcaccaactccggggactatgagattctgtactgggacccggctacctgtaagcagatcaccagtgcggatgctgtgaggaacatggaatgggccacagctacttgtgtcctagggtttggggtgtttgggatctggtctgagggggcggacggcactgatatcaacgctgtggcccgctctcatgatgggaagttgctggcttcagctgatgactttggcaaagttcacctgtttagctacccctgctgtcagcctcgagccctcagccacaagtacggtggacacagcagccatgtgacaaatgtggccttcttgtgggatgacagcatggccctgaccacagggggcaaggacaccagtgtgctacagtggcgggtggtctgatgcggccagggaagagtcaggtgtcagggcaggaattctattttcgggagatgtctattgccgagtagagtaatatatacccagagtatgtctatagcagagggggttatgggggcgggagggtagactgacatacagaagtctctatttatccgggtgggaagagggagtcacatcgctttggggatccattggtgtttggtttggggtgttttttaagttttttcttttatatcatccagaaataaagacacgtacactaaaaaaaaaaaaaaaaaaaaaaa

SEQ ID NO: 2007 - DNA, 2249 bp, Homo sapiens
ccacccccggccccgaagctccgccacccgccgccatgagtagctttggagctggcaaaaccaaagaagttatcttcagtgtggaggatggctccgtgaaaatgttcctgaggggccgccctgtgcccatggtgatcccagacgagctggcacccacctacagcctggacacacgctcggagctgccttcttgccggctcaagctggagtgggtctatggctaccgtggccgagactgccgggccaacctttatttgctgcccaccggggagatagtgtactttgtggcctccgtagccgtgctatacagcgtggaggagcagaggcagcgacactacctgggacacaacgatgacatcaaatgcttggccatccacccagatatggtcaccatcgccacgggacaggtggcgggaaccactaaggaagggaagccgctgccgccccacgtgcgcatctgggactcagtttccctctccaccttacacgtgctgggcttgggggtgtttgacagagccgtgtgctgtgtgggcttctccaaatctaatggaggcaacctgctgtgtgcagtggatgaatccaatgatcacatgttctcagtgtgggactgggccaaggagaccaaggtggtggatgtcaagtgctccaatgaggctgtattggtggccaccttccaccccacggaccccactgtgcttatcacctgcgggaaatctcacatctacttctggaccttggaggggggcagcttgagcaagcggcaaggcctctttgagaaacatgagaaaccgaagtatgtgctgtgtgtgacctttttggaaggtggcgacgtggtcacgggggactctggggggaacctctatgtttggggcaaaggtgggaaccgtatcacacaggcggtgctgggcgcccacgacggcggcgtgtttgggctctgcgccctgcgggacgggacgctggtgtctggagggggccgtgatcggcgggtggtcctctggggttctgactacagcaagctgcaggaagtggaggtccctgaggactttggccctgtgcgcaccgtggcagagggccacggagacacactgtacgtggggaccacccgcaattccatcctgcagggctccgtgcacacaggcttctcactgctggtccagggccatgtggaagagctgtggggcctggccacacaccccagtcgggcccagtttgtgacctgcgggcaggataagctggtgcatctatggagctcagattcccaccagcccctgtggagcaggatcatcgaggaccctgcccgctcagccggcttccaccccagtggctctgtcctggctgtgggtacagtgactggcagatggctgctgctggacacggagacccatgacctggtggctatccacacagacggcaatgaacagatctcagtggtcagcttctccccagacggggcgtacctggccgtgggctcccacgacaacttggtgtacgtgtacacggtggaccagggcggccgcaaggtcagccgcctgggcaagtgctcgggccattccagttttatcacccacctggattgggcccaggacagcagctgctttgtcaccaactccggggactatgagattctgtactgggacccggctacctgtaagcagatcaccagtgcggatgctgtgaggaacatggaatgggccacagctacttgtgtcctagggtttggggtgtttgggatctggtctgagggggcggacggcactgatatcaacgctgtggcccgctctcatgatgggaagttgctggcttcagctgatgactttggcaaagttcacctgtttagctacccctgctgtcagcctcgagccctcagccacaagtacggtggacacagcagccatgtgacaaatgtggccttcttgtgggatgacagcatggccctgaccacagggggcaaggacaccagtgtgctacagtggcgggtggtctgatgcggccagggaagagtcaggtgtcagggcaggaattctattttcgggagatgtctattgccgagtagagtaatatatacccagagtatgtctatagcagagggggttatgggggcgggagggtagactgacatacagaagtctctatttatccgggtgggaagagggagtcacatcgctttggggatccattggtgtttggtttggggtgttttttaagttttttcttttatatcatccagaaataaagacacgtacactaag

SEQ ID NO: 2008 - DNA, 2859 bp, Homo sapiens
ccaagcaagaacagctaaaatgaaagccatcattcatcttactcttcttgctctcctttctgtaaacacagtcaccaaccaaggcaactcagctgatgctgtaacaaccacagaaactgcgactagtggtcctacagtagctgcagctgataccactgaaactaatttccctgaaactgctagcaccacagcaaatacaccttctttcccaacagctacttcacctgctccccccataattagtacacatagttcctccacaattcctacacctgctccccccataattagtacacatagttcctccacaattcctacacctactgctgcagacagtgagtcaaccacaaatgtaaattcattagctacctctgacataatcaccgcttcatctccaaatgatggattaatcacaatggttccttctgaaacacaaagtaacaatgaaatgtcccccaccacagaagacaatcaatcatcagggcctcccactggcaccgctttattggagaccagcaccctaaacagcacaggtcccagcaatccttgccaagatgatccctgtgcagataattcgttatgtgttaagctgcataatacaagtttttgcctgtgtttagaagggtattactacaactcttctacatgtaagaaaggaaaggtattccctgggaagatttcagtgacagtatcagaaacatttgacccagaagagaaacattccatggcctatcaagacttgcatagtgaaattactagcttgtttaaagatgtatttggcacatctgtttatggacagactgtaattcttactgtaagcacatctctgtcaccaagatctgaaatgcgtgctgatgacaagtttgttaatgtaacaatagtaacaattttggcagaaaccacaagtgacaatgagaagactgtgactgagaaaattaataaagcaattagaagtagctcaagcaactttctaaactatgatttgacccttcggtgtgattattatggctgtaaccagactgcggatgactgcctcaatggtttagcatgcgattgcaaatctgacctgcaaaggcctaacccacagagccctttctgcgttgcttccagtctcaagtgtcctgatgcctgcaacgcacagcacaagcaatgcttaataaagaagagtggtggggcccctgagtgtgcgtgcgtgcccggctaccaggaagatgctaatgggaactgccaaaagtgtgcatttggctacagtggactcgactgtaaggacaaatttcagctgatcctcactattgtgggcaccatcgctggcattgtcattctcagcatgataattgcattgattgtcacagcaagatcaaataacaaaacgaagcatattgaagaagagaacttgattgacgaagactttcaaaatctaaaactgcggtcgacaggcttcaccaatcttggagcagaagggagcgtctttcctaaggtcaggataacggcctccagagacagccagatgcaaaatccctattcaagacacagcagcatgccccgccctgactattagaatcataagaatgtggaacccgccatggcccccaaccaatgtacaagctattatttagagtgtttagaaagactgatggagaagtgagcaccagtaaagatctggcctccggggtttttcttccatctgacatctgccagcctctctgaatggaagttgtgaatgtttgcaacgaatccagctcacttgctaaataagaatctatgacattaaatgtagtagatgctattagcgcttgtcagagaggtggttttcttcaatcagtacaaagtactgagacaatggttagggttgttttcttaattcttttcctggtagggcaacaagaaccatttccaatctagaggaaagctccccagcattgcttgctcctgggcaaacattgctcttgagttaagtgacctaattcccctgggagacatacgcatcaactgtggaggtccgaggggatgagaagggatacccaccacctttcaagggtcacaagctcactctctgacaagtcagaatagggacactgcttctatccctccaatggagagattctggcaacctttgaacagcccagagcttgcaacctagcctcacccaagaagactggaaagagacatatctctcagctttttcaggaggcgtgcctgggaatccaggaactttttgatgctaattagaaggcctggactaaaaatgtccactatggggtgcactctacagtttttgaaatgctaggaggcagaaggggcagagagtaaaaaacatgacctggtagaaggaagagaggcaaaggaaactgggtggggaggatcaattagagaggaggcacctgggatccaccttcttccttaggtcccctcctccatcagcaaaggagcacttctctaatcatgccctcccgaagactggctgggagaaggtttaaaaacaaaaaatccaggagtaagagccttaggtcagtttgaaattggagacaaactgtctggcaaagggtgcgagagggagcttgtgctcaggagtccagccgtccagcctcggggtgtaggtttctgaggtgtgccattggggcctcagccttctctggtgacagaggctcagctgtggccaccaacacacaaccacacacacacaaccacacacacaaatgggggcaaccacatccagtacaagcttttacaaatgttattagtgtccttttttatttctaatgccttgtcctcttaaaagttattttatttgttattattatttgttcttgactgttaattgtgaatggtaatgcaataaagtgcctttgttagatggtg

SEQ ID NO: 2009 - DNA, 2864 bp, Homo sapiens
gattaccaagcaagaacagctaaaatgaaagccatcattcatcttactcttcttgctctcctttctgtaaacacagccaccaaccaaggcaactcagctgatgctgtaacaaccacagaaactgcgactagtggtcctacagtagctgcagctgataccactgaaactaatttccctgaaactgctagcaccacagcaaatacaccttctttcccaacagctacttcacctgctccccccataattagtacacatagttcctccacaattcctacacctgctccccccataattagtacacatagttcctccacaattcctatacctactgctgcagacagtgagtcaaccacaaatgtaaattcattagctacctctgacataatcaccgcttcatctccaaatgatggattaatcacaatggttccttctgaaacacaaagtaacaatgaaatgtcccccaccacagaagacaatcaatcatcagggcctcccactggcaccgctttattggagaccagcaccctaaacagcacaggtcccagcaatccttgccaagatgatccctgtgcagataattcgttatgtgttaagctgcataatacaagtttttgcctgtgtttagaagggtattactacaactcttctacatgtaagaaaggaaaggtattccctgggaagatttcagtgacagtatcagaaacatttgacccagaagagaaacattccatggcctatcaagacttgcatagtgaaattactagcttgtttaaagatgtatttggcacatctgtttatggacagactgtaattcttactgtaagcacatctctgtcaccaagatctgaaatgcgtgctgatgacaagtttgttaatgtaacaatagtaacaattttggcagaaaccacaagtgacaatgagaagactgtgactgagaaaattaataaagcaattagaagtagctcaagcaactttctaaactatgatttgacccttcggtgtgattattatggctgtaaccagactgcggatgactgcctcaatggtttagcatgcgattgcaaatctgacctgcaaaggcctaacccacagagccctttctgcgttgcttccagtctcaagtgtcctgatgcctgcaacgcacagcacaagcaatgcttaataaagaagagtggtggggcccctgagtgtgcgtgcgtgcccggctaccaggaagatgctaatgggaactgccaaaagtgtgcatttggctacagtggactcgactgtaaggacaaatttcagctgatcctcactattgtgggcaccatcgctggcattgtcattctcagcatgataattgcattgattgtcacagcaagatcaaataacaaaacgaagcatattgaagaagagaacttgattgacgaagactttcaaaatctaaaactgcggtcgacaggcttcaccaatcttggagcagaagggagcgtctttcctaaggtcaggataacggcctccagagacagccagatgcaaaatccctattcaagacacagcagcatgccccgccctgactattagaatcataagaatgtggaacccgccatggcccccaaccaatgtacaagctattatttagagtgtttagaaagactgatggagaagtgagcaccagtaaagatctggcctccggggtttttcttccatctgacatctgccagcctctctgaatggaagttgtgaatgtttgcaacgaatccagctcacttgctaaataagaatctatgacattaaatgtagtagatgctattagcgcttgtcagagaggtggttttcttcaatcagtacaaagtactgagacaatggttagggttgttttcttaattcttttcctggtagggcaacaagaaccatttccaatctagaggaaagctccccagcattgcttgctcctgggcaaacattgctcttgagttaagtgacctaattcccctgggagacatacgcatcaactgtggaggtccgaggggatgagaagggatacccaccacctttcaagggtcacaagctcactctctgacaagtcagaatagggacactgcttctatccctccaatggagagattctggcaacctttgaacagcccagagcttgcaacctagcctcacccaagaagactggaaagagacatatctctcagctttttcaggaggcgtgcctgggaatccaggaactttttgatgctaattagaaggcctggactaaaaatgtccactatggggtgcactctacagtttttgaaatgctaggaggcagaaggggcagagagtaaaaaacatgacctggtagaaggaagagaggcaaaggaaactgggtggggaggatcaattagagaggaggcacctgggatccaccttcttccttaggtcccctcctccatcagcaaaggagcacttctctaatcatgccctcccgaagactggctgggagaaggtttaaaaacaaaaaatccaggagtaagagccttaggtcagtttgaaattggagacaaactgtctggcaaagggtgcgagagggagcttgtgctcaggagtccagccgtccagcctcggggtgtaggtttctgaggtgtgccattggggcctcagccttctctggtgacagaggctcagctgtggccaccaacacacaaccacacacacacaaccacacacacaaatgggggcaaccacatccagtacaagcttttacaaatgttattagtgtccttttttatttctaatgccttgtcctcttaaaagttattttatttgttattattatttgttcttgactgttaattgtgaatggtaatgcaataaagtgcctttgttagatggtg

SEQ ID NO: 2010 - DNA, 2961 bp, Homo sapiens
gattaccaagcaagaacagctaaaatgaaagccatcattcatcttactcttcttgctctcctttctgtaaacacagccaccaaccaaggcaactcagctgatgctgtaacaaccacagaaactgcgactagtggtcctacagtagctgcagctgataccactgaaactaatttccctgaaactgctagcaccacagcaaatacacctttcccaacagctacttcacctgctccccccataattagtacacatagttcctccacaattcctacacctgctccccccataattagtacacatagttcctccacaattcctatacctactgctgcagacagtgagtcaaccacaaatgtaaattcattagctacctctgacataatcaccgcttcatctccaaatgatggattaatcacaatggttccttctgaaacacaaagtaacaatgaaatgtcccccaccacagaagacaatcaatcatcagggcctcccactggcaccgctttattggagaccagcaccctaaacagcacaggtcccagcaatccttgccaagatgatccctgtgcagataattcgttatgtgttaagctgcataatacaagtttttgcctgtgtttagaagggtattactacaactcttctacatgtaagaaaggaaaggtattccctgggaagatttcagtgacagtatcagaaacatttgacccagaagagaaacattccatggcctatcaagacttgcatagtgaaattactagcttgtttaaagatgtatttggcacatctgtttatggacagactgtaattcttactgtaagcacatctctgtcaccaagatctgaaatgcgtgctgatgacaagtttgttaatgtaacaatagtaacaattttggcagaaaccacaagtgacaatgagaagactgtgactgagaaaattaataaagcaattagaagtagctcaagcaactttctaaactatgatttgacccttcggtgtgattattatggctgtaaccagactgcggatgactgcctcaatggtttagcatgcgattgcaaatctgacctgcaaaggcctaacccacagagccctttctgcgttgcttccagtctcaagtgtcctgatgcctgcaacgcacagcacaagcaatgcttaataaagaagagtggtggggcccctgagtgtgcgtgcgtgcccggctaccaggaagatgctaatgggaactgccaaaagtgtgcatttggctacagtggactcgactgtaaggacaaatttcagctgatcctcactattgtgggcaccatcgctggcattgtcattctcagcatgataattgcattgattgtcacagcaagatcaaataacaaaacgaagcatattgaagaagagaacttgattgacgaagactttcaaaatctaaaactgcggtcgacaggcttcaccaatcttggagcagaagggagcgtctttcctaaggtcaggataacggcctccagagacagccagatgcaaaatccctattcaagacacagcagcatgccccgccctgactattagaatcataagaatgtggaacccgccatggcccccaaccaatgtacaagctattatttagagtgtttagaaagactgatggagaagtgagcaccagtaaagatctggcctccggggtttttcttccatctgacatctgccagcctctctgaatggaagttgtgaatgtttgcaacgaatccagctcacttgctaaataagaatctatgacattaaatgtagtagatgctattagcgcttgtcagagaggtggttttcttcaatcagtacaaagtactgagacaatggttagggttgttttcttaattcttttcctggtagggcaacaagaaccatttccaatctagaggaaagctccccagcattgcttgctcctgggcaaacattgctcttgagttaagtgacctaattcccctgggagacatacgcatcaactgtggaggtccgaggggatgagaagggatacccaccatctttcaagggtcacaagctcactctctgacaagtcagaatagggacactgcttctatccctccaatggagagattctggcaacctttgaacagcccagagcttgcaacctagcctcacccaagaagactggaaagagacatatctctcagctttttcaggaggcgtgcctgggaatccaggaactttttgatgctaattagaaggcctggactaaaaatgtccactatggggtgcactctacagtttttgaaatgctaggaggcagaaggggcagagagtaaaaaacatgacctggtagaaggaagagaggcaaaggaaactgggtggggaggatcaattagagaggaggcacctgggatccaccttcttccttaggtcccctcctccatcagcaaaggagcacttctctaatcatgccctcccgaagactggctgggagaaggtttaaaaacaaaaaatccaggagtaagagccttaggtcagtttgaaattggagacaaactgtctggcaaagggtgcgagagggagcttgtgctcaggagtccagccgtccagcctcggggtgtaggtttctgaggtgtgccattggggcctcagccttctctggtgacagaggctcagctgtggccaccaacacacaaccacacacacacaaccacacacacaaatgggggcaaccacatccagtacaagcttttacaaatgttattagtgtccttttttatttctaatgccttgtcctcttaaaagttattttatttgttattattatttgttcttgactgttaattgtgaatggtaatgcaataaagtgcctttgttagatggtgaaaaaaaaaaaaaaaaaaaaaaaaaaaaaaaaaaaaaaaaaaaaaaaaaaaaaaaaaaaaaaaaaaaaaaaaaaaaaaaaaaaaaaaaaaaaaaaaaaaa

SEQ ID NO: 2011 - DNA, 2767 bp, Homo sapiens
cgccgagccgggactgcgctagcccgccgcgctctgggctgcccgagcgagcgttcggacctcgcaccccgcgcgcgccgggaccttggctctgcccttcgcgggcgggaactgcgcaggacccggccaggatccgagagaggcgcgggcgggtggccgggggcgccgccggccccgccatggagctccgggcccgaggctggtggctgctatgtgcggccgcagcgctggtcgcctgcgcccgcggggacccggccagcaagagccggagctgcggcgaggtccgccagatctacggagccaagggcttcagcctgagcgacgtgccccaggcggagatctcgggtgagcacctgcggatctgtccccagggctacacctgctgcaccagcgagatggaggagaacctggccaaccgcagccatgccgagctggagaccgcgctccgggacagcagccgcgtcctgcaggccatgcttgccacccagctgcgcagcttcgatgaccacttccagcacctgctgaacgactcggagcggacgctgcaggccaccttccccggcgccttcggagagctgtacacgcagaacgcgagggccttccgggacctgtactcagagctgcgcctgtactaccgcggtgccaacctgcacctggaggagacgctggccgagttctgggcccgcctgctcgagcgcctcttcaagcagctgcacccccagctgctgctgcctgatgactacctggactgcctgggcaagcaggccgaggcgctgcggcccttcggggaggccccgagagagctgcgcctgcgggccacccgtgccttcgtggctgctcgctcctttgtgcagggcctgggcgtggccagcgacgtggtccggaaagtggctcaggtccccctgggcccggagtgctcgagagctgtcatgaagctggtctactgtgctcactgcctgggagtccccggcgccaggccctgccctgactattgccgaaatgtgctcaagggctgccttgccaaccaggccgacctggacgccgagtggaggaacctcctggactccatggtgctcatcaccgacaagttctggggtacatcgggtgtggagagtgtcatcggcagcgtgcacacgtggctggcggaggccatcaacgccctccaggacaacagggacacgctcacggccaaggtcatccagggctgcgggaaccccaaggtcaacccccagggccccgggcctgaggagaagcggcgccggggcaagctggccccgcgggagaggccaccttcaggcacgctggagaagctggtctccgaagccaaggcccagctccgcgacgtccaggacttctggatcagcctcccagggacactgtgcagtgagaagatggccctgagcactgccagtgatgaccgctgctggaacgggatggccagaggccggtacctccccgaggtcatgggtgacggcctggccaaccagatcaacaaccccgaggtggaggtggacatcaccaagccggacatgaccatccggcagcagatcatgcagctgaagatcatgaccaaccggctgcgcagcgcctacaacggcaacgacgtggacttccaggacgccagtgacgacggcagcggctcgggcagcggtgatggctgtctggatgacctctgcggccggaaggtcagcaggaagagctccagctcccggacgcccttgacccatgccctcccaggcctgtcagagcaggaaggacagaagacctcggctgccagctgcccccagcccccgaccttcctcctgcccctcctcctcttcctggcccttacagtagccaggccccggtggcggtaactgccccaaggccccagggacagaggccaaggactgactttgccaaaaatacaacacagacgatatttaattcacctcagcctggcctcgcctgcctttctgccttttaattttgtatgaggtcctcaggtcagctgggagccagtgtgcccaaaagccatgtatttcagggacctcagggggacccgcctgctcccatcctcacccagatcaggaaccagggcctccctgttcacggtgacacaggtcagggctcagagtgaccctcggctgtcacctgctcacagggatgctggtggctggtgagaccccgcactgcacacgggaatgcctaggtcccttcccgacccagccagctgcagggcacggggacctggatagttaagggcttttccaaacatgcatccatttactgacacttcctctgtcctgaaccgactgaccctgaggaggccgcttagtgctgctttgcttttcatcaccgtcccgcacagtggacggaggtccccggttgctggtcaggtccccatggcttgttctctggaacctgactttagatgttttgggatcaggagcccccaacacaggcaagtccaccccataataaccctgccagtgccagggtgggctggggactctggcacagtgatgccgggcgccaggacagcagcactcccgctgcacacagacggcctaggggtggcgctcagaccccaccctacgctcatctctggaaggggcagccctgagtggtcactggtcagggcagtggccaagcctgctgtgtccttcctccacaaggtccccccaccgctcagtgtcagcgggtgacgtgtgttcttttgagtccttgtatgaataaaaggctggaaacctacagcagggcgaggcctcggggggagagagaatgt

SEQ ID NO: 2012 - DNA, 2767 bp, Homo sapiens; identical to SEQ ID NO: 2011

SEQ ID NO: 2013 - DNA, 3607 bp, Homo sapiens
tgcggctgcggcgctgcccggggtggctgcggccagagtctcccgcgcgcccggcggaccgcagcccgccctcgtcccccgctggcttttcgcctcctgcgagcccttccgcccggccccgctccgccgcctttccccggcccgagcacctgcacccagagcccgcgcgccgcccggagccgctggagccgccgctgcgaagggggtcccgcgtccgccgccgcgctggaagccaggcccgaggacctctcccgcggcgccaccgtacccgcatccgtgagcacctgcggatctgtccccagggctacacctgctgcaccagcgagatggaggagaacctggccaaccgcagccatgccgagctggagaccgcgctccgggacagcagccgcgtcctgcaggccatgcttgccacccagctgcgcagcttcgatgaccacttccagcacctgctgaacgactcggagcggacgctgcaggccaccttccccggcgccttcggagagctgtacacgcagaacgcgagggccttccgggacctgtactcagagctgcgcctgtactaccgcggtgccaacctgcacctggaggagacgctggccgagttctgggcccgcctgctcgagcgcctcttcaagcagctgcacccccagctgctgctgcctgatgactacctggactgcctgggcaagcaggccgaggcgctgcggcccttcggggaggccccgagagagctgcgcctgcgggccacccgtgccttcgtggctgctcgctcctttgtgcagggcctgggcgtggccagcgacgtggtccggaaagtggctcaggtccccctgggcccggagtgctcgagagctgtcatgaagctggtctactgtgctcactgcctgggagtccccggcgccaggccctgccctgactattgccgaaatgtgctcaagggctgccttgccaaccaggccgacctggacgccgagtggaggaacctcctggactccatggtgctcatcaccgacaagttctggggtacatcgggtgtggagagtgtcatcggcagcgtgcacacgtggctggcggaggccatcaacgccctccaggacaacagggacacgctcacggccaaggtcatccagggctgcgggaaccccaaggtcaacccccagggccccgggcctgaggagaagcggcgccggggcaagctggccccgcgggagaggccaccttcaggcacgctggagaagctggtctccgaagccaaggcccagctccgcgacgtccaggacttctggatcagcctcccagggacactgtgcagtgagaagatggccctgagcactgccagtgatgaccgctgctggaacgggatggccagaggccggtacctccccgaggtcatgggtgacggcctggccaaccagatcaacaaccccgaggtggaggtggacatcaccaagccggacatgaccatccggcagcagatcatgcagctgaagatcatgaccaaccggctgcgcagcgcctacaacggcaacgacgtggacttccaggacgccagtgacgacggcagcggctcgggcagcggtgatggctgtctggatgacctctgcggccggaaggtcagcaggaagagctccagctcccggacgcccttgacccatgccctcccaggcctgtcagagcaggaaggacagaagacctcggctgccagctgcccccagcccccgaccttcctcctgcccctcctcctcttcctggcccttacagtagccaggccccggtggcggtaactgccccaaggccccagggacagaggccaaggactgactttgccaaaaatacaacacagacgatatttaattcacctcagcctggagaggcctggggtgggacagggagggccggcggctctgagcaggggcaggcgcagaggtcccagccccaggcctggcctcgcctgcctttctgccttttaattttgtatgaggtcctcaggtcagctgggagccagtgtgcccaaaagccatgtatttcagggacctcaggggcacctccggctgcctagccctccccccagctccctgcaccgccgcagaagcagcccctcgaggcctacagaggaggcctcaaagcaacccgctggagcccacagcgagcctgtgccttcctccccgcctcctcccactgggactcccagcagagcccaccagccagccctggcccaccccccagcctccagagaagccccgcacgggctgtctgggtgtccgccatccagggtctggcagagcctctgagatgatgcatgatgccctcccctcagcgcaggctgcagagcccggccccacctccctgcgcccttgaggggccccagcgtctgcagggtgacgcctgagacagcaccactgctgaggagtctgaggactgtcctcccacagacctgcagtgaggggccctccatgcgcagatgaggggccactgacccacctgcgcttctgctggaggaggggaagctgggcccaaaggcccagggaggcagcgtgggctctgccaatgtgggctgcccctcgcacacagggctcacagggcaggccttgctggggtccagggctgttggaggaccccgagggctgaggagcagccaggacccgcctgctcccatcctcacccagatcaggaaccagggcctccctgttcacggtgacacaggtcagggctcagagtgaccctcggctgtcacctgctcacagggatgctggtggctggtgagaccccgcactgcacacgggaatgcctaggtcccttcccgacccagccagctgcagggcacggggacctggatagttaagggcttttccaaacatgcatccatttactgacacttcctgtccttgttcatggagagctgttcgctcctcccagatggcttcggagggccgcagggcccaccttggaccctggtgacctcctgtcactcactgaggccatcagggccctgccccaggcctggacgggccctccttccctcctgtgccccagctgccaggcggccctggggaggggtggtgtggtgttgggaaggggtcctgcagggggaggaggacttggagggtctgggggcagctgtcctgaaccgactgaccctgaggaggccgcttagtgctgctttgcttttcatcaccgtcccgcacagtggacggaggtccccggttgctggtcaggtccccatggcttgttctctggaacctgactttagatgttttgggatcaggagcccccaacacaggcaagtccaccccataataaccctgccagtgccagggtgggctggggactctggcacagtgatgccgggcgccaggacagcagcactcccgctgcacacagacggcctaggggtggcgctcagaccccaccctacgctcatctctggaaggggcagccctgagtggtcactggtcagggcagtggccaagcctgctgtgtccttcctccacaaggtccccccaccgctcagtgtcagcgggtgacgtgtgttcttttgagtccttgtatgaataaaaggctggaaacctacagcagggcgaggcctcggggggagagagaatgt

SEQ ID NO: 2014 - DNA, 3607 bp, Homo sapiens; identical to SEQ ID NO: 2013

SEQ ID NO: 2015 - DNA, 4275 bp, Homo sapiens
ccacctcccgggttgagggggctggatctccaggctgcggattaagcccctcccgtcggcgttaatttcaaactgcgcgaccgtttctcacctgccttgcgccaaggcagggggcgggaccctattccaagaggtagtaactagcaggactctagccttccgcaattcattgagcgcatttacggaagtaacgtcgggtactgtctctggccgcaagggtgggaggagtacgcatttggcgtaaggtggggcgtagagccttcccgccattggcggcggatagggcgtttacgcgacggcctgacgtagcggaagacgcgttagtgggggggaaggttctagaaaagcggcggcagcggctctagcggcagtagcagcagcgccgggtcccgtgcggaggtgctcctcgcagagttgtttctcgagcagcggcagttctcactacagcgccaggacgagtccggttcgtgttcgtccgcggagatctctctcatctcgctcggctgcgggaaatcgggctgaagcgactgagtccgcgatggagagagaaaaggaacagttccgtaagctctttattggtggcttaagctttgaaaccacagaagaaagtttgaggaactactacgaacaatggggaaagcttacagactgtgtggtaatgagggatcctgcaagcaaaagatcaagaggatttggttttgtaactttttcatccatggctgaggttgatgctgccatggctgcaagacctcattcaattgatgggagagtagttgagccaaaacgtgctgtagcaagagaggaatctggaaaaccaggggctcatgtaactgtgaagaagctgtttgttggcggaattaaagaagatactgaggaacatcaccttagagattactttgaggaatatggaaaaattgataccattgagataattactgataggcagtctggaaagaaaagaggctttggctttgttacttttgatgaccatgatcctgtggataaaatcgtattgcagaaataccataccatcaatggtcataatgcagaagtaagaaaggctttgtctagacaagaaatgcaggaagttcagagttctaggagtggaagaggaggcaactttggctttggggattcacgtggtggcggtggaaatttcggaccaggaccaggaagtaactttagaggaggatctgatggatatggcagtggacgtggatttggggatggctataatgggtatggaggaggacctggaggtggcaattttggaggtagccccggttatggaggaggaagaggaggatatggtggtggaggacctggatatggcaaccagggtgggggctacggaggtggttatgacaactatggaggaggaaattatggaagtggaaattacaatgattttggaaattataaccagcaaccttctaactacggtccaatgaagagtggaaactttggtggtagcaggaacatggggggaccatatggtggaggaaactatggtccaggaggcagtggaggaagtgggggttatggtgggaggagccgatactgagcttcttcctatttgccatgggcttcactgtataaataggagaggatgagagcccagaggtaacagaacagcttcaggttatcgaaataacaatgttaaggaaactcttatctcagtcatgcataaatatgcagtgatatggcagaagacaccagagcagatgcagagagccattttgtgaatggattggattatttaataacattaccttactgtggaggaaggattgtaaaaaaaaatgcctttgagacagtttcttagctttttaattgttgtttctttctagtggtctttgtaagagtgtagaagcattccttctttgataatgttaaatttgtaagtttcaggtgacatgtgaaaccttttttaagatttttctcaaagttttgaaaagctattagccaggatcatggtgtaataagacataacgtttttcctttaaaaaaatttaagtgcgtgtgtagagttaagaagctgttgtacatttatgatttaataaaataattctaaaggaaattgtgtaattatagactttttattttaaataagttaaggagtgggtagtataattaaggtccgttgcaaagctgttgttatatttgtataagataaatgctggtcagatgtaagtgtgttgtctgcaattcatcaggattaaattatgtagataacttaagggatatctctgcaaggagaaacacctttttagatcttttagatgctgcttcttcaatgcaaggaaaggaaataaccccagcgaggtactcttcagggacacaggtctagtacaagagaactcttgacggctactaagttcagccagtcttaaaaaactgtgctgtttctacaaaactttaactacagtagtttataaggatgccaacgaaagctgagggtgtagagcaaaatagttctaagcttcagttaaacttctttaggtaagatcttatttacttttcctttcttaattttcctccctaaaagataaactaatactcttaaatggtctttcagtatagtggttcttacgtagtttaacatagctataaattgagtttaacaatttataaactcaagagaataatttttataaaccctgttttccaatctgtcatttacttaaattattttggttgtttttccctttttttccttcttttcccaccccctccccctccatgtgaagatttgggtgcttaacatatcatttttttccctgccggaattttagcattgatatgaaccatggacaagtatattctgctgccacaaagactgtaaagtgcttcatttcaacagctgaggcaagccaagtgatcattaataaagcttttcttggttccttcagtggtgttggtagtaaaatggtaggtaaaagttaggctgcaagttcaataaatcatgagatttcccatcgttacacccttgtgtattcacatttcttggatcaaacattttgagtgaactaggggtttttattaaagacatttgttgtatttatggttgtaactgtacatgcttatcaggatgagactgaaagaaggtagggcaaaaatggttgaatctattttcagatagtagttcatacttgagtgaagtgtcttgtctgcattatgaagcctggtatgtatccagtactaaataggtgggttaaatgtggtaattctagttcagtgtcttaccctgaagagaaagttgtaggttggctgttgaaattcattccttagatatgatcagtttgattgcccggctttattgcctttacaggaatgtgatactcagggcttactctatacaccaatgagtcttctttgatcctaagaccaccactgaagttgtttaggttcttttggacaaacatgataaacttcttcagatactttttttttcctttggcaggaaggtgtcttgctgcaggtaactaatgaagaagtggtcaaccacagagtcttcaagaaataagaaattctgtaccatctgaaagtagttcttgttggtgccttcatttaaaaagcactctttaaaataaaagggaaatgttttctgataaaacaaacatttagttgaggttcttgatataaaacaattacaaaatgagtgttgtttgtaaaacagtaacatcaaattggctagagagataaatgtatcatgttttaaattaggttttgtgagtagacagattacaattctattttaaatataaagtttataaaataaatactttttgtatccaaatacttggtgtaatgtttacacataaaatgtgtgaatcttgttctataaatatttggttgtctaaaagatcaccatcccctaaatttttaaaagcagtttcacaaagctatgcatattttaatattaacaggtaaatgagaagagcattgtggacattattggctgtccccaataaaatgctgttcattatgcactgtatattcagcgtttgagtactcctaaagtttctggctttacttttacgtttagcaatactggtggcattttgaaaatcatggattttaaaggttaaccggctggagtggtccagattaagtggctttgcagaagcactgaggtttacaatatgtgctagattgtcaaatgtcaattagttttattgtggtttacactgagtaaatgaatatcagtgttgctttttaaatgtgtttatttggacatttatctgaattaagaaaaccaaaaagaccaggtta

SEQ ID NO: 2016 - DNA, 3449 bp, Homo sapiens
ccacctcccgggttgagggggctggatctccaggctgcggattaagcccctcccgtcggcgttaatttcaaactgcgcgaccgtttctcacctgccttgcgccaaggcagggggcgggaccctattccaagaggtagtaactagcaggactctagccttccgcaattcattgagcgcatttacggaagtaacgtcgggtactgtctctggccgcaagggtgggaggagtacgcatttggcgtaaggtggggcgtagagccttcccgccattggcggcggatagggcgtttacgcgacggcctgacgtagcggaagacgcgttagtgggggggaaggttctagaaaagcggcggcagcggctctagcggcagtagcagcagcgccgggtcccgtgcggaggtgctcctcgcagagttgtttctcgagcagcggcagttctcactacagcgccaggacgagtccggttcgtgttcgtccgcggagatctctctcatctcgctcggctgcgggaaatcgggctgaagcgactgagtccgcgatggagaaaactttagaaactgttcctttggagaggaaaaagagagaaaaggaacagttccgtaagctctttattggtggcttaagctttgaaaccacagaagaaagtttgaggaactactacgaacaatggggaaagcttacagactgtgtggtaatgagggatcctgcaagcaaaagatcaagaggatttggttttgtaactttttcatccatggctgaggttgatgctgccatggctgcaagacctcattcaattgatgggagagtagttgagccaaaacgtgctgtagcaagagaggaatctggaaaaccaggggctcatgtaactgtgaagaagctgtttgttggcggaattaaagaagatactgaggaacatcaccttagagattactttgaggaatatggaaaaattgataccattgagataattactgataggcagtctggaaagaaaagaggctttggctttgttacttttgatgaccatgatcctgtggataaaatcgtattgcagaaataccataccatcaatggtcataatgcagaagtaagaaaggctttgtctagacaagaaatgcaggaagttcagagttctaggagtggaagaggaggcaactttggctttggggattcacgtggtggcggtggaaatttcggaccaggaccaggaagtaactttagaggaggatctgatggatatggcagtggacgtggatttggggatggctataatgggtatggaggaggacctggaggtggcaattttggaggtagccccggttatggaggaggaagaggaggatatggtggtggaggacctggatatggcaaccagggtgggggctacggaggtggttatgacaactatggaggaggaaattatggaagtggaaattacaatgattttggaaattataaccagcaaccttctaactacggtccaatgaagagtggaaactttggtggtagcaggaacatggggggaccatatggtggaggaaactatggtccaggaggcagtggaggaagtgggggttatggtgggaggagccgatactgagcttcttcctatttgccatgggcttcactgtataaataggagaggatgagagcccagaggtaacagaacagcttcaggttatcgaaataacaatgttaaggaaactcttatctcagtcatgcataaatatgcagtgatatggcagaagacaccagagcagatgcagagagccattttgtgaatggattggattatttaataacattaccttactgtggaggaaggatttggtctttgtaagagtgtagaagcattccttctttgataatgttaaatttgtaagtttcaggtgacatgtgaaaccttttttaagatttttctcaaagttttgaaaagctattagccaggatcatggtgtaataagacataacgtttttcctttaaaaaaatttaagtgcgtgtgtagagttaagaagctgttgtacatttatgatttaataaaataattctaaaggaaattgtgtaattatagactttttattttaaataagttaaggagtgggtagtataattaaggtccgttgcaaagctgttgttatatttgtataagataaatgctggtcagatgtaagtgtgttgtctgcaattcatcaggattaaattatgtagataacttaagggatatctctgcaaggagaaacacctttttagatcttttagatgctgcttcttcaatgcaaggaaaggaaataaccccagcgaggtactcttcagggacacaggtctagtacaagagaactcttgacggctactaagttcagccagtcttaaaaaactgtgctgtttctacaaaactttaactacagtagtttataaggatgccaacgaaagctgagggtgtagagcaaaatagttctaagcttcagttaaacttctttaggtaagatcttatttacttttcctttcttaattttcctccctaaaagataaactaatactcttaaatggtctttcagtatagtggttcttacgtagtttaacatagctataaattgagtttaacaatttataaactcaagagaataatttttataaaccctgttttccaatctgtcatttacttaaattattttggttgtttttccctttttttccttcttttcccaccccctccccctccatgtgaagatttgggtgcttaacatatcatttttttccctgccggaattttagcattgatatgaaccatggacaagtatattctgctgccacaaagactgtaaagtgcttcatttcaacagctgaggcaagccaagtgatcattaataaagcttttcttggttccttcagtggtgttggtagtaaaatggaaggtgtcttgctgcaggtaactaatgaagaagtggtcaaccacagagtcttcaagaaataagaaattctgtaccatctgaaagtagttcttgttggtgccttcatttaaaaagcactctttaaaataaaagggaaatgttttctgataaaacaaacatttagttgaggttcttgatataaaacaattacaaaatgagtgttgtttgtaaaacagtaacatcaaattggctagagagataaatgtatcatgttttaaattaggttttgtgagtagacagattacaattctattttaaatataaagtttataaaataaatactttttgtatccaaatacttggtgtaatgtttacacataaaatgtgtgaatcttgttctataaatatttggttgtctaaaagatcaccatcccctaaatttttaaaagcagtttcacaaagctatgcatattttaatattaacaggtaaatgagaagagcattgtggacattattggctgtccccaataaaatgctgttcattatgcactgtatattca

SEQ ID NO: 2017 - DNA, 3413 bp, Homo sapiens
ccacctcccgggttgagggggctggatctccaggctgcggattaagcccctcccgtcggcgttaatttcaaactgcgcgaccgtttctcacctgccttgcgccaaggcagggggcgggaccctattccaagaggtagtaactagcaggactctagccttccgcaattcattgagcgcatttacggaagtaacgtcgggtactgtctctggccgcaagggtgggaggagtacgcatttggcgtaaggtggggcgtagagccttcccgccattggcggcggatagggcgtttacgcgacggcctgacgtagcggaagacgcgttagtgggggggaaggttctagaaaagcggcggcagcggctctagcggcagtagcagcagcgccgggtcccgtgcggaggtgctcctcgcagagttgtttctcgagcagcggcagttctcactacagcgccaggacgagtccggttcgtgttcgtccgcggagatctctctcatctcgctcggctgcgggaaatcgggctgaagcgactgagtccgcgatggagagagaaaaggaacagttccgtaagctctttattggtggcttaagctttgaaaccacagaagaaagtttgaggaactactacgaacaatggggaaagcttacagactgtgtggtaatgagggatcctgcaagcaaaagatcaagaggatttggttttgtaactttttcatccatggctgaggttgatgctgccatggctgcaagacctcattcaattgatgggagagtagttgagccaaaacgtgctgtagcaagagaggaatctggaaaaccaggggctcatgtaactgtgaagaagctgtttgttggcggaattaaagaagatactgaggaacatcaccttagagattactttgaggaatatggaaaaattgataccattgagataattactgataggcagtctggaaagaaaagaggctttggctttgttacttttgatgaccatgatcctgtggataaaatcgtattgcagaaataccataccatcaatggtcataatgcagaagtaagaaaggctttgtctagacaagaaatgcaggaagttcagagttctaggagtggaagaggaggcaactttggctttggggattcacgtggtggcggtggaaatttcggaccaggaccaggaagtaactttagaggaggatctgatggatatggcagtggacgtggatttggggatggctataatgggtatggaggaggacctggaggtggcaattttggaggtagccccggttatggaggaggaagaggaggatatggtggtggaggacctggatatggcaaccagggtgggggctacggaggtggttatgacaactatggaggaggaaattatggaagtggaaattacaatgattttggaaattataaccagcaaccttctaactacggtccaatgaagagtggaaactttggtggtagcaggaacatggggggaccatatggtggaggaaactatggtccaggaggcagtggaggaagtgggggttatggtgggaggagccgatactgagcttcttcctatttgccatgggcttcactgtataaataggagaggatgagagcccagaggtaacagaacagcttcaggttatcgaaataacaatgttaaggaaactcttatctcagtcatgcataaatatgcagtgatatggcagaagacaccagagcagatgcagagagccattttgtgaatggattggattatttaataacattaccttactgtggaggaaggatttggtctttgtaagagtgtagaagcattccttctttgataatgttaaatttgtaagtttcaggtgacatgtgaaaccttttttaagatttttctcaaagttttgaaaagctattagccaggatcatggtgtaataagacataacgtttttcctttaaaaaaatttaagtgcgtgtgtagagttaagaagctgttgtacatttatgatttaataaaataattctaaaggaaattgtgtaattatagactttttattttaaataagttaaggagtgggtagtataattaaggtccgttgcaaagctgttgttatatttgtataagataaatgctggtcagatgtaagtgtgttgtctgcaattcatcaggattaaattatgtagataacttaagggatatctctgcaaggagaaacacctttttagatcttttagatgctgcttcttcaatgcaaggaaaggaaataaccccagcgaggtactcttcagggacacaggtctagtacaagagaactcttgacggctactaagttcagccagtcttaaaaaactgtgctgtttctacaaaactttaactacagtagtttataaggatgccaacgaaagctgagggtgtagagcaaaatagttctaagcttcagttaaacttctttaggtaagatcttatttacttttcctttcttaattttcctccctaaaagataaactaatactcttaaatggtctttcagtatagtggttcttacgtagtttaacatagctataaattgagtttaacaatttataaactcaagagaataatttttataaaccctgttttccaatctgtcatttacttaaattattttggttgtttttccctttttttccttcttttcccaccccctccccctccatgtgaagatttgggtgcttaacatatcatttttttccctgccggaattttagcattgatatgaaccatggacaagtatattctgctgccacaaagactgtaaagtgcttcatttcaacagctgaggcaagccaagtgatcattaataaagcttttcttggttccttcagtggtgttggtagtaaaatggaaggtgtcttgctgcaggtaactaatgaagaagtggtcaaccacagagtcttcaagaaataagaaattctgtaccatctgaaagtagttcttgttggtgccttcatttaaaaagcactctttaaaataaaagggaaatgttttctgataaaacaaacatttagttgaggttcttgatataaaacaattacaaaatgagtgttgtttgtaaaacagtaacatcaaattggctagagagataaatgtatcatgttttaaattaggttttgtgagtagacagattacaattctattttaaatataaagtttataaaataaatactttttgtatccaaatacttggtgtaatgtttacacataaaatgtgtgaatcttgttctataaatatttggttgtctaaaagatcaccatcccctaaatttttaaaagcagtttcacaaagctatgcatattttaatattaacaggtaaatgagaagagcattgtggacattattggctgtccccaataaaatgctgttcattatgcactgtatattca

SEQ ID NO: 2018 - DNA, 2967 bp, Homo sapiens
ccacctcccgggttgagggggctggatctccaggctgcggattaagcccctcccgtcggcgttaatttcaaactgcgcgaccgtttctcacctgccttgcgccaaggcagggggcgggaccctattccaagaggtagtaactagcaggactctagccttccgcaattcattgagcgcatttacggaagtaacgtcgggtactgtctctggccgcaagggtgggaggagtacgcatttggcgtaaggtggggcgtagagccttcccgccattggcggcggatagggcgtttacgcgacggcctgacgtagcggaagacgcgttagtgggggggaaggttctagaaaagcggcggcagcggctctagcggcagtagcagcagcgccgggtcccgtgcggaggtgctcctcgcagagttgtttctcgagcagcggcagttctcactacagcgccaggacgagtccggttcgtgttcgtccgcggagatctctctcatctcgctcggctgcgggaaatcgggctgaagcgactgagtccgcgatggagagagaaaaggaacagttccgtaagctctttattggtggcttaagctttgaaaccacagaagaaagtttgaggaactactacgaacaatggggaaagcttacagactgtgtggtaatgagggatcctgcaagcaaaagatcaagaggatttggttttgtaactttttcatccatggctgaggttgatgctgccatggctgcaagacctcattcaattgatgggagagtagttgagccaaaacgtgctgtagcaagagaggaatctggaaaaccaggggctcatgtaactgtgaagaagctgtttgttggcggaattaaagaagatactgaggaacatcaccttagagattactttgaggaatatggaaaaattgataccattgagataattactgataggcagtctggaaagaaaagaggctttggctttgttacttttgatgaccatgatcctgtggataaaatcgtattgcagaaataccataccatcaatggtcataatgcagaagtaagaaaggctttgtctagacaagaaatgcaggaagttcagagttctaggagtggaagaggaggcaactttggctttggggattcacgtggtggcggtggaaatttcggaccaggaccaggaagtaactttagaggaggatctgatggatatggcagtggacgtggatttggggatggctataatgggtatggaggaggacctggaggaaattatggaagtggaaattacaatgattttggaaattataaccagcaaccttctaactacggtccaatgaagagtggaaactttggtggtagcaggaacatggggggaccatatggtggaggaaactatggtccaggaggcagtggaggaagtgggggttatggtgggaggagccgatactgagcttcttcctatttgccatgggtaagtagcttttgagttttacaattattattatcttgggagacatagctgcaggagtaaaagctttttaggatcatgttatctttccttaaaatctggttagatggataatttcataacctattttttttttactctttacttctgttgaaacaggcttcactgtataaataggagaggatgagagcccagaggtaacagaacagcttcaggttatcgaaataacaatgttaaggaaactcttatctcagtcatgcataaatatgcagtgatatggcagaagacaccagagcagatgcagagagccattttgtgaatggattggattatttaataacattaccttactgtggaggaaggattgtaaaaaaaaatgcctttgagacagtttcttagctttttaattgttgtttctttctagtggtctttgtaagagtgtagaagcattccttctttgataatgttaaatttgtaagtttcaggtgacatgtgaaaccttttttaagatttttctcaaagttttgaaaagctattagccaggatcatggtgtaataagacataacgtttttcctttaaaaaaatttaagtgcgtgtgtagagttaagaagctgttgtacatttatgatttaataaaataattctaaaggaaattgtgtaattatagactttttattttaaataagttaaggagtgggtagtataattaaggtccgttgcaaagctgttgttatatttgtataagataaatgctggtcagatgtaagtgtgttgtctgcaattcatcaggattaaattatgtagataacttaagggatatctctgcaaggagaaacacctttttagatcttttagatgctgcttcttcaatgcaaggaaaggaaataaccccagcgaggtactcttcagggacacaggtctagtacaagagaactcttgacggctactaagttcagccagtcttaaaaaactgtgctgtttctacaaaactttaactacagtagtttataaggatgccaacgaaagctgagggtgtagagcaaaatagttctaagcttcagttaaacttctttaggtaagatcttatttacttttcctttcttaattttcctccctaaaagataaactaatactcttaaatggtctttcagtatagtggttcttacgtagtttaacatagctataaattgagtttaacaatttataaactcaagagaataatttttataaaccctgttttccaatctgtcatttacttaaattattttggttgtttttccctttttttccttcttttcccaccccctccccctccatgtgaagatttgggtgcttaacatatcatttttttccctgccggaattttagcattgatatgaaccatggacaagtatattctgctgccacaaagactgtaaagtgcttcatttcaacagctgaggcaagccaagtgatcattaataaagcttttcttggttccttcagtggtgttggtagtaaaatg

SEQ ID NO: 2019 - DNA, 4311 bp, Homo sapiens
ccacctcccgggttgagggggctggatctccaggctgcggattaagcccctcccgtcggcgttaatttcaaactgcgcgaccgtttctcacctgccttgcgccaaggcagggggcgggaccctattccaagaggtagtaactagcaggactctagccttccgcaattcattgagcgcatttacggaagtaacgtcgggtactgtctctggccgcaagggtgggaggagtacgcatttggcgtaaggtggggcgtagagccttcccgccattggcggcggatagggcgtttacgcgacggcctgacgtagcggaagacgcgttagtgggggggaaggttctagaaaagcggcggcagcggctctagcggcagtagcagcagcgccgggtcccgtgcggaggtgctcctcgcagagttgtttctcgagcagcggcagttctcactacagcgccaggacgagtccggttcgtgttcgtccgcggagatctctctcatctcgctcggctgcgggaaatcgggctgaagcgactgagtccgcgatggagaaaactttagaaactgttcctttggagaggaaaaagagagaaaaggaacagttccgtaagctctttattggtggcttaagctttgaaaccacagaagaaagtttgaggaactactacgaacaatggggaaagcttacagactgtgtggtaatgagggatcctgcaagcaaaagatcaagaggatttggttttgtaactttttcatccatggctgaggttgatgctgccatggctgcaagacctcattcaattgatgggagagtagttgagccaaaacgtgctgtagcaagagaggaatctggaaaaccaggggctcatgtaactgtgaagaagctgtttgttggcggaattaaagaagatactgaggaacatcaccttagagattactttgaggaatatggaaaaattgataccattgagataattactgataggcagtctggaaagaaaagaggctttggctttgttacttttgatgaccatgatcctgtggataaaatcgtattgcagaaataccataccatcaatggtcataatgcagaagtaagaaaggctttgtctagacaagaaatgcaggaagttcagagttctaggagtggaagaggaggcaactttggctttggggattcacgtggtggcggtggaaatttcggaccaggaccaggaagtaactttagaggaggatctgatggatatggcagtggacgtggatttggggatggctataatgggtatggaggaggacctggaggtggcaattttggaggtagccccggttatggaggaggaagaggaggatatggtggtggaggacctggatatggcaaccagggtgggggctacggaggtggttatgacaactatggaggaggaaattatggaagtggaaattacaatgattttggaaattataaccagcaaccttctaactacggtccaatgaagagtggaaactttggtggtagcaggaacatggggggaccatatggtggaggaaactatggtccaggaggcagtggaggaagtgggggttatggtgggaggagccgatactgagcttcttcctatttgccatgggcttcactgtataaataggagaggatgagagcccagaggtaacagaacagcttcaggttatcgaaataacaatgttaaggaaactcttatctcagtcatgcataaatatgcagtgatatggcagaagacaccagagcagatgcagagagccattttgtgaatggattggattatttaataacattaccttactgtggaggaaggattgtaaaaaaaaatgcctttgagacagtttcttagctttttaattgttgtttctttctagtggtctttgtaagagtgtagaagcattccttctttgataatgttaaatttgtaagtttcaggtgacatgtgaaaccttttttaagatttttctcaaagttttgaaaagctattagccaggatcatggtgtaataagacataacgtttttcctttaaaaaaatttaagtgcgtgtgtagagttaagaagctgttgtacatttatgatttaataaaataattctaaaggaaattgtgtaattatagactttttattttaaataagttaaggagtgggtagtataattaaggtccgttgcaaagctgttgttatatttgtataagataaatgctggtcagatgtaagtgtgttgtctgcaattcatcaggattaaattatgtagataacttaagggatatctctgcaaggagaaacacctttttagatcttttagatgctgcttcttcaatgcaaggaaaggaaataaccccagcgaggtactcttcagggacacaggtctagtacaagagaactcttgacggctactaagttcagccagtcttaaaaaactgtgctgtttctacaaaactttaactacagtagtttataaggatgccaacgaaagctgagggtgtagagcaaaatagttctaagcttcagttaaacttctttaggtaagatcttatttacttttcctttcttaattttcctccctaaaagataaactaatactcttaaatggtctttcagtatagtggttcttacgtagtttaacatagctataaattgagtttaacaatttataaactcaagagaataatttttataaaccctgttttccaatctgtcatttacttaaattattttggttgtttttccctttttttccttcttttcccaccccctccccctccatgtgaagatttgggtgcttaacatatcatttttttccctgccggaattttagcattgatatgaaccatggacaagtatattctgctgccacaaagactgtaaagtgcttcatttcaacagctgaggcaagccaagtgatcattaataaagcttttcttggttccttcagtggtgttggtagtaaaatggtaggtaaaagttaggctgcaagttcaataaatcatgagatttcccatcgttacacccttgtgtattcacatttcttggatcaaacattttgagtgaactaggggtttttattaaagacatttgttgtatttatggttgtaactgtacatgcttatcaggatgagactgaaagaaggtagggcaaaaatggttgaatctattttcagatagtagttcatacttgagtgaagtgtcttgtctgcattatgaagcctggtatgtatccagtactaaataggtgggttaaatgtggtaattctagttcagtgtcttaccctgaagagaaagttgtaggttggctgttgaaattcattccttagatatgatcagtttgattgcccggctttattgcctttacaggaatgtgatactcagggcttactctatacaccaatgagtcttctttgatcctaagaccaccactgaagttgtttaggttcttttggacaaacatgataaacttcttcagatactttttttttcctttggcaggaaggtgtcttgctgcaggtaactaatgaagaagtggtcaaccacagagtcttcaagaaataagaaattctgtaccatctgaaagtagttcttgttggtgccttcatttaaaaagcactctttaaaataaaagggaaatgttttctgataaaacaaacatttagttgaggttcttgatataaaacaattacaaaatgagtgttgtttgtaaaacagtaacatcaaattggctagagagataaatgtatcatgttttaaattaggttttgtgagtagacagattacaattctattttaaatataaagtttataaaataaatactttttgtatccaaatacttggtgtaatgtttacacataaaatgtgtgaatcttgttctataaatatttggttgtctaaaagatcaccatcccctaaatttttaaaagcagtttcacaaagctatgcatattttaatattaacaggtaaatgagaagagcattgtggacattattggctgtccccaataaaatgctgttcattatgcactgtatattcagcgtttgagtactcctaaagtttctggctttacttttacgtttagcaatactggtggcattttgaaaatcatggattttaaaggttaaccggctggagtggtccagattaagtggctttgcagaagcactgaggtttacaatatgtgctagattgtcaaatgtcaattagttttattgtggtttacactgagtaaatgaatatcagtgttgctttttaaatgtgtttatttggacatttatctgaattaagaaaaccaaaaagaccaggtta

SEQ ID NO: 2020 - DNA, 5819 bp, Homo sapiens
agtcccgctatacctaaagggggaggagcacgtacttggcgtaaggagagtgtaggcccttcccgccattggcggcggttaggacgtttgcgtaacggcctgacgtaagcggagacgcgttagtgggggaaggttctagaaaagcggcggtctcggctccagcggcagtagcagcggcgccggtcccgtgtgcaggtgctccgtgcggcgcagtttcttggccatcggctgctctcaccacagcgtcaggacgagtcccgtgcgtgtccgtccgcggaggtctttctcttctcgctcggctgcgggaaatcgagctgaagcgactgagtccgcgatggagaaaactttagaaactgttcctttggagaggaaaaagagagaaaaggaacagttccgtaagctctttattggtggcttaagctttgaaaccacagaagaaagtttgagaaactactacgagcaatggggaaagctcacagactgtgtggttatgcgggatcctgcaagcaaaagatcaagaggatttggctttgtaactttctcatctatggctgaggttgatgctgccatggctgcaaggcctcattccattgatggcagggtggttgagccaaaacgtgctgtggcaagagaggagtctgggaaaccaggagcccatgtgactgtgaagaaactgttcgttggtggaattaaggaagatactgaggagcatcaccttagagattactttgaagaatatggaaaaattgatactattgaaataattactgataggcagtctggaaaaaaaagaggctttggctttgttacctttgatgaccatgatcctgtggataagattgtcttgcagaaatatcacaccataaatggtcacaatgcagaagttagaaaggcattgtctagacaagaaatgcaggaagtccaaagttctaggagtggaagaggaggaaactttggttttggagattctcgaggtggcggtggcaattttggaccaggaccaggaagcaactttagggggggttctgatggatatggaagtggacgtggatttggggatggctataatgggtatggaggaggacctggaggtggcaattttggaggtagccctggttatggaggaggaagaggaggatatggtggtggaggacctggatatggcaaccagggtgggggctacggaggtggttatgacaactatggaggaggaaattatggaagtggaaattacaatgattttggaaattataaccagcaaccttctaactacggtccaatgaagagtggaaactttggtggtagcaggaacatgggaggaccatatggtggagggaactatggtcctggaggaagtggaggaagtgggggctatggtggaaggagccgatattgagcttcttcctacttaccatgggtaagtagttttttgagttttacaattattattatcttgggagaactagctgcaggagtaaaaaagcaattttaggatcatgttatctttccttaaaatctggttagatggataatttcataacctattttttttttactctttacttctgttgaaacaggcttcactgtataaataggagaggatgagagcccagaggtaacagaacagcttcaggttatcgaaataacaatgttaaggaaactcttatctcagtcatgcataaatatgcagtgatatggcagaagacaccagagcagatgcagagagccattttgtgaatggattggattatttaataccttactgtggaggaaggattgtaaaaaaaaatgcctttgagacagtttcttagctttttaattgttgtttctttctagtggtctttgtaagagtgtagaagcattccttctttgataatgttaaatttgtaagtttcaggtgacatgtgaaaccttttttaagatttttctcaaaaagttttgaaaagctattagccaggatcatggtgtaataagacataacgtttttcctttaaaaatttaagtgcgtgtgtagagttaagaagctgttgtacatttatgatttaataaaataattctaaaggaaattgtgtaattatagactttttattttaaataagttaaggagtgggtagtataattaaggtccattgcaaagctgttgttgtatttgtgtaagataaaaatgctggtcagatttaagtgtgttgtctgaaattcatcaggaataaattacctagttaacttaagggatatctctgcaaggagaaacacctttttagatcttttagatgctgcttcttcaatgcaaggaaaggaaataaccccagcgaggtactcttcagggacacaggtctagtacaagagaactcttgacgactaagctcagccagtcttaaaaaactgtgctgtatctacaaagctttaactacagtagttgataagaatgccaacgagagctgagggtgtagagcaaagtagttctaagcttcagttaaacttctttaggtaagaacttatttactttttctttcttaattttcctcccttaaaagataaactaataaactcttcaatggtcttttcagtatagttcttatgtagtttaacatagcttataaattgagtttaacaataaactcaagaagataattttataaaccctgttttccaatctgtcatttacttaaattattttggttgttttccctttttttccttctttctcaccccctccctctccatgaagattcaggtgcttaacatatcatttttttccctgctggaattttagcattgatatgaaccatggacaagtatattctgctgccacaaagactgtaaagtgcttcatttcaacagctgaggcaagccaagtgatcattaataaagcttttcttgcttccttcagtggtgttggtagtaaaatggtaggtaaaagttaggctgcaagttcaataaatgagatttacctatcattccacccttgtgtattcattcacctatcctggttcaagcagtttgagtcaactaggcatttaaaggcattgtgtttattactttatggttccaactttacatgcttgtcagggatgagtctgataggttaaggacagtagaaatttctgtgcaacagcagcaacaaaaccctttatgtaccctgtactaaataattgggttaaaatgtggtagtaatttttgcccattatcctgccctaaaatgttgtaggttggctattgaaatttcctaaaaccgcccgccctctgatttctaggctttactgcctttccagaaatgtgatattcagggcgtatacacatcagtgagtctgctttaatcctaaaaccaccactgaagttacttaggttctttggacaaacatgataaacttcttcagatactttttttttcctttggcaggaaggtgtcttgctgcaggtaactaatgaagaagtggtcaaccacagagtcttcaagaaataagaaattctgtaccatctgaaagtagttcttgttggtgccttcatttaagaagcacttttaagataaaagggaatgttttctgattaaaaacttcatttagtacaggttcttaataaaattacaaaaatgagtgttgattgtaaaggttaacatcagattagctaaggataatgtgttatgttttaaattaggatttgtgagtagacagataagctctattttaaatacaagttttataaaataaatacttttgtaaccaaagtatggtgtagtgcttacacataagtgtgaatcttgttgtatcgacatcagttgtctacaagatcgtcactactttaaatattagattagttttgcatagaactacacatttatagttttcattctatattaatagacaaaagaagaaattaatgggcattgtttgctatctaacaaaacaccttcctatgaattgtgtacaactacaactttcaggttgaacattaatggtggcatttgaaactggattttaaccaggtactttcctgttaagcatttgcagaacagcaaagcataagttctatttcatttgtgaatgaatagcagtggtgtggtttaagtaaaatggggaattgatttaaaacaaatcagtaagcagttaacctcatttacttgagaaaatgaggcaatgtatacaggtaagtcaatgactaataaatgtgagctctaaacatattgaaaacagtatatccatctttacaaataacctggcttttggctagcaaattcaagaataggtagtgtggtgcatgcccttaatcccagcctttgggaagttgagatccctgggagttaaaagggtatgctttaaataagcctgcaggttgagtctcttgttcacacaacacctccctccatctctgatgccattaagtccttaaattttggacttcaaaatagtgtacatcacaccaattgcaatgtcataaaaggaagtgcagcaacagtaaggtatggtactttgtgagcctttaaagaaaataaaatggatcagtggagttaacattcaggttttagcctttataatctgagtaaattgcacacagcttttgcataccctggagctgggttgacttaactgccctctgggaactaggcttggatcatgtgaaacagttaatgtgtctaaaaacttgagtgtcactcagtaatctgccttctaggatctgttgagctcacaaaatcaaaagcaatgtgataagtgaattgacctagagtactaataggtagatcttaccaagggacatatcaaaaacctaaattgctttgtagctgtgctcaaaattgaggacacaccaaagcagatagtgtggaactttagggatgatgaatatccaatggccatccttgtactagggggccaagtgttgagtcaaaggtgaacctttaaggaagagtggatgttcaaatggtcttgggtgtagacaactggactttactagcgctttagtttattaatctcaaaatggaagttaaccaccaagtggctgtgcatgtacaatgctgagaatcaagctgggtcctttaagaacagcctgtcaacaacccgtcctattcttcatccccatgtgtatagtatttctgttaatttaccttgcttttgtttgcttagaaggattctataactttgggttaaagattatttataggggctgtagagttggctcaagggttaagagcactgactgcccttcaggtcctgagttcaaatcccataacacatggtgtggctctataatggaatccagtgtctgaaaaatacacatgagagtctttttaagatttctatacctgaagtgagtgtatggagcattggctctaatatcccatattgaatatgcttgtaaataacattcaccataaaactaatggacttttttcacatacattgatttcaatgttcgtactgaatattttgacatttaggaaaaaccaactgactgcagtgggtgactatgggattccaggttatttggttgttagtggtgcaattttaacatcacctaaaatttatgaaaggtcaatacaacgcaacttgttatagcagcccattttattaaagattgtggttcatgtacagttcctttaatttataaagtggtaggtcatcactatgtagggctgaaagtgtgggtactttgatttaaagcttgacaatgattagcccttcaggtatctcctgtgcttgatattaacctttgttaatgagtggattttattttatatatatatgagaataaggcaaatatactttggcttgttggaataaaactgctaataaaacattttcacacaagttaaatattaagaaaaa

SEQ ID NO: 2021 - DNA, 3449 bp, Homo sapiens; identical to SEQ ID NO: 2016

SEQ ID NO: 2022 - DNA, 3449 bp, Homo sapiens; identical to SEQ ID NO: 2016

SEQ ID NO: 2023 - DNA, 3449 bp, Homo sapiens; identical to SEQ ID NO: 2016

SEQ ID NO: 2024 - DNA, 3175 bp, Homo sapiens
agtgagaaaaaaaagcaattcctgttaattatgtagacaatgcaagggtctccaggctccatttcagcaagttggtttcatcaagatcacgaaaagatgcatgcgtccccgagaccagagaggagttagggaccccgacacggaggtggcatcaggctctccaggaggccggggggcccactccgcctatcgctcccctcggctacgctgccacttcaatgccccgcaggtcgcgagctgctgttctttcgaaggcgtcggagaaccaggggcgtcccgcgccacctctgactcggagcagcgccgagcactgacgctcccgcccttgggcaaggacgccagtgcgcccgcgcgcgtccctctgcgcggcagcccgtcgcgggccctcaaggggaagcccaggccaggatggccccgggtcgcgcggtggccgggctcctgttgctggcggccgccggcctcggaggagtggcggaggggccagggctagccttcagcgaggatgtgctgagcgtgttcggcgcgaatctgagcctgtcggcggcgcagctccagcacttgctggagcagatgggagccgcctcccgcgtgggcgtcccggagcctggccagctgcacttcaaccagtgtttaactgctgaagagatcttttcccttcatggcttttcaaatgctacccaaataaccagctccaaattctctgtcatctgtccagcagtcttacagcaattgaactttcacccatgtgaggatcggcccaagcacaaaacaagaccaagtcattcagaagtttggggatatggattcctgtcagtgacgattattaatctggcatctctcctcggattgattttgactccactgataaagaaatcttatttcccaaagattttgaccttttttgtggggctggctattgggactcttttttcaaatgcaattttccaacttattccagaggcatttggatttgatcccaaagtcgacagttatgttgagaaggcagttgctgtgtttggtggattttacctacttttcttttttgaaagaatgctaaagatgttattaaagacatatggtcagaatggtcatacccactttggaaatgataactttggtcctcaagaaaaaactcatcaacctaaagcattacctgccatcaatggtgtgacatgctatgcaaatcctgctgtcacagaagctaatggacatatccattttgataatgtcagtgtggtatctctacaggatggaaaaaaagagccaagttcatgtacctgtttgaaggggcccaaactgtcagaaatagggacgattgcctggatgataacgctctgcgatgccctccacaatttcatcgatggcctggcgattggggcttcctgcaccttgtctctccttcagggactcagtacttccatagcaatcctatgtgaggagtttccccacgagttaggagactttgtgatcctactcaatgcagggatgagcactcgacaagccttgctattcaacttcctttctgcatgttcctgctatgttgggctagcttttggcattttggtgggcaacaatttcgctccaaatattatatttgcacttgctggaggcatgttcctctatatttctctggcagatatgtttccagagatgaatgatatgctgagagaaaaggtaactggaagaaaaaccgatttcaccttcttcatgattcagaatgctggaatgttaactggattcacagccattctactcattaccttgtatgcaggagaaatcgaattggagtaatagaaaatggaagatggtgttgttaataaaggcatttaatagataaaaacatctccaaaaaggattttgaagctgatcctatttagttaaaaagataattttgctttcaaccgtaggtccagaaaactaattattggcatcagtctgtgaaatagtccattatttgttgttaaaaatgcttcaaaaggttttcagtgtcagtctgagatgcctggtatataggagcctttgggaaatacctatttttcagtattccatgcatattggatatcaccatgaagcaagagacatgcattctataatcatgtagacactcagactcaggggaaaatacaagttatatcctgaaagcctttaaaactctatggtaggatcaaagattcaaatggtttcagagaggttttatttcaattaatttgttctagtgctttcaagagcaagtacatcaaaatgtagaaggtaaaatgtatgcaacactaatataaattattccaagtctttaaggagccaaagaaaaaaaagatttctcacagctttttgttctgttttgtatttcaattaggaacttgcagtattattttgaaaaccattctaaaataataggagttaggaaataaataaagttttgctagccctgctaagttcaggcttagaggcttatcgctaagtgtaaacttcaccagattccacgaaaagctggatagctttttttctgacttatgttgtggttgcacccctcacaaatggcagaacagtatgtaaagctggtaacacctcggtttcagtgcaccatgtgtttgctttgtgaaggtgaagaatatgttggtttagagaaagaaattggatgtaattttatgcaatttacttttaaagacaaacataactatttagcagagaatattttaataaatgcaaaacaacagctggactgctgtacatcaaggacagattaactggaaaacatatgttccttatgtgtgattgagagccattcagaaaagacttcctttgtgttcagcctatacttttccatatggtataccttgaaaaaaattagcacaccatggttatttttctaccttttataaaagacagagcctgtttactcatttagaagatagagaaaattggtctaaaattgaacatcctagattcacactcccaagtcacttaaggtgatttgatggtgaggaaaatgattgacaaagcccaacaatgatctcaggaattacattttccaacagaccaaaaaatgttttcatgtagcagcaatgcagatttggtgaatatttaatatatattttagtatgtatttcactttatgactgacaattaaaaaatattgtttggccaaatagtaaacacccttttgaaaccatgtatt

SEQ ID NO: 2025 - DNA, 3212 bp, Homo sapiens
atcgcggagtttcaccgcggacctgtcagagatacagaggttgtgggggcgggagacagaaagagagagagatccagagaccgagtcttacgttgacacgcagagagaaagacgcagagacagacaaacaaacagataggagaggctctccaggaggccggggggcccactccgcctatcgctcccctcggctacgctgccacttcaatgccccgcaggtcgcgagctgctgttctttcgaaggcgtcggagaaccaggggcgtcccgcgccacctctgactcggagcagcgccgagcactgacgctcccgcccttgggcaaggacgccagtgcgcccgcgcgcgtccctctgcgcggcagcccgtcgcgggccctcaaggggaagcccaggccaggatggccccgggtcgcgcggtggccgggctcctgttgctggcggccgccggcctcggaggagtggcggaggggccagggctagccttcagcgaggatgtgctgagcgtgttcggcgcgaatctgagcctgtcggcggcgcagctccagcacttgctggagcagatgggagccgcctcccgcgtgggcgtcccggagcctggccagctgcacttcaaccagtgtttaactgctgaagagatcttttcccttcatggcttttcaaatgctacccaaataaccagctccaaattctctgtcatctgtccagcagtcttacagcaattgaactttcacccatgtgaggatcggcccaagcacaaaacaagaccaagtcattcagaagtttggggatatggattcctgtcagtgacgattattaatctggcatctctcctcggattgattttgactccactgataaagaaatcttatttcccaaagattttgaccttttttgtggggctggctattgggactcttttttcaaatgcaattttccaacttattccagaggcatttggatttgatcccaaagtcgacagttatgttgagaaggcagttgctgtgtttggtggattttacctacttttcttttttgaaagaatgctaaagatgttattaaagacatatggtcagaatggtcatacccactttggaaatgataactttggtcctcaagaaaaaactcatcaacctaaagcattacctgccatcaatggtgtgacatgctatgcaaatcctgctgtcacagaagctaatggacatatccattttgataatgtcagtgtggtatctctacaggtatatgttaattccatttttccttcattatactgcattctttatactgatggaaaaaaagagccaagttcatgtacctgtttgaaggggcccaaactgtcagaaatagggacgattgcctggatgataacgctctgcgatgccctccacaatttcatcgatggcctggcgattggggcttcctgcaccttgtctctccttcagggactcagtacttccatagcaatcctatgtgaggagtttccccacgagttaggagactttgtgatcctactcaatgcagggatgagcactcgacaagccttgctattcaacttcctttctgcatgttcctgctatgttgggctagcttttggcattttggtgggcaacaatttcgctccaaatattatatttgcacttgctggaggcatgttcctctatatttctctggcagatatgtttccagagatgaatgatatgctgagagaaaaggtaactggaagaaaaaccgatttcaccttcttcatgattcagaatgctggaatgttaactggattcacagccattctactcattaccttgtatgcaggagaaatcgaattggagtaatagaaaatggaagatggtgttgttaataaaggcatttaatagataaaaacatctccaaaaaggattttgaagctgatcctatttagttaaaaagataattttgctttcaaccgtaggtccagaaaactaattattggcatcagtctgtgaaatagtccattatttgttgttaaaaatgcttcaaaaggttttcagtgtcagtctgagatgcctggtatataggagcctttgggaaatacctatttttcagtattccatgcatattggatatcaccatgaagcaagagacatgcattctataatcatgtagacactcagactcaggggaaaatacaagttatatcctgaaagcctttaaaactctatggtaggatcaaagattcaaatggtttcagagaggttttatttcaattaatttgttctagtgctttcaagagcaagtacatcaaaatgtagaaggtaaaatgtatgcaacactaatataaattattccaagtctttaaggagccaaagaaaaaaaagatttctcacagctttttgttctgttttgtatttcaattaggaacttgcagtattattttgaaaaccattctaaaataataggagttaggaaataaataaagttttgctagccctgctaagttcaggcttagaggcttatcgctaagtgtaaacttcaccagattccacgaaaagctggatagctttttttctgacttatgttgtggttgcacccctcacaaatggcagaacagtatgtaaagctggtaacacctcggtttcagtgcaccatgtgtttgctttgtgaaggtgaagaatatgttggtttagagaaagaaattggatgtaattttatgcaatttacttttaaagacaaacataactatttagcagagaatattttaataaatgcaaaacaacagctggactgctgtacatcaaggacagattaactggaaaacatatgttccttatgtgtgattgagagccattcagaaaagacttcctttgtgttcagcctatacttttccatatggtataccttgaaaaaaattagcacaccatggttatttttctaccttttataaaagacagagcctgtttactcatttagaagatagagaaaattggtctaaaattgaacatcctagattcacactcccaagtcacttaaggtgatttgatggtgaggaaaatgattgacaaagcccaacaatgatctcaggaattacattttccaacagaccaaaaaatgttttcatgtagcagcaatgcagatttggtgaatatttaatatatattttagtatgtatttcactttatgactgacaattaaaaaatattgtttggccaaatagtaaacacccttttgaaaccatgtatt

SEQ ID NO: 2026 - DNA, 3175 bp, Homo sapiens; identical to SEQ ID NO: 2024

SEQ ID NO: 2027 - DNA, 3175 bp, Homo sapiens; identical to SEQ ID NO: 2024

SEQ ID NO: 2028 - DNA, 2273 bp, Homo sapiens
gcatttgaaaagtctggtagggactacaggaaagcctggcacttaggaaaaccacaagaaagggattcagaactaaaagaaggaagatgaataggacggaggtgtggagagtgttagagacccgaagctactccctcttgatgccctcccctttgcccctcactcaggatgctccagaccttgtatgattacttctggtgggaacgtctgtggctgcctgtgaacttgacctgggccgatctagaagaccgagatggacgtgtctacgccaaagcctcagatctctatatcacgctgcccctggccttgctcttcctcatcgttcgatacttctttgagctgtacgtggctacaccactggctgccctcttgaacataaaggagaaaactcggctgcgggcacctcccaacgccaccttggaacatttctacctgaccagtggcaagcagcccaagcaggtggaagtagagcttttgtcccggcagagcgggctctctggccgccaggtagagcgttggttccgtcgccgccgcaaccaggaccggcccagtctcctcaagaagttccgagaagccagctggagattcacattttacctgattgccttcattgccggcatggccgtcattgtggataaaccctggttctatgacatgaagaaagtttgggagggatatcccatacagagcactatcccttcccagtattggtactacatgattgaactttccttctactggtccctgctcttcagcattgcctctgatgtcaagcgaaaggatttcaaggaacagatcatccaccatgtggccaccatcattctcatcagcttttcctggtttgccaattacatccgagctgggactctaatcatggctctgcatgactcttccgattacctgctggagtcagccaagatgtttaactacgcgggatggaagaacacctgcaacaacatcttcatcgtcttcgccattgtttttatcatcacccgactggtcatcctgcccttctggatcctgcattgcaccctggtgtacccactggagctctatcctgccttctttggctattacttcttcaattccatgatgggagttctacagctgctgcatatcttctgggcctacctcattttgcgcatggcccacaagttcataactggaaagctggtagaagatgaacgcagtgaccgggaagaaacagagagctcagagggggaggaggctgcagctgggggaggagcaaagagccggcccctagccaatggccaccccatcctcaataacaaccatcgtaagaatgactgaaccattattccagctgcctcccagattaatgcataaagccaaggaactaccccgctccctgcgctatagggtcactttaagctctggggaaaaaggagaaagtgagaggagagttctctgcatcctccctccttgcttgtcacccagttgcctttaaaccaaattctaaccagcctatccccaggtagggggacgttggttatattctgttagagggggacggtcgtattttcctccctacccgccaagtcatcctttctactgcttttgaggccctccctcagctctctgtgggtaggggttacaattcacattccttattctgagaatttggccccagctgtttgcctttgactccctgacctccagagccagggttgtgccttattgtcccatctgtgggcctcattctgccaaagctggaccaaggctaacctttctaagctccctaacttgggccagaaaccaaagctgagcttttaactttctccctctatgacacaaatgaattgagggtaggaggagggtgcacataacccttaccctacctctgccaaaaagtgggggctgtactggggactgctcggatgatctttcttagtgctacttctttcagctgtccctgtagcgacaggtctaagatctgactgcctcctcctttctctggcctcttcccccttccctcttctcttcagctaggctagctggtttggagtagaatggcaactaattctaatttttatttattaaatatttggggttttggttttaaagccagaattacggctagcacctagcatttcagcagagggaccattttagaccaaaatgtactgttaatgggtttttttttaaaattaaaagattaaataaaaaatattaaataaaacatggcaataagtgtcagactattaggaattgagaagggggatcaactaaataaacgaagagagtctttctta

SEQ ID NO: 2029 - DNA, 2273 bp, Homo sapiens; identical to SEQ ID NO: 2028

SEQ ID NO: 2030 - DNA, 2273 bp, Homo sapiens; identical to SEQ ID NO: 2028

SEQ ID NO: 2031 - DNA, 2273 bp, Homo sapiens; identical to SEQ ID NO: 2028

SEQ ID NO: 2032 - DNA, 1988 bp, Homo sapiens
gtgctgcagccgctgccgccgattccggatctcattgccacgcgcccccgacgaccgcccgacgtgcattcccggtacgattccttttggttccaagtccaatatggcaactctaaaggatcagctgatttataatcttctaaaggaagaacagaccccccagaataagattacagttgttggggttggtgctgttggcatggcctgtgccatcagtatcttaatgaaggacttggcagatgaacttgctcttgttgatgtcatcgaagacaaattgaagggagagatgatggatctccaacatggcagccttttccttagaacaccaaagattgtctctggcaaagactataatgtaactgcaaactccaagctggtcattatcacggctggggcacgtcagcaagagggagaaagccgtcttaatttggtccagcgtaacgtgaacatctttaaattcatcattcctaatgttgtaaaatacagcccgaactgcaagttgcttattgtttcaaatccagtggatatcttgacctacgtggcttggaagataagtggttttcccaaaaaccgtgttattggaagcggttgcaatctggattcagcccgattccgttacctaatgggggaaaggctgggagttcacccattaagctgtcatgggtgggtccttggggaacatggagattccagtgtgcctgtatggagtggaatgaatgttgctggtgtctctctgaagactctgcacccagatttagggactgataaagataaggaacagtggaaagaggttcacaagcaggtggttgagagtgcttatgaggtgatcaaactcaaaggctacacatcctgggctattggactctctgtagcagatttggcagagagtataatgaagaatcttaggcgggtgcacccagtttccaccatgattaagggtctttacggaataaaggatgatgtcttccttagtgttccttgcattttgggacagaatggaatctcagaccttgtgaaggtgactctgacttctgaggaagaggcccgtttgaagaagagtgcagatacactttgggggatccaaaaggagctgcaattttaaagtcttctgatgtcatatcatttcactgtctaggctacaacaggattctaggtggaggttgtgcatgttgtcctttttatctgatctgtgattaaagcagtaatattttaagatggactgggaaaaacatcaactcctgaagttagaaattcttgtgtagtcttcaactggttagtgtgaaatagttctgccacctctgacgcaccactgccaatgctgtacgtactgcatttgccccttgagccaggtggatgtttaccgtgtgttatataacttcctggctccttcactgaacatgcctagtccaacattttttcccagtgagtcacatcctgggatccagtgtataaatccaatatcatgtcttgtgcataattcttccaaaggatcttattttgtgaactatatcagtagtgtacattaccatataatgtaaaaagatctacatacaaacaatgcaaccaactatccaagtgttataccaactaaaacccccaataaaccttgaacagtgactactttggttaattcattatattaagatataaagtcataaagctgctagttattatattaatttggaaatattaggctattcttgggcaaccctgcaacgattttttctaacagggatattattgactaatagcagaggatgtaatagtcaactgagttgtattggtaccacttccattgtaagtcccaaagtattatatatttgataataatgctaatcataattggaaagtaacattctatatgtaaatgtaaaatttatttgccaactgaatataggcaatgatagtgtgtcactatagggaacacagatttttgagatcttgtcctctggaagctggtaacaattaaaaacaatcttaaggcaggg

SEQ ID NO: 2033 - DNA, 1988 bp, Homo sapiens; identical to SEQ ID NO: 2032

SEQ ID NO: 2034 - DNA, 2563 bp, Homo sapiens
attggtggatccatttagttcaagaaaatggagaccgaacagccagaagaaaccttccctaacaccgaaaccaatggtgaatttggtaaacgccctgcagaagatatggaagaggaacaagcctttaaaagatctagaaatactgatgagatggttgaattgcgcattttgcttcagagcaagaatgctggggcagtgattggaaaaggaggcaagaatattaaggctctccgtacagactacaatgccagtgtttcagtcccagacagcagtggccccgagcgcatactgagtatcagtgctgatattgagacgattggagaaattctgaagaaaatcatccctactttggaagagggcctgcagttgccatcacccactgcaaccagccagctcccgctcgaatctgatgctgtggaatgcttaaattaccagcattataaagggagtgacttcgactgcgagctgagactgttgattcatcaaagtctggccggaggaattattggtgttaaaggtgctaaaatcaaagaacttcgagaaaacactcagacaacaatcaagcttttccaggaatgctgccctcattctactgacagagttgttcttattggaggaaagcccgatagggttgtagaatgcatcaagatcatccttgaccttatatctgagtctcccatcaaaggacgtgcacaaccttatgatcccaacttctatgatgaaacctatgattatggtggttttacaatgatgtttgatgaccgccgaggacgacctgtgggattccccatgcggggaagaggtggttttgacagaatgcctcctggtcggggtgggcgtcccatgcctccttctagaagagattatgatgatatgagccctcgtcgaggaccaccaccaccaccacctggtcgaggtggacggggtggcagcagagctcggaatcttcctcttcctccaccaccaccacccagagggggagatctcatggcttacgacagaagaggacggcctggagaccgctatgatggcatggttgggttcagtgctgatgaaacttgggactctgcaattgacacatggagcccatcagaatggcaaatggcttatgaaccacagggtggttctggatatgattattcttatgcagggggccgtggctcgtatggtgatcttggcggacctattatcactacacaagtaactattcccaaagatttggctggatctattattggcaaaggtggtcagcggattaaacaaattcgtcatgagtctggagcatctatcaaaattgatgaacctttagaaggatctgaagatcggatcattaccattacgggaacacaggaccagatacagaacgcacagtatttgctgcagaacagtgtgaagcagtattctggaaagtttttctaagactagtgaagaactgaaggagtcctgcatctttttttttttatctgcttctgtttaaaaagccaacattcctctgcttcctaggtgttctgcatttgaggtgtagtgaaatctttgctgttcaccagatgtaatgttttagttccttacaaacagggttggggggagggcatgcaaaaaaactaacattgaaattttgaaacagcagcagagtgagtgacttttattttttgttcattgttggtggttttaaaaattccccccgtgtaattattgtgaacaccttgctttgtggtcactgtaacattggggggtgggacagggaggaaagtaatagtccacatgtccctggcatttgttcagagcagtgtgcagaatgtaatgctcttttgtaagaaacgttttatgatttttaaaataaatttagtgaatctatttttggtggtctttttttttttttttaaagacaatttcaaatggtggttgaattttccagcccacccctaaactaaacactaagtttgattttcagcagctcctctgttggatataagtgcacctcttggatatagacaaacacattggcaaatttcagtttgggtgatttcttaatggttggaaagacttggcttgataaatttccatcacatattcatgcttataataagcttgggattttgtttgtttttgcaaatgtttgccactacttttcaacagttttctgttagtcgtggggaactgcggtggggagcaatactacaagagtaagcatctgagtatgtgccagaagcctggtgggcaatgagctttattaaccagagtaacacttggttatggaagtggctgatgctgaataaatcctggttatttttgttagataatttctcacctatagacttaagctgtcaactgctagcgtcttgttagttgaactttgtaaaaatatatatatacttgtttttccattgtatgcacaatgaaagaaaaaagatgtaccatttctctgttgtgtgttgaattatgtaggaaatgtttgtgaacgattcaaaaaaaatggaaaagttcctgtggatgttttgtgtagtaacttggcatctgtattgatagttccaaatccacatctaaataaaacttcatgatgtta

SEQ ID NO: 2035 - DNA, 2911 bp, Homo sapiens
ccctccccccagctagtgagtgcgcgaacgagaaaggaggagggcgctccaggcgacagcattgcagacgccattatcctctgtttctctgctgcaccgacctcgacgtcttgcctgtgtcccacttgttcgcggcctataggctactgcagcactggggtgtcagttgttggtccgacccagaacgcttcagttgtgctctgcaaggatatataataactgattggtgtgcccgtttaataaaagaatatggaaactgaacagccagaagaaaccttccctaacactgaaaccaatggtgaatttggtaaacgccctgcagaagatatggaagaggaacaagcatttaaaagatctagaaacactgatgagatggttgaattacgcattctgcttcagagcaagaatgctggggcagtgattggaaaaggaggcaagaatattaaggctctccgtacagactacaatgccagtgtttcagtcccagacagcagtggccccgagcgcatattgagtatcagtgctgatattgaaacaattggagaaattctgaagaaaatcatccctaccttggaagagggcctgcagttgccatcacccactgcaaccagccagctcccgctcgaatctgatgctgtggaatgcttaaattaccaacactataaaggaagtgactttgactgcgagttgaggctgttgattcatcagagtctagcaggaggaattattggggtcaaaggtgctaaaatcaaagaacttcgagagaacactcaaaccaccatcaagcttttccaggaatgctgtcctcattccactgacagagttgttcttattggaggaaaacccgatagggttgtagagtgcataaagatcatccttgatcttatatctgagtctcccatcaaaggacgtgcacagccttatgatcccaatttttacgatgaaacctatgattatggtggttttacaatgatgtttgatgaccgtcgcggacgcccagtgggatttcccatgcggggaagaggtggttttgacagaatgcctcctggtcggggtgggcgtcccatgcctccatctagaagagattatgatgatatgagccctcgtcgaggaccacctccccctcctcccggacgaggcggccggggtggtagcagagctcggaatcttcctcttcctccaccaccaccacctagagggggagacctcatggcctatgacagaagagggagacctggagaccgttacgacggcatggttggtttcagtgctgatgaaacttgggactctgcaatagatacatggagcccatcagaatggcagatggcttatgaaccacaggttgagtatcatagttattattcctatgcagggggtcgtggctcatatggtgatcttggtggacctattattactacacaagtaactattcccaaagatttggctggatctattattggcaaaggtggtcagcggattaaacaaatccgtcatgagtcgggagcttcgatcaaaattgatgagcctttagaaggatccgaagatcggatcattaccattacaggaacacaggaccagatacagaatgcacagtatttgctgcagaacagtgtgaagcagtattctggaaagtttttctaagactagtgaagaactgaaggagtcctgcatctttttttttttatctgcttctgtttaaaaagccaacattcctctgcttcataggtgttctgcatttgaggtgtagtgaaatctttgctgttcaccagatgtaatgttttagttccttacaaacagggttgggggggggaagggcgtgcaaaaactaacattgaaattttgaaacagcagcagagtgagtggattttatttttcgttattgttggtggtttaaaaaattccccccatgtaattattgtgaacaccttgctttgtggtcactgtaacatttggggggtgggacagggaggaaaagtaacaatagtccacatgtccctggcatctgttcagagcagtgtgcagaatgtaatgctcttttgtaagaaacgttttatgatttttaaaataaatttagtgaacctatttttggtggtcattttttttttaagacagtcattttaaaatggtggctgaatttcccaacccacccccaaactaaacactaagtttaattttcagctcctctgttggacatataagtgcatctcttgttggacataggcaaaataacttggcaaacttagttctggtgatttcttgatggtttggaagtctattgctgggaagaaattccatcatacatattcatgcttataataagctggggattttttgtttgtttttgcaaatgcttgcccctacttttcaacaattttctatgttagttgtgaagaactaaggtggggagcagtactacaagttgagtaatggtatgagtatataccagaattctgattggcagcaagttttattaatcagaataacacttggttatggaagtgactaatgctgaaaaaattgattatttttattagataatttctcacctatagacttaaactgtcaatttgctctagtgtcttattagttaaactttgtaaaatatatatatacttgtttttccattgtatgcaaattgaaagaaaaagatgtaccatttctctgttgtatgttggattatgtaggaaatgtttgtgtacaattcaaaaaaaaaaaagatgaaaaaagttcctgtggatgttttgtgtagtatcttggcatttgtattgatagttaaaattcacttccaaataaataaaacacccatgatgctagatttgatgtgtgcccaatttgaacaagggttgattgacacctgtaaaatttgttgaaacgttcctcttaaaaggaaatatagtaatcttatgtattt

SEQ ID NO: 2036 - DNA, 2899 bp, Homo sapiens
ccctccccccagctagtgagtgcgcgaacgagaaaggaggagggcgctccaggcgacagcattgcagacgccattatcctctgtttctctgctgcaccgacctcgacgtcttgcctgtgtcccacttgttcgcggcctataggctactgcagcactggggtgtcagttgttggtccgacccagaacgcttcagttgtgctctgcaaggatatataataactgattggtgtgcccgtttaataaaagaatatggaaactgaacagccagaagaaaccttccctaacactgaaaccaatggtgaatttggtaaacgccctgcagaagatatggaagaggaacaagcatttaaaagatctagaaacactgatgagatggttgaattacgcattctgcttcagagcaagaatgctggggcagtgattggaaaaggaggcaagaatattaaggctctccgtacagactacaatgccagtgtttcagtcccagacagcagtggccccgagcgcatattgagtatcagtgctgatattgaaacaattggagaaattctgaagaaaatcatccctaccttggaagagtaccaacactataaaggaagtgactttgactgcgagttgaggctgttgattcatcagagtctagcaggaggaattattggggtcaaaggtgctaaaatcaaagaacttcgagagaacactcaaaccaccatcaagcttttccaggaatgctgtcctcattccactgacagagttgttcttattggaggaaaacccgatagggttgtagagtgcataaagatcatccttgatcttatatctgagtctcccatcaaaggacgtgcacagccttatgatcccaatttttacgatgaaacctatgattatggtggttttacaatgatgtttgatgaccgtcgcggacgcccagtgggatttcccatgcggggaagaggtggttttgacagaatgcctcctggtcggggtgggcgtcccatgcctccatctagaagagattatgatgatatgagccctcgtcgaggaccacctccccctcctcccggacgaggcggccggggtggtagcagagctcggaatcttcctcttcctccaccaccaccacctagagggggagacctcatggcctatgacagaagagggagacctggagaccgttacgacggcatggttggtttcagtgctgatgaaacttgggactctgcaatagatacatggagcccatcagaatggcagatggcttatgaaccacaggttgagtatcatagttattattcctatgcagggggtcgtggctcatatggtgatcttggtggacctattattactacacaagtaactattcccaaagatttggctggatctattattggcaaaggtggtcagcggattaaacaaatccgtcatgagtcgggagcttcgatcaaaattgatgagcctttagaaggatccgaagatcggatcattaccattacaggaacacaggaccagatacagaatgcacagtatttgctgcagaacagtgtgaagcagtatgcagatgttgaaggattctaatgcaagatattttttcttttttatagtgtgaagcagtattctggaaagtttttctaagactagtgaagaactgaaggagtcctgcatctttttttttttatctgcttctgtttaaaaagccaacattcctctgcttcataggtgttctgcatttgaggtgtagtgaaatctttgctgttcaccagatgtaatgttttagttccttacaaacagggttgggggggggaagggcgtgcaaaaactaacattgaaattttgaaacagcagcagagtgagtggattttatttttcgttattgttggtggtttaaaaaattccccccatgtaattattgtgaacaccttgctttgtggtcactgtaacatttggggggtgggacagggaggaaaagtaacaatagtccacatgtccctggcatctgttcagagcagtgtgcagaatgtaatgctcttttgtaagaaacgttttatgatttttaaaataaatttagtgaacctatttttggtggtcattttttttttaagacagtcattttaaaatggtggctgaatttcccaacccacccccaaactaaacactaagtttaattttcagctcctctgttggacatataagtgcatctcttgttggacataggcaaaataacttggcaaacttagttctggtgatttcttgatggtttggaagtctattgctgggaagaaattccatcatacatattcatgcttataataagctggggattttttgtttgtttttgcaaatgcttgcccctacttttcaacaattttctatgttagttgtgaagaactaaggtggggagcagtactacaagttgagtaatggtatgagtatataccagaattctgattggcagcaagttttattaatcagaataacacttggttatggaagtgactaatgctgaaaaaattgattatttttattagataatttctcacctatagacttaaactgtcaatttgctctagtgtcttattagttaaactttgtaaaatatatatatacttgtttttccattgtatgcaaattgaaagaaaaagatgtaccatttctctgttgtatgttggattatgtaggaaatgtttgtgtacaattcaaaaaaaaaaaagatgaaaaaagttcctgtggatgttttgtgtagtatcttggcatttgtattgatagttaaaattcacttccaaataaataaaacacccatgatgctagatttgatgtgtgcccaatttgaacaagggttgattgacacctgtaaaatttgttgaaacgttcctcttaaaaggaaatatagtaatcttatgtattt

SEQ ID NO: 2037 - DNA, 2911 bp, Homo sapiens; identical to SEQ ID NO: 2035

SEQ ID NO: 2038 - DNA, 2865 bp, Homo sapiens
ccctccccccagctagtgagtgcgcgaacgagaaaggaggagggcgctccaggcgacagcattgcagacgccattatcctctgtttctctgctgcaccgacctcgacgtcttgcctgtgtcccacttgttcgcggcctataggctactgcagcactggggtgtcagttgttggtccgacccagaacgcttcagttgtgctctgcaaggatatataataactgattggtgtgcccgtttaataaaagaatatggaaactgaacagccagaagaaaccttccctaacactgaaaccaatggtgaatttggtaaacgccctgcagaagatatggaagaggaacaagcatttaaaagatctagaaacactgatgagatggttgaattacgcattctgcttcagagcaagaatgctggggcagtgattggaaaaggaggcaagaatattaaggctctccgtacagactacaatgccagtgtttcagtcccagacagcagtggccccgagcgcatattgagtatcagtgctgatattgaaacaattggagaaattctgaagaaaatcatccctaccttggaagagggcctgcagttgccatcacccactgcaaccagccagctcccgctcgaatctgatgctgtggaatgcttaaattaccaacactataaaggaagtgactttgactgcgagttgaggctgttgattcatcagagtctagcaggaggaattattggggtcaaaggtgctaaaatcaaagaacttcgagagaacactcaaaccaccatcaagcttttccaggaatgctgtcctcattccactgacagagttgttcttattggaggaaaacccgatagggttgtagagtgcataaagatcatccttgatcttatatctgagtctcccatcaaaggacgtgcacagccttatgatcccaatttttacgatgaaacctatgattatggtggttttacaatgatgtttgatgaccgtcgcggacgcccagtgggatttcccatgcggggaagaggtggttttgacagaatgcctcctggtcggggtgggcgtcccatgcctccatctagaagagattatgatgatatgagccctcgtcgaggaccacctccccctcctcccggacgaggcggccggggtggtagcagagctcggaatcttcctcttcctccaccaccaccacctagagggggagacctcatggcctatgacagaagagggagacctggagaccgttacgacggcatggttggtttcagtgctgatgaaacttgggactctgcaatagatacatggagcccatcagaatggcagatggcttatgaaccacagggtggctccggatatgattattcctatgcagggggtcgtggctcatatggtgatcttggtggacctattattactacacaagtaactattcccaaagatttggctggatctattattggcaaaggtggtcagcggattaaacaaatccgtcatgagtcgggagcttcgatcaaaattgatgagcctttagaaggatccgaagatcggatcattaccattacaggaacacaggaccagatacagaatgcacagtatttgctgcagaacagtgtgaagcagtatgcagatgttgaaggattctaatgcaagatattttttcttttttatagtgtgaagcagtattctggaaagtttttctaagactagtgaagaactgaaggagtcctgcatctttttttttttatctgcttctgtttaaaaagccaacattcctctgcttcataggtgttctgcatttgaggtgtagtgaaatctttgctgttcaccagatgtaatgttttagttccttacaaacagggttgggggggggaagggcgtgcaaaaactaacattgaaattttgaaacagcagcagagtgagtggattttatttttcgttattgttggtggtttaaaaaattccccccatgtaattattgtgaacaccttgctttgtggtcactgtaacatttggggggtgggacagggaggaaaagtaacaatagtccacatgtccctggcatctgttcagagcagtgtgcagaatgtaatgctcttttgtaagaaacgttttatgatttttaaaataaactgaatttcccaacccacccccaaactaaacactaagtttaattttcagctcctctgttggacatataagtgcatctcttgttggacataggcaaaataacttggcaaacttagttctggtgatttcttgatggtttggaagtctattgctgggaagaaattccatcatacatattcatgcttataataagctggggaattttctatgttagttgtgaagaactaaggtggggagcagtactacaagttgagtaatggtatgagtatataccagaattctgattggcagcaagttttattaatcagaataacacttggttatggaagtgactaatgctgaaaaaattgattatttttattagataatttctcacctatagacttaaactgtcaatttgctctagtgtcttattagttaaactttgtaaaatatatatatacttgtttttccattgtatgcaaattgaaagaaaaagatgtaccatttctctgttgtatgttggattatgtaggaaatgtttgtgtacaattcaaaaaaaaaaaagatgaaaaaagttcctgtggatgttttgtgtagtatcttggcatttgtattgatagttaaaattcacttccaaataaataaaacacccatgatgctagatttgatgtgtgcccaatttgaacaagggttgattgacacctgtaaaatttgttgaaacgttcctcttaaaaggaaatatagtaatcttatgta

SEQ ID NO: 2039 - DNA, 1904 bp, Homo sapiens
tgcgcgaacgagaaaggaggagggcgctccaggcgaaagcactgcggacgccattatcctctgtttctcagctgctgcaacctcgacgtctcgcctacgtcccgcttctttgcggcctataggctactgcagcactagggtgtcagttggtcccgcccagaacacttcagttctgctctgcaaggatatataatacctgattggtgtgtccatttgatacacgaaaatggaaactgaacagccagaggaaaccttccccaacaccgaaaccaatggtgaatttggtaaacgccctgcagaagatatggaagaggaacaagcttttaaaagatctagaaacactgatgagatggttgaactacgcattttgcttcagagcaagaatgctggggcagtgattggaaaaggaggcaagaatattaaggctctccgtacagactacaatgccagtgtttcagtcccagacagcagtggccccgagcgcatattgagtatcagtgctgatattgagacaattggagaaattctgaagaaaatcatccctaccttggaagagggcctgcagttgccatcacccactgcaaccagccagctcccgctcgaatctgatgctgtggaatgcttaaattaccaacactataaaggaagtgactttgactgcgagttgagactgttgattcatcagagtctggcaggaggaattattggggtcaaaggtgctaaaatcaaaaaatttggggggaacacacagacaacaatcaagcttttccaggaatgctgtcctcattccactgacagagttgttcttattggaggaaaacctgatagggtggtagagtgcatcaagatcatccttgatcttatatcagagtctcccatcaaaggacgtgcacagccttatgatcccaatttttatgatgaaacctacgattatggtggctttacaatgatgtttgatgaccgccgtggacgccctgtgggatttcccatgcgggggagaggtggttttgacagaatgcctcctggtcggggtgggcgtcctatgcctccatccagaagagattatgacgatatgagccctcgccgaggacctcctcctccacctcctggaagaggtggccggggtggtagtagagctcggaatcttcctcttcctcctccaccaccacctagaggaggggatctcatggcctatgacagaagaggaagacctggagaccgctacgatggcatggttggtttcagtgctgatgaaacttgggactctgcaatagatacatggagcccatcagaatggcagatggcttatgaaccacagggtggctccggatatgattattcctatgcagggggtcgtggctcatatggtgatcttggtggacctattattactacacaagtaactattcccaaagatttggctggatctattattggcaaaggtggtcagcggattaagcaaatccgtcatgagtcaggagcttcgatcaaaattgatgaacctctagaagggtctgaagatcggatcattaccattacaggaacacaggaccagatacagaatgcacagtatttgctgcagaacagtgtgaagcagtatgcagatgttgaaggattctaatgcaagatattttttcttttttatagtgtgaagcagtattctggaaagtttttctaagactagtgaagaactgaaggagtcctgcatctttttttttttatctgcttctgtttaaaaagccaacattcctctgcttcataggtgttctgcatttgaggtgtagtgaaatctttgctgttcaccagatgtaatgttttagttccttacaaacagggtgggcgggggaagggcgtgcaaaaactaacattgaaattttgaaacagcagcagagtgattgtatttt

SEQ ID NO: 2040 - DNA, 2908 bp, Homo sapiens
ccctccccccagctagtgagtgcgcgaacgagaaaggaggagggcgctccaggcgacagcattgcagacgccattatcctctgtttctctgctgcaccgacctcgacgtcttgcctgtgtcccacttgttcgcggcctataggctactgcagcactggggtgtcagttgttggtccgacccagaacgcttcagttgtgctctgcaaggatatataataactgattggtgtgcccgtttaataaaagaatatggaaactgaacagccagaagaaaccttccctaacactgaaaccaatggtgaatttggtaaacgccctgcagaagatatggaagaggaacaagcatttaaaagatctagaaacactgatgagatggttgaattacgcattctgcttcagagcaagaatgctggggcagtgattggaaaaggaggcaagaatattaaggctctccgtacagactacaatgccagtgtttcagtcccagacagcagtggccccgagcgcatattgagtatcagtgctgatattgaaacaattggagaaattctgaagaaaatcatccctaccttggaagagggcctgcagttgccatcacccactgcaaccagccagctcccgctcgaatctgatgctgtggaatgcttaaattaccaacactataaaggaagtgactttgactgcgagttgaggctgttgattcatcagagtctagcaggaggaattattggggtcaaaggtgctaaaatcaaagaacttcgagagaacactcaaaccaccatcaagcttttccaggaatgctgtcctcattccactgacagagttgttcttattggaggaaaacccgatagggttgtagagtgcataaagatcatccttgatcttatatctgagtctcccatcaaaggacgtgcacagccttatgatcccaatttttacgatgaaacctatgattatggtggttttacaatgatgtttgatgaccgtcgcggacgcccagtgggatttcccatgcggggaagaggtggttttgacagaatgcctcctggtcggggtgggcgtcccatgcctccatctagaagagattatgatgatatgagccctcgtcgaggaccacctccccctcctcccggacgaggcggccggggtggtagcagagctcggaatcttcctcttcctccaccaccaccacctagagggggagacctcatggcctatgacagaagagggagacctggagaccgttacgacggcatggttggtttcagtgctgatgaaacttgggactctgcaatagatacatggagcccatcagaatggcagatggcttatgaaccacaggttgagtatcataattattcctatgcagggggtcgtggctcatatggtgatcttggtggacctattattactacacaagtaactattcccaaagatttggctggatctattattggcaaaggtggtcagcggattaaacaaatccgtcatgagtcgggagcttcgatcaaaattgatgagcctttagaaggatccgaagatcggatcattaccattacaggaacacaggaccagatacagaatgcacagtatttgctgcagaacagtgtgaagcagtattctggaaagtttttctaagactagtgaagaactgaaggagtcctgcatctttttttttttatctgcttctgtttaaaaagccaacattcctctgcttcataggtgttctgcatttgaggtgtagtgaaatctttgctgttcaccagatgtaatgttttagttccttacaaacagggttgggggggggaagggcgtgcaaaaactaacattgaaattttgaaacagcagcagagtgagtggattttatttttcgttattgttggtggtttaaaaaattccccccatgtaattattgtgaacaccttgctttgtggtcactgtaacatttggggggtgggacagggaggaaaagtaacaatagtccacatgtccctggcatctgttcagagcagtgtgcagaatgtaatgctcttttgtaagaaacgttttatgatttttaaaataaatttagtgaacctatttttggtggtcattttttttttaagacagtcattttaaaatggtggctgaatttcccaacccacccccaaactaaacactaagtttaattttcagctcctctgttggacatataagtgcatctcttgttggacataggcaaaataacttggcaaacttagttctggtgatttcttgatggtttggaagtctattgctgggaagaaattccatcatacatattcatgcttataataagctggggattttttgtttgtttttgcaaatgcttgcccctacttttcaacaattttctatgttagttgtgaagaactaaggtggggagcagtactacaagttgagtaatggtatgagtatataccagaattctgattggcagcaagttttattaatcagaataacacttggttatggaagtgactaatgctgaaaaaattgattatttttattagataatttctcacctatagacttaaactgtcaatttgctctagtgtcttattagttaaactttgtaaaatatatatatacttgtttttccattgtatgcaaattgaaagaaaaagatgtaccatttctctgttgtatgttggattatgtaggaaatgtttgtgtacaattcaaaaaaaaaaaagatgaaaaaagttcctgtggatgttttgtgtagtatcttggcatttgtattgatagttaaaattcacttccaaataaataaaacacccatgatgctagatttgatgtgtgcccaatttgaacaagggttgattgacacctgtaaaatttgttgaaacgttcctcttaaaaggaaatatagtaatcttatgtattt

SEQ ID NO: 2041 - DNA, 2971 bp, Homo sapiens
ccctccccccagctagtgagtgcgcgaacgagaaaggaggagggcgctccaggcgacagcattgcagacgccattatcctctgtttctctgctgcaccgacctcgacgtcttgcctgtgtcccacttgttcgcggcctataggctactgcagcactggggtgtcagttgttggtccgacccagaacgcttcagttgtgctctgcaaggatatataataactgattggtgtgcccgtttaataaaagaatatggaaactgaacagccagaagaaaccttccctaacactgaaaccaatggtgaatttggtaaacgccctgcagaagatatggaagaggaacaagcatttaaaagatctagaaacactgatgagatggttgaattacgcattctgcttcagagcaagaatgctggggcagtgattggaaaaggaggcaagaatattaaggctctccgtacagactacaatgccagtgtttcagtcccagacagcagtggccccgagcgcatattgagtatcagtgctgatattgaaacaattggagaaattctgaagaaaatcatccctaccttggaagagggcctgcagttgccatcacccactgcaaccagccagctcccgctcgaatctgatgctgtggaatgcttaaattaccaacactataaaggaagtgactttgactgcgagttgaggctgttgattcatcagagtctagcaggaggaattattggggtcaaaggtgctaaaatcaaagaacttcgagagaacactcaaaccaccatcaagcttttccaggaatgctgtcctcattccactgacagagttgttcttattggaggaaaacccgatagggttgtagagtgcataaagatcatccttgatcttatatctgagtctcccatcaaaggacgtgcacagccttatgatcccaatttttacgatgaaacctatgattatggtggttttacaatgatgtttgatgaccgtcgcggacgcccagtgggatttcccatgcggggaagaggtggttttgacagaatgcctcctggtcggggtgggcgtcccatgcctccatctagaagagattatgatgatatgagccctcgtcgaggaccacctccccctcctcccggacgaggcggccggggtggtagcagagctcggaatcttcctcttcctccaccaccaccacctagagggggagacctcatggcctatgacagaagagggagacctggagaccgttacgacggcatggttggtttcagtgctgatgaaacttgggactctgcaatagatacatggagcccatcagaatggcagatggcttatgaaccacaggttgagtatcatagttattattcctatgcagggggtcgtggctcatatggtgatcttggtggacctattattactacacaagtaactattcccaaagatttggctggatctattattggcaaaggtggtcagcggattaaacaaatccgtcatgagtcgggagcttcgatcaaaattgatgagcctttagaaggatccgaagatcggatcattaccattacaggaacacaggaccagatacagaatgcacagtatttgctgcagaacagtgtgaagcagtatgcagatgttgaaggattctaatgcaagatattttttcttttttatagtgtgaagcagtattctggaaagtttttctaagactagtgaagaactgaaggagtcctgcatctttttttttttatctgcttctgtttaaaaagccaacattcctctgcttcataggtgttctgcatttgaggtgtagtgaaatctttgctgttcaccagatgtaatgttttagttccttacaaacagggttgggggggggaagggcgtgcaaaaactaacattgaaattttgaaacagcagcagagtgagtggattttatttttcgttattgttggtggtttaaaaaattccccccatgtaattattgtgaacaccttgctttgtggtcactgtaacatttggggggtgggacagggaggaaaagtaacaatagtccacatgtccctggcatctgttcagagcagtgtgcagaatgtaatgctcttttgtaagaaacgttttatgatttttaaaataaatttagtgaacctatttttggtggtcattttttttttaagacagtcattttaaaatggtggctgaatttcccaacccacccccaaactaaacactaagtttaattttcagctcctctgttggacatataagtgcatctcttgttggacataggcaaaataacttggcaaacttagttctggtgatttcttgatggtttggaagtctattgctgggaagaaattccatcatacatattcatgcttataataagctggggattttttgtttgtttttgcaaatgcttgcccctacttttcaacaattttctatgttagttgtgaagaactaaggtggggagcagtactacaagttgagtaatggtatgagtatataccagaattctgattggcagcaagttttattaatcagaataacacttggttatggaagtgactaatgctgaaaaaattgattatttttattagataatttctcacctatagacttaaactgtcaatttgctctagtgtcttattagttaaactttgtaaaatatatatatacttgtttttccattgtatgcaaattgaaagaaaaagatgtaccatttctctgttgtatgttggattatgtaggaaatgtttgtgtacaattcaaaaaaaaaaaagatgaaaaaagttcctgtggatgttttgtgtagtatcttggcatttgtattgatagttaaaattcacttccaaataaataaaacacccatgatgctagatttgatgtgtgcccaatttgaacaagggttgattgacacctgtaaaatttgttgaaacgttcctcttaaaaggaaatatagtaatcttatgtattt

SEQ ID NO: 2042 - DNA, 2896 bp, Homo sapiens
ctttcggcagacgccattatcctctgtttctctgctgcaccgacctcgacgccttgcctgtggcccacttgttcactgactataggctactgcagcactggggtgtcagttgttggtcccacccagaacgcttcagttctgctctgcaaggatatataataactgattggtgtgcccatttaataaaagaatatgtaaactgaacagccggaagaaaccttcccgaacactgaaaccaatggtgaatttggtaaacaccctgcagaagatatggaagagtaacaagcatttaaaagatctagaaacactgatgagatggttgaattacgcattctgcttcagaccaagaatgctggggcagtgattggaaaaggaggcaagaatatcaaggctctccgtacagactacaatgccagtgtttcagtcccagacagcagtggccccgagcacatattgagtatcagtgctggtattgacacaattggagaaattctgaagaaaatcatccctaccttggaagagggcctgcagtttccatcacccactgcaaccagccagctgccgctcgaatctgttgctgtggaatgcttaagttaccaacactataaaggaagtgactttgactgcgagttgaggctgttgattcatcagagtctagcaggaggaattattggggtcgaaggtgctaaaatcaaagaacttcgagagaacactcaaaccaccatcaagcttttccaggaatgctgtccttattccactgacaagagttgttcttattggaggaaaacccgatagggttgtagagtgcataaagatcatccttgatcttatatatgagtctcccatcaaaggacgtgcacagccttatgatcccaatttttatgatgaaacctatgattatggtggttttacaattatgtttgatgaccgctgtggacgcccagtgggatttcccatgcggggaagaggtggttttgacagaatgcctcctggtcagggtgggcgtcccatgcctccatctagaagagattatgatgatatgagccctcgtcaaggaccacctccacctcctccaggacaaggtggtgagggtggtagcagagctcggaatcttcctcttcctcctccaccaccacctagagggggagacctcatggcctatgacagaagagggagacctggagactgttaccatggcatggttggtttcagtgctgatgaaacttgggactctgcaatagatacatggagcccatcagaatggcagatggcttatgaaccacagggtggctccagatatgattattcctatgcagggggtcgtggctcatatggtaatcttggtggacttattattactacacaagtaacgattcccaaagatttggctggatctattattggcaaaggtggtctgcagattaaacaaatccgtcatgagtcgggagcttcgatcaaaattgatgagcctttagaaggattggaagattggatcattaccattagagaaacacaggaccagatacagaatgcacagtatttgctgcagaacagtgtgaagcagtgtgcagatgttgaaggagtataatgcaagatatttttttcttttttatagtgtgacgcagtattctggaaagtttttctaagactagtgaagaactacgtcttttttttttttgttatctgcttctgtttaaaaagccaacacgcctctgcttcacaggtgttctgcatttgaggtgtagtgaaatctttgctgttcaccagatgtaatgttttagttccttacaaacagggttgggccagggaagggtgtgcaaaaactaacactgaaattttgaaacagcagcagagtgagtggattttattttttgttattgttggtggtttaaaaaaattccccccatgtaattattgtgaacaccttgctttgtggtcactgtaacacttgggggtgggacagggaggaaaagtaacaatagtccacatgtccctggtatctgttcagagcagtgtgcagaatgtaatgctcttttgtaagaaacgttttatgatttttaaaataaatttagtgaacctatttttggtggtcatttttttaagacagtcattttaaaatggtggctgaattttccaacccacccccaaactaaacactaagtttaattttcagctcctctgttggacatgtaagtgtgtctcttgttggacataggcaaaataacttggcaaacttagttctggtgatttcttgatagtttggaagtctattgctgggaagaaattccatcatacatattcatgcttataataagctggggattttttgtttgtttttgcaaatgcttgcccctacttttcaataattttctatgttagtagctgtgaagaactaaggtggggagcagtactacaagttgagtaatggtatgagtatataccagaattctgattggcagcaagttttattagtcagaataacacttggttatggaagtgactaatgctgaaaaaattgattatttttattagataatttctcacctatagacttaaactgtgaacttgctctagtgtcttattagttaaactttgtaaaatatacatatatttgtttttccattgtatgcaaattgaaagaaaaagatgtaccatttctctgttgtatgttggattatgtaggaaatgtttgtgtacaattaaaaaaaaaagatgaaaaaagttcctgtagatgttttgtgtagtatcttggcatctgtattgatagttaaaattcacttccaaataaaacacccatgatgctagatttgatgtgtgcccaatttgaacaagggttgattgacacctgtaaaatttgttgaaacgttcctcttaagggaatacagtaatcttatat

SEQ ID NO: 2043 - DNA, 2823 bp, Homo sapiens
ccctccccccagctagtgagtgcgcgaacgagaaaggaggagggcgctccaggcgacagcattgcagacgccattatcctctgtttctctgctgcaccgacctcgacgtcttgcctgtgtcccacttgttcgcggcctataggctactgcagcactggggtgtcagttgttggtccgacccagaacgcttcagttgtgctctgcaaggatatataataactgattggtgtgcccgtttaataaaagaatatggaaactgaacagccagaagaaaccttccctaacactgaaaccaatggtgaatttggtaaacgccctgcagaagatatggaagaggaacaagcatttaaaagatctagaaacactgatgagatggttgaattacgcattctgcttcagagcaagaatgctggggcagtgattggaaaaggaggcaagaatattaaggctctccgtacagactacaatgccagtgtttcagtcccagacagcagtggccccgagcgcatattgagtatcagtgctgatattgaaacaattggagaaattctgaagaaaatcatccctaccttggaagagggcctgcagttgccatcacccactgcaaccagccagctcccgctcgaatctgatgctgtggaatgcttaaattaccaacactataaaggaagtgactttgactgcgagttgaggctgttgattcatcagagtctagcaggaggaattattggggtcaaaggtgctaaaatcaaagaacttcgagagaacactcaaaccaccatcaagcttttccaggaatgctgtcctcattccactgacagagttgttcttattggaggaaaacccgatagggttgtagagtgcataaagatcatccttgatcttatatctgagtctcccatcaaaggacgtgcacagccttatgatcccaatttttacgatgaaacctatgattatggtggttttacaatgatgtttgatgaccgtcgcggacgcccagtgggatttcccatgcggggaagaggtggttttgacagaatgcctcctggtcggggtgggcgtcccatgcctccatctagaagagattatgatgatatgagccctcgtcgaggaccacctccccctcctcccggacgaggcggccggggtggtagcagagctcggaatcttcctcttcctccaccaccaccacctagagggggagacctcatggcctatgacagaagagggagacctggagaccgttacgacggcatggttggtttcagtgctgatgaaacttgggactctgcaatagatacatggagcccatcagaatggcagatggcttatgaaccacagggtggctccggatatgattattcctatgcagggggtcgtggctcatatggtgatcttggtggacctattattactacacaagtaactattcccaaagatttggctggatctattattggcaaaggtggtcagcggattaaacaaatccgtcatgagtcgggagcttcgatcaaaattgatgagcctttagaaggatccgaagatcggatcattaccattacaggaacacaggaccagatacagaatgcacagtatttgctgcagaacagtgtgaagcagtattctggaaagtttttctaagactagtgaagaactgaaggagtcctgcatctttttttttttatctgcttctgtttaaaaagccaacattcctctgcttcataggtgttctgcatttgaggtgtagtgaaatctttgctgttcaccagatgtaatgttttagttccttacaaacagggttgggggggggaagggcgtgcaaaaactaacattgaaattttgaaacagcagcagagtgagtggattttatttttcgttattgttggtggtttaaaaaattccccccatgtaattattgtgaacaccttgctttgtggtcactgacaatagtccacatgtccctggcatctgttcagagcagtgtgcagaatgtaatgctcttttgtaagaaacgttttatgatttttaaaataaatttagtgaacctatttttggtggtcattttttttttaagacagtcattttaaaatggtggctgaatttcccaacccacccccaaactaaacactaagtttaattttcagctcctctgttggacatataagtgcatctcttgttggacatagtctattgctgggaagaaattccatcatacatattcatgcttataataagctggggattttttgtttgtttttgcaaatgcttgcccctacttttcaacaattttctatgttagttgtgaagaactaaggtggggagcagtactacaagttgagtaatggtatgagtatataccagaattctgattggcagcaagttttattaatcagaataacacttggttatggaagtgactaatgctgaaaaaattgattatttttattagataatttctcacctatagacttaaactgtcaatttgctctagtgtcttattagttaaactttgtaaaatatatatatacttgtttttccattgtatgcaaattgaaagaaaaagatgtaccatttctctgttgtatgttggattatgtaggaaatgtttgtgtacaattcaaaaaaaaaaaagatgaaaaaagttcctgtggatgttttgtgtagtatcttggcatttgtattgatagttaaaattcacttccaaataaataaaacacccatgatgctagatttgatgtgtgcccaatttgaacaagggttgattgacacctgtaaaatttgttgaaacgttcctcttaaaaggaaatatagtaatcttatgta

SEQ ID NO: 2044 - DNA, 4064 bp, Homo sapiens
cgcacatgtgtttctgttttgtgttgtagcatttgttctggaagctcgtatttacattttaagtgtatctggtgagtgggctggagccctcgtctgggccggaaaaaaaaaagccctccgatccgtcttttagttgcttctcttccttttttctctccggtttctcatcactccaaccagccgcgaccatgcccaggaagaaggcggcggcggcggcctgggaggagccgagctcgggcaacggcactgcccgcgccgggcccaggaaacgcggcggcccggcgggcaggaagcgcgagcggcccgagcgctgcagtagcagcagcggcggcggcagcagcggcgacgaggacggcctggagctcgacggggcccccggcgggggcaagcgcgcggcgcggccggcgacagcaggcaaggcgggcggcgcggccgtggtcatcaccgaacccgagcacaccaaggagcgcgtcaaacttgaagggtcaaagtgcaaagggcagcttttgatttttggggcaaccaactgggacttgattggtcgaaaagaagtgcctaaacagcaagctgcttaccgcaatctcggtcagaatttgtgggggccccacagatatgggtgcctggcgggggtccgggtgcggacagtggtctcgggctcgtgtgctgcacacagcctcctcatcaccacggaagggaagctgtggagctggggtcgaaatgagaaggggcagctgggacatggtgacaccaagagagtagaagcccctagactcatcgagggtcttagccacgaagtgattgtgtctgcagcatgtgggcggaaccacaccttggccttgacggaaacgggctccgtgtttgcgtttggggaaaacaagatggggcagctgggccttggcaaccagacagacgctgttcccagccccgcgcagataatgtacaacggccagccaattaccaaaatggcctgtggggctgaattcagtatgataatggactgcaaaggaaacctctattcctttgggtgccctgaatatggtcagctgggacacaactcagatgggaagttcatcgcccgggcacagcggatagagtacgactgtgaactagttccccggcgagtggccatcttcattgagaagacgaaagatggacagattctgcctgtaccaaacgtggttgtacgagacgtggcctgtggcgctaaccacacgctggtcctggactcccagaagcgagtcttctcctggggctttggtggctatggccggctgggccacgcagagcagaaggatgagatggtcccccgcctggtgaagctgtttgacttccctgggcgtggggcttcccagatctatgctggttacacctgctcctttgctgtcagtgaagtgggtggtctgtttttctggggggccaccaacacctcccgtgaatctaccatgtacccaaaagcagtgcaggacctctgcggctggagaatccggagcctggcttgtgggaagagcagcatcattgtggccgccgatgagagcaccatcagctggggtccgtcaccgacctttggggaactgggctacggggaccacaagcccaagtcttccactgcagcccaggaggtaaagactctggatggcattttctcagagcaggtcgccatgggctactcacactccttggtgatagcaagagatgaaagtgagactgagaaagagaagatcaagaaactgccagaatacaacccccgaaccctctgatgctcccggagactcctccgactccacacctctcgcggcagctgtcatttccatgtgcactgggacgggaagtcaaacgaggaatttaaaaaagcaaaagttgaccgaaggtgcatttttgtttagactccctgaggttccgttttacacatgatccaacgttaactacctttttttctgtatgctttccaaagtccttttttttcccttaatgttgaattaaaatacttgctcatagttgatttaccattcctacaaaagaggcagaaactttgagcaatctaggttttttttttttttaagttttttctttcttcctctcctgaatacactccccaaaacacccctttccagttacaattagcatcgtgatccaagcagatgccacatggaagaggaatcgccatttactcagaaaaaatgtcccttacaggaaccggcagcagctaggcagtcaccggcccgcctccatccaaaatcacgctcgcgtgcttcggaagcatccgggtcactccttctccgctttttcttgcagatgggcctaggccggtgtcggttctgtttctccccttggctgcctgtacgcccacagccttctggctgcgacattatagaatcggccgtgtcccccctggtgggggattggggatctgtgtttagccatttatatctactttagctgttaaagaggtccaaatgaaaatcaggtgattgtggaaccatggggacttgggggtggggcagaggtgggaacatttgtatcagttgagtcagcttggtggctccctgtggagccagggctgagccttgtcacgcgcactcgccaattaagagatggaccagccagcagtcaagtgcattctccagtccttgcaagaaggatcagccctttctgtgccagcctcgatcgccttgtgctttggtctctttttctcccccccgcctggatcctgcctcgcgcgggccgtcctgttgctgagactcggggtaccgttctgctgacccagctccctttagtcacgtttgcttggctctggtaccaaatagttgggattaccgaagagtccccttccttgcgtgtcagcacggatgctgtgactgccacctgcgtcctcgtcaagtgcccgagctcgccgccgtgtgtgctgcgctgagtgagttatgaggtgcctttcccggaaccctcctctcgcctggacccaagagaggcgacagctgtggctggggctcttggtttccagagggtctggactggtttgggtgctttaaaatagatatttagttcagtggtgcttatgggggagatgggactagaacttaagtgtgagacttgggtggatgggaaagttaaatattggtctcttcaagttttttttttcttttgctttgttaccacttgtcactgtctccatgttaaaatgccaaaaatgatgtagttgttgttgcttttttccctattttccaccccagtcgctccttaccgtgactcctgcccttggagggcatgtagcagtgtctgtcctgccagtcccaaggccctgtgggaggagactggcctgcatctctctaagacttagtctgacgccacgcgcatctcttgttctgtgttcaatcagtagtccaggggagaagcttctgctacttcagagctttgctaaactaacctaatttgtccaaatcaccccaaaaccaccatctctgacgtaagcttccatgcgacagcctgatccgtttccctggacaggtctctttcctggaatgcagcccaggcacctgtgctcctggcacccttgaggtctctcctttgagccgtggtcaccgagagggttgaggacgcagcacccgaggtcccagcctttgcaggagcctccctgggcttagctggacttagatcttcggtggcctcatgtaaacgtggcagccagcctcttctagaaccctagcccagggactggagcaggaaagggaccttcaaagtgaagactgccttgtcccgcagctccttctggcttagattgaaaaatgggcttcctaatgggttaaatcctttaaaacaaggagttgtgggggaagggtgtcgtgcactcctagagaaaggtacacagttgcccggttgggaatgtgcttggcgctgaccctgcgggcatctgactggtcttccagctcaggaaaaagaatttgaaagaggcttagcgtgaaggggaatcaaagaggaggttgtgatttggtcgaaggtgcctggtttagtgctgtaattgtcttattattttttttatatatatatttcttggagtaaacattttaaat

SEQ ID NO: 2045 - DNA, 4114 bp, Homo sapiens
ttgatgaaacgcggatccagacgctgcgtttgctggctttgatgaaacgcacatgtgtttctgttttgtgttgtagcatttgttctggaagctcgtatttacattttaagtgtatctggtgagtgggctggagccctcgtctgggccggaaaaaaaaaagccctccgatccgtcttttagttgcttctcttccttttttctctccggtttctcatcactccaaccagccgcgaccatgcccaggaagaaggcggcggcggcggcctgggaggagccgagctcgggcaacggcactgcccgcgccgggcccaggaaacgcggcggcccggcgggcaggaagcgcgagcggcccgagcgctgcagtagcagcagcggcggcggcagcagcggcgacgaggacggcctggagctcgacggggcccccggcgggggcaagcgcgcggcgcggccggcgacagcaggcaaggcgggcggcgcggccgtggtcatcaccgaacccgagcacaccaaggagcgcgtcaaacttgaagggtcaaagtgcaaagggcagcttttgatttttggggcaaccaactgggacttgattggtcgaaaagaagtgcctaaacagcaagctgcttaccgcaatctcggtcagaatttgtgggggccccacagatatgggtgcctggcgggggtccgggtgcggacagtggtctcgggctcgtgtgctgcacacagcctcctcatcaccacggaagggaagctgtggagctggggtcgaaatgagaaggggcagctgggacatggtgacaccaagagagtagaagcccctagactcatcgagggtcttagccacgaagtgattgtgtctgcagcatgtgggcggaaccacaccttggccttgacggaaacgggctccgtgtttgcgtttggggaaaacaagatggggcagctgggccttggcaaccagacagacgctgttcccagccccgcgcagataatgtacaacggccagccaattaccaaaatggcctgtggggctgaattcagtatgataatggactgcaaaggaaacctctattcctttgggtgccctgaatatggtcagctgggacacaactcagatgggaagttcatcgcccgggcacagcggatagagtacgactgtgaactagttccccggcgagtggccatcttcattgagaagacgaaagatggacagattctgcctgtaccaaacgtggttgtacgagacgtggcctgtggcgctaaccacacgctggtcctggactcccagaagcgagtcttctcctggggctttggtggctatggccggctgggccacgcagagcagaaggatgagatggtcccccgcctggtgaagctgtttgacttccctgggcgtggggcttcccagatctatgctggttacacctgctcctttgctgtcagtgaagtgggtggtctgtttttctggggggccaccaacacctcccgtgaatctaccatgtacccaaaagcagtgcaggacctctgcggctggagaattcggagcctggcttgtgggaagagcagcatcattgtggccgccgatgagagcaccatcagctggggtccgtcaccgacctttggggaactgggctacggggaccacaagcccaagtcttccactgcagcccaggaggtaaagactctggatggcattttctcagagcaggtcgccatgggctactcacactccttggtgatagcaagagatgaaagtgagactgagaaagagaagatcaagaaactgccagaatacaacccccgaaccctctgatgctcccggagactcctccgactccacacctctcgcggcagctgtcatttccatgtgcactgggacgggaagtcaaacgaggaatttaaaaaagcaaaagttgaccgaaggtgcatttttgtttagactccctgaggttccgttttacacatgatccaacgttaactacctttttttctgtatgctttccaaagtccttttttttcccttaatgttgaattaaaatacttgctcatagttgatttaccattcctacaaaagaggcagaaactttgagcaatctaggtttttttttttttttttaagttttttctttcttcctttcctgaatacactccccaaaacacccctttccagttacaattagcatcgtgatccaagcagatgccacatggaagaggaatcgccatttactcagaaaaaatgtcccttacaggaaccggcagcagctaggcagtcaccggcccgcctccatccaaaatcacgctcgcgtgcttcggaagcatccgggtcactccttctccgctttttcttgcagatgggcctaggccggtgtcggttctgtttctccccttggctgcctgtacgcccacagccttctggctgcgacattatagaatcggccgtgtcccccctggtgggggattggggatctgtgtttagccatttatatctactttagctgttaaagaggtccaaatgaaaatcaggtgattgtggaaccatggggacttgggggtggggcagaggtgggaacatttgtatcagttgagtcagcttggtggctccctgtggagccagggctgagccttgtcacgcgcactcgccaattaagagatggaccagccagcagtcaagtgcattctccagtccttgcaagaaggatcagccctttctgtgccagcctcgatcgccttgtgctttggtctctttttctcccccccgcctggatcctgcctcgcgcgggccgtcctgttgctgagactcggggtaccgttctgctgacccagctccctttagtcacgtttgcttggctctggtaccaaatagttgggattaccgaagagtccccttccttgcgtgtcagcacggatgctgtgactgccacctgcgtcctcgtcaagtgcccgagctcgccgccgtgtgtgctgcgctgagtgagttatgaggtgcctttcccggaaccctcctctcgcctggacccaagagaggcgacagctgtggctggggctcttggtttccagagggtctggactggtttgggtgctttaaaatagatatttagttcagtggtgcttatgggggagatgggactagaacttaagtgtgagacttgggtggatgggaaagttaaatattggtctcttcaagttttttttttcttttgctttgttaccacttgtcactgtctccatgttaaaatgccaaaaatgatgtagttgttgttgcttttttccctattttccaccccagtcgctccttaccgtgactcctgcccttggagggcatgtagcagtgtctgtcctgccagtcccaaggccctgtgggaggagactggcctgcatctctctaagacttagtctgacgccacgcgcatctcttgttctgtgttcaatcagtagtccaggggagaagcttctgctacttcagagctttgctaaactaacctaatttgtccaaatcaccccaaaaccaccatctctgacgtaagcttccatgcgacagcctgatccgtttccctggacaggtctctttcctggaatgcagcccaggcacctgtgctcctggcacccttgaggtctctcctttgagccgtggtcaccgagagggttgaggacgcagcacccgaggtcccagcctttgcaggagcctccctgggcttagctggacttagatcttcggtggcctcatgtaaacgtggcagccagcctcttctagaaccctagcccagggactggagcaggaaagggaccttcaaagtgaagactgccttgtcccgcagctccttctggcttagattgaaacatgggcttcctaatgggttaaatcctttaaaacaaggagttgtgggggaagggtgtcgtgcactcctagagaaaggtacacagttgcccggttgggaatgtgcttggcgctgaccctgcgggcatctgactggtcttccagctcaggaaaaagaatttgaaagaggcttagcgtgaaggggaatcaaagaggaggttgtgatttggtcgaaggtgcctggtttagtgctgtaattgtcttattattttttttatatatatatttcttggagtaaacattttaaat

SEQ ID NO: 2046 - DNA, 3982 bp, Homo sapiens
aggaggaagtggaggccgggtggctcgtctccgctcccctccccccgcgcagtttataacccgtccattgtgcgccgctgccccgtgtctccctccagccgcgaccatgcccaggaagaaggcggcggcggcggcctgggaggagccgagctcgggcaacggcactgcccgcgccgggcccaggaaacgcggcggcccggcgggcaggaagcgcgagcggcccgagcgctgcagtagcagcagcggcggcggcagcagcggcgacgaggacggcctggagctcgacggggcccccggcgggggcaagcgcgcggcgcggccggcgacagcaggcaaggcgggcggcgcggccgtggtcatcaccgaacccgagcacaccaaggagcgcgtcaaacttgaagggtcaaagtgcaaagggcagcttttgatttttggggcaaccaactgggacttgattggtcgaaaagaagtgcctaaacagcaagctgcttaccgcaatctcggtcagaatttgtgggggccccacagatatgggtgcctggcgggggtccgggtgcggacagtggtctcgggctcgtgtgctgcacacagcctcctcatcaccacggaagggaagctgtggagctggggtcgaaatgagaaggggcagctgggacatggtgacaccaagagagtagaagcccctagactcatcgagggtcttagccacgaagtgattgtgtctgcagcatgtgggcggaaccacaccttggccttgacggaaacgggctccgtgtttgcgtttggggaaaacaagatggggcagctgggccttggcaaccagacagacgctgttcccagccccgcgcagataatgtacaacggccagccaattaccaaaatggcctgtggggctgaattcagtatgataatggactgcaaaggaaacctctattcctttgggtgccctgaatatggtcagctgggacacaactcagatgggaagttcatcgcccgggcacagcggatagagtacgactgtgaactagttccccggcgagtggccatcttcattgagaagacgaaagatggacagattctgcctgtaccaaacgtggttgtacgagacgtggcctgtggcgctaaccacacgctggtcctggactcccagaagcgagtcttctcctggggctttggtggctatggccggctgggccacgcagagcagaaggatgagatggtcccccgcctggtgaagctgtttgacttccctgggcgtggggcttcccagatctatgctggttacacctgctcctttgctgtcagtgaagtgggtggtctgtttttctggggggccaccaacacctcccgtgaatctaccatgtacccaaaagcagtgcaggacctctgcggctggagaatccggagcctggcttgtgggaagagcagcatcattgtggccgccgatgagagcaccatcagctggggtccgtcaccgacctttggggaactgggctacggggaccacaagcccaagtcttccactgcagcccaggaggtaaagactctggatggcattttctcagagcaggtcgccatgggctactcacactccttggtgatagcaagagatgaaagtgagactgagaaagagaagatcaagaaactgccagaatacaacccccgaaccctctgatgctcccggagactcctccgactccacacctctcgcggcagctgtcatttccatgtgcactgggacgggaagtcaaacgaggaatttaaaaaagcaaaagttgaccgaaggtgcatttttgtttagactccctgaggttccgttttacacatgatccaacgttaactacctttttttctgtatgctttccaaagtccttttttttcccttaatgttgaattaaaatacttgctcatagttgatttaccattcctacaaaagaggcagaaactttgagcaatctaggttttttttttttttaagttttttctttcttcctctcctgaatacactccccaaaacacccctttccagttacaattagcatcgtgatccaagcagatgccacatggaagaggaatcgccatttactcagaaaaaatgtcccttacaggaaccggcagcagctaggcagtcaccggcccgcctccatccaaaatcacgctcgcgtgcttcggaagcatccgggtcactccttctccgctttttcttgcagatgggcctaggccggtgtcggttctgtttctccccttggctgcctgtacgcccacagccttctggctgcgacattatagaatcggccgtgtcccccctggtgggggattggggatctgtgtttagccatttatatctactttagctgttaaagaggtccaaatgaaaatcaggtgattgtggaaccatggggacttgggggtggggcagaggtgggaacatttgtatcagttgagtcagcttggtggctccctgtggagccagggctgagccttgtcacgcgcactcgccaattaagagatggaccagccagcagtcaagtgcattctccagtccttgcaagaaggatcagccctttctgtgccagcctcgatcgccttgtgctttggtctctttttctcccccccgcctggatcctgcctcgcgcgggccgtcctgttgctgagactcggggtaccgttctgctgacccagctccctttagtcacgtttgcttggctctggtaccaaatagttgggattaccgaagagtccccttccttgcgtgtcagcacggatgctgtgactgccacctgcgtcctcgtcaagtgcccgagctcgccgccgtgtgtgctgcgctgagtgagttatgaggtgcctttcccggaaccctcctctcgcctggacccaagagaggcgacagctgtggctggggctcttggtttccagagggtctggactggtttgggtgctttaaaatagatatttagttcagtggtgcttatgggggagatgggactagaacttaagtgtgagacttgggtggatgggaaagttaaatattggtctcttcaagttttttttttcttttgctttgttaccacttgtcactgtctccatgttaaaatgccaaaaatgatgtagttgttgttgcttttttccctattttccaccccagtcgctccttaccgtgactcctgcccttggagggcatgtagcagtgtctgtcctgccagtcccaaggccctgtgggaggagactggcctgcatctctctaagacttagtctgacgccacgcgcatctcttgttctgtgttcaatcagtagtccaggggagaagcttctgctacttcagagctttgctaaactaacctaatttgtccaaatcaccccaaaaccaccatctctgacgtaagcttccatgcgacagcctgatccgtttccctggacaggtctctttcctggaatgcagcccaggcacctgtgctcctggcacccttgaggtctctcctttgagccgtggtcaccgagagggttgaggacgcagcacccgaggtcccagcctttgcaggagcctccctgggcttagctggacttagatcttcggtggcctcatgtaaacgtggcagccagcctcttctagaaccctagcccagggactggagcaggaaagggaccttcaaagtgaagactgccttgtcccgcagctccttctggcttagattgaaaaatgggcttcctaatgggttaaatcctttaaaacaaggagttgtgggggaagggtgtcgtgcactcctagagaaaggtacacagttgcccggttgggaatgtgcttggcgctgaccctgcgggcatctgactggtcttccagctcaggaaaaagaatttgaaagaggcttagcgtgaaggggaatcaaagaggaggttgtgatttggtcgaaggtgcctggtttagtgctgtaattgtcttattattttttttatatatatatttcttggagtaaacattttaaat

SEQ ID NO: 2047 - DNA, 3072 bp, Homo sapiens
cccctgccctgcgggtgacttcgacccctggctagagggtaggcggcgtggagcagcgcgcgcaagcgaggccaggggaaggtgggcgcaggactttagccggttgagaaggatcaagcaggcatttggagcacaggtgtctagaaacttttaaggggccggttcaagaaggaaaagttcccttctgctgtgaaactatttggcaagaggctggagggcccaatggctgcaaaatcgcaacccaacattcccaaagccaagagtctagatggcgtcaccaatgacagaaccgcatctcaagggcagtggggccgtgcctgggaggtggactggttttcactggcgagcgtcatcttcctactgctgttcgcccccttcatcgtctactacttcatcatggcttgtgaccaatacagctgcgccctgaccggccctgtggtggacatcgtcaccggacatgctcggctctcggacatctgggccaagactccacctataacgaggaaagccgcccagctctataccttgtgggtcaccttccaggtgcttctgtacacgtctctccctgacttctgccataagtttctacccggctacgtaggaggcatccaggagggggccgtgactcctgcaggggttgtgaacaagtatcagatcaacggcctgcaagcctggctcctcacgcacctgctctggtttgcaaacgctcatctcctgtcctggttctcgcccaccatcatcttcgacaactggatcccactgctgtggtgcgccaacatccttggctatgccgtctccaccttcgccatggtcaagggctacttcttccccaccagcgccagagactgcaaattcacaggcaatttcttttacaactacatgatgggcatcgagtttaaccctcggatcgggaagtggtttgacttcaagctgttcttcaatgggcgccccgggatcgtcgcctggaccctcatcaacctgtccttcgcagcgaagcagcgggagctccacagccatgtgaccaatgccatggtcctggtcaacgtcctgcaggccatctacgtgattgacttcttctggaacgaaacctggtacctgaagaccattgacatctgccatgaccacttcgggtggtacctgggctggggcgactgtgtctggctgccttatctttacacgctgcagggtctgtacttggtgtaccaccccgtgcagctgtccaccccgcacgccgtgggcgtcctgctgctgggcctggtgggctactacatcttccgggtggccaaccaccagaaggacctgttccgccgcacggatgggcgctgcctcatctggggcaggaagcccaaggtcatcgagtgctcctacacatccgccgatgggcagaggcaccacagcaagctgctggtgtcgggcttctggggcgtggcccgccacttcaactacgtcggcgacctgatgggcagcctggcctactgcctggcctgtggcggcggccacctgctgccctacttctacatcatctacatggccatcctgctgacccaccgctgcctccgggacgagcaccgctgcgccagcaagtacggccgggactgggagcgctacaccgccgcagtgccttaccgcctgctgcctggaatcttctaagggcacgccctagggagaagccctgtggggctgtcaagagcgtgttctgccaggtccatgggggctggcatcccagctccaactcgaggagcctcagtttcctcatctgtaaactggagagagcccagcacttggcaggtgtccagtacctaatcacgctctgttccttgcttttgccttcaagggaattccgagtgtccagcactgccgtattgccagcacagacggattttctctaatcagtgtccctggggcaggaggatgacccagtcacctttactagtcctttggagacaatttacctgtattaggagcccaggccacgctacactctgcccacactggtgagcaggaggtcttcccacgccctgtcattaggctgcatttactcttgctaaatccccctcccctgcctgctctgcagtcgtgggtggggcccgtgcgccgtttctccttggtagcgtgcacggtgttgaactgggacactggggagaaaggggctttcatgtcgtttccttcctgctcctgctgcacagctgccaggagtgctctgcctggagtctgcagacctcagagaggtcccagcactggctgtggcctttcaggtgtaggcaggtgggctctgcttcccgattccctgtgagcgcccaccctctcgaaagaattttctgcttgccctgtgactgtgcagactctggctcgagcaacccggggaacttcaccctcaggggcctcccacaccttctccagcgaggaggtctcagtcccagcctcgggagggcacctccttttctgtgctttcttccctgaggcattcttcctcatccctagggtgttgtgtagaactctttttaaactctatgctccgagtagagttcatctttatattaaacttcccctgttcaaataagtggctgtgtggtttctgactggtgaatgggcctgactcgtgaatgggcctgactgcaggtctgactggtatacgtgggctctgtttctggtatgagaagggatgtctgagagagatgcttgggtctcggcgtcaaagcattgggtgcccgtgggtgcgtggcgccaccctgcccctctccctcccatgtcagccctttgctggggctgtttttgggttgaatgtggagagtattccattcccccccaaggagatgaaaccaggcttggccacctgcccccggcaagtgaatggagaagccagaaagagtgccaggtttgtcttgcacctggagaaacaagagtttcacacaggcagcccagtgcccatgccagggcagggggccaagctcagagtggcttcattgcttcacatgagaactggtcccacagccaggccgcctcccagacagcctggagggtatcggaactgtgacccgcccaggctgactgctgagccctagtgttcgtgca

SEQ ID NO: 2048 - DNA, 3072 bp, Homo sapiens; identical to SEQ ID NO: 2047

SEQ ID NO: 2049 - DNA, 2408 bp, Homo sapiens
gcccaatggctgcaaaatcgcaacccaacattcccaaagccaagagtctagatggcgtcaccaatgacagaaccgcatctcaagggcagtggggccgtgcctgggaggtggactggttttcactggcgagcgtcatcttcctactgctgttcgcccccttcatcgtctactacttcatcatggcttgtgaccaatacagctgcgccctgaccggccctgtggtggacatcgtcaccggacatgctcggctctcggacatctgggccaagactccacctataacgaggaaagccgcccagctctataccttgtgggtcaccttccaggtgcttctgtacacgtctctccctgacttctgccataagtttctacccggctacgtaggaggcatccaggagggggccgtgactcctgcaggggttgtgaacaagtatcagatcaacggcctgcaagcctggctcctcacgcacctgctctggtttgcaaacgctcatctcctgtcctggttctcgcccaccatcatcttcgacaactggatcccactgctgtggtgcgccaacatccttggctatgccgtctccaccttcgccatggtcaagggctacttcttccccaccagcgccagagactgcaaattcacaggcaatttcttttacaactacatgatgggcatcgagtttaaccctcggatcgggaagtggtttgacttcaagctgttcttcaatgggcgccccgggatcgtcgcctggaccctcatcaacctgtccttcgcagcgaagcagcgggagctccacagccatgtgaccaatgccatggtcctggtcaacgtcctgcaggccatctacgtgattgacttcttctggaacgaaacctggtacctgaagaccattgacatctgccatgaccacttcgggtggtacctgggctggggcgactgtgtctggctgccttatctttacacgctgcagggtctgtacttggtgtaccaccccgtgcagctgtccaccccgcacgccgtgggcgtcctgctgctgggcctggtgggctactacatcttccgggtggccaaccaccagaaggacctgttccgccgcacggatgggcgctgcctcatctggggcaggaagcccaaggtcatcgagtgctcctacacatccgccgacgggcagaggcaccacagcaagctgctggtgtcgggcttctggggcgtggcccgccacttcaactacgtcggcgacctgatgggcagcctggcctactgcctggcctgtggcggtggccacctgctgccctacttctacatcatctacatggccatcctgctgacccaccgctgcctccgggacgagcaccgctgcgccagcaagtacggccgggactgggagcgctacaccgccgcagtgccttaccgcctgctgcctggaatcttctaagggcacgccctagggagaagccctgtggggctgtcaagagcgtgttctgccaggtccatgggggctggcatcccagctccaactcgaggagcctcagtttcctcatctgtaaactggagagagcccagcacttggcaggtgtccagtacctaatcacgctctgttccttgcttttgccttcaagggaattccgagtgtccagcactgccgtattgccagcacagacggattttctctaatcagtgtccctgggcaggaggatgacccagtcacctttactagtcctttggagacaatttacctgtattaggagcccaggccacgctacactctgcccacactggtgagcaggaggtcttcccacgccctgtcattaggctgcatttactcttgctaaataaaagtgggagtggggcgtgcgcgttatccatgtattgcctttcagctctagatccccctcccctgcctgctctgcagtcgtgggtggggcccgtgcgccgtttctccttggtagcgtgcacggtgttgaactgggacactggggagaaaggggctttcatgtcgtttccttcctgctcctgctgcacagctgccaggagtgctctgcctggagtctgcagacctcagagaggtcccagcactggctgtggctttcaggtgtaggcaggtgggctctgcttcccgattccctgtgagcgcccaccctctcgaaagaattttctgtcttgccctgtgactgtgcagactctggctcgagcaacccggggaacttcaccctcaggggcctctccacaccttctccagcgaggaggtctcagtcccagcctcgggagggcacctccttttctgtgctttcttccctgaggcattcttcctcatccctagggtgttgtgtagaactctttttaaactctatgctccgagtagagttcatctttatattaaacttcccctgttcaaaaaaaaaaaaaaaaa

SEQ ID NO: 2050 - DNA, 3072 bp, Homo sapiens; identical to SEQ ID NO: 2047

SEQ ID NO: 2051 - DNA, 3423 bp, Homo sapiens
gcctcccgccccgccgcctcggaagcccctgagagccggcagatggggggcttttagccacggtctctggtctgatgaagcagaaaagaagatgaggatcagggggtcctcgggaacgctgtcacgaatcaatatgttaaggatacctgtaagaaaggccttagtaggcctttctaagtctcctaaaggatgtgttcgaacaactgccacagcagcaagcaacttgattgaagtatttgttgatggtcagtctgtcatggtggaaccgggaacgaccgtcctccaagcttgtgagaaggttggcatgcagatccctcgattctgttatcatgaaaggttgtctgttgctggaaactgcaggatgtgccttgttgaaattgagaaagcccctaaggttgtagctgcttgtgccatgccagtaatgaagggttggaatatcctaacaaactcagaaaaatccaaaaaagccagggaaggtgtgatggagttcttattagcaaatcacccattggactgtcctatttgtgaccagggaggtgaatgtgatctgcaggaccagtccatgatgtttggaaatgataggagccgatttttagaggggaagcgtgctgtggaagacaagaacattgggccattggtaaagaccatcatgacaagatgtatacagtgtactcgctgcatcaggtttgcaagtgagattgcaggagtagatgatttgggaacaacaggcagaggaaatgatatgcaagttggcacatacattgaaaagatgttcatgtctgaactgtctgggaatatcattgatatctgccctgtaggtgccctaacctctaagccctatgcctttactgcccggccttgggaaacaagaaagacagaatccattgatgtaatggatgcggttggaagtaatattgtggttagcacaagaactggagaagtgatgaggattttgccacgtatgcatgaggacatcaatgaagagtggatctctgataaaaccagatttgcctatgatgggctaaaacgtcaaagacttaccgagccaatggtcagaaatgaaaaagggcttttaacctatacttcttgggaggatgcgctctctcgcgtagctggaatgttgcagagttttcaaggcaaagatgtggcagcaattgcaggtggcttggtggatgctgaagccctggtagctctcaaagatttgcttaatagagtggactctgacaccttatgcactgaagaggtcttccccactgcaggagctggcacagatttgcgttccaattatcttcttaatactacaattgctggtgtggaagaggcagatgttgttcttctggttggtacaaacccacgttttgaggcaccactgtttaatgctagaattcgaaagagctggctgcataatgacttaaaagtggcccttataggcagtccagtggacctcacttacacatatgaccacctgggagactcccccaaaattcttcaagacattgcttcgggaagccatccatttagccaggtcctaaaggaagctaaaaaaccaatggtggttttaggcagttctgcactccaaagaaatgatggagcagcaattcttgcagctgtttctagcattgcacaaaagattcggatgactagtggtgttactggtgattggaaagttatgaatatccttcataggattgcaagtcaagtagctgctttggaccttggctataagcctggggtggaagcaattcggaagaaccctcccaaggtgctgtttctcctgggagcagatggaggttgtatcacacgacaggatttgccaaaggattgtttcattatttatcaaggacatcatggtgatgttggggctcccatagctgatgttattctcccaggagctgcttacacagagaagtctgctacatatgtcaacactgagggtagagctcagcagactaaggtagcagtgacacctcctggcttggcaagagaagactggaaaattataagagcactctctgagattgctggaatgactcttccatatgatactctggatcaagtaaggaacagattggaagaagtctctcctaatcttgttcgatatgatgatattgaaggggctaattacttccagcaagcaaatgagctctcaaagctagtgaaccagcagcttcttgctgacccacttgttccacctcagctaactataaaagacttctacatgacagattcaattagcagagcctcacagacaatggccaaatgtgtcaaagctgtcacagagggtgcccaggcagtagaggaaccatccatatgctgaagcttctactaggatcccagttttgccgcagataattaatggacaactgtagtgcagtgatcctttacaggtttatttctttgtaaaaaaaaataataataatttgaatcatgtaatatttaaggttatactatgcctatttgaaaatgatattagttatcaactttgcagtttgaaaaacatgtattgtgtgtaaaggttaaataacaaaactatgcagatgctcttaaaagcattgataacctttgtgacgaacataaagagatccttaaattatgagttgttggcttatcttcataaataatttgtctgtaaaatggatgaaatgaaaagaggttcaattaaaacctacttttttctagtgctaaagaaaagatttaagcaccttgtcaagctgggtaaataggaaaaatacataatcatgctcagatatgtatctaggataattataattaataataatcatagtaacaatggctaatgataatttagctttattatatgtgctaagcactctggttttacatgcattatcttcttttgttcttgctacaaccctgtgagatagtagtattatctcattttactgatgaagactgaagcctaggtatattaaatagcttgcccaaggccacacagcaaaagtcaccaactcaaacctacttcttatttactccaaagcctgttgttcttaactgcaacatattatttcgtctcattaatgttgattctataggttgttacttctaaaaattagtattgagtttaatggtgaacacatttttctattttctcttgaatctgcttctataatgtcatggtgatttatgtggcttttttttttttataagttatacatgtatgcatgtatacttatgagacctcccttggaatgagggaggtctcaagagatataatttagattctcattgatgttctgtattcattatcctaacaccatctgtagtgttaaatcaactaaattatttcagcaataggagacaaaacaaccagctttcataatttttaattgtcaaaaccaaaaggaatcagaataaggatcactgagaatttaaaaaaataaaaaaggaagtaaaaattttaca

SEQ ID NO: 2052 - DNA, 3423 bp, Homo sapiens; identical to SEQ ID NO: 2051

SEQ ID NO: 2053 - DNA, 724 bp, Homo sapiens
gccacggcggcgcgtggtgcacgcggttcgattgtgacggcccggctgcgctttcaggatgaccgagtgggagacagctgcaccagcagtggcggagacccctgacatcaagctctttgggaaatggagcactgatgatgttcagatcaatgacatttctttgcaggactacattgcagtgaaggagaagtatgccaagtacctgccccacagtgcaggccgctatgcagccaagcgcttccgtaaggcacagtgccccattgtggagcgcctgaccaactcaatgatgatgcatggccgtaacaatggcaagaagctcatgactgtgcgcattgtcaagcatgccttcgagatcatccatctgctcactggtgagaaccccctgcaggtcctggtgaatgccattattaacagtggtccccgggaagactcaacccgcattgggcgagctggaacagtgaggcgtcaggctgtcgatgtgtcccccctacgccgtgtgaatcaggccatttggctgctgtgcacaggtgcccgtgaggccgccttccggaacatcaagactattgctgagtgcctagcagatgagctcatcaatgcagccaagggctcttccaattcctatgctatcaagaagaaggatgagctggaacgtgtggccaagtctaaccgttgatcacctggctgtggcttcaataaacctgtctgcccttggggcagcctcacc

SEQ ID NO: 2054 - DNA, 793 bp, Homo sapiens
taggctacctccgcgctccacccagagacgggtcgcgctgctcccgccgccgcaaccccgggccctcgtgccggcggtctcccctcttccacgggcgagattactgcatagcagaggatgaccgagtgggagacagcagcaccagcggtggcagagaccccagacatcaagctctttgggaagtggagcaccgatgatgtgcagatcaatgacatttccctgcaggattacattgcagtgaaggagaagtatgccaagtacctgcctcacagtgcagggcggtatgccgccaaacgcttccgcaaagctcagtgtcccattgtggagcgcctcactaactccatgatgatgcacggccgcaacaacggcaagaagctcatgactgtgcgcatcgtcaagcatgccttcgagatcatacacctgctcacaggcgagaaccctctgcaggtcctggtgaacgccatcatcaacagtggtccccgggaggactccacacgcattgggcgcgccgggactgtgagacgacaggctgtggatgtgtcccccctgcgccgtgtgaaccaggccatctggctgctgtgcacaggcgctcgtgaggctgccttccggaacattaagaccattgctgagtgcctggcagatgagctcatcaatgctgccaagggctcctcgaactcctatgccattaagaagaaggacgagctggagcgtgtggccaagtccaaccgctgattttcccagctgctgcccaataaacctgtctgccctttggggcagtcccagccacctgtgc

SEQ ID NO: 2055 - DNA, 793 bp, Homo sapiens; identical to SEQ ID NO: 2054

SEQ ID NO: 2056 - DNA, 1174 bp, Homo sapiens
tccgcatcaggcgcgtgccggtgaggcggctgtggccgcggcgaggagtcagagggaactgaactggctactcccgcggcaggtgggatttaaggtcagcagctgaacaaagaagcgagcgctggccagacttttttctttattagacatggctgcgttggtctcacggaaatctctgcgcttttgcaggcgcccacaagacagggcaactacggggtagcggacatccgccaggcacgcttctagggccgcttctgcaactgcgcatgcgcttgggctgcacccattccgtctagcccaaaaggttcctctacaaccttcctccggattggtctatagggacacgatggccttttacgcaagcgtcacccgtgctgacccggaagttttcttcccagttaaaagtgttggcccgcggcgcgcggcctcttcctgtctgtaccagggcggcgcgtggtctacgccgagtgacagagacgctcaggctgtgttctcaggatgaccgagtgggagacagcagcaccagcggtggcagagaccccagacatcaagctctttgggaagtggagcaccgatgatgtgcagatcaatgacatttccctgcaggattacattgcagtgaaggagaagtatgccaagtacctgcctcacagtgcagggcggtatgccgccaaacgcttccgcaaagctcagtgtcccattgtggagcgcctcactaactccatgatgatgcacggccgcaacaacggcaagaagctcatgactgtgcgcatcgtcaagcatgccttcgagatcatacacctgctcacaggcgagaaccctctgcaggtcctggtgaacgccatcatcaacagtggtccccgggaggactccacacgcattgggcgcgccgggactgtgagacgacaggctgtggatgtgtcccccctgcgccgtgtgaaccaggccatctggctgctgtgcacaggcgctcgtgaggctgccttccggaacattaagaccattgctgagtgcctggcagatgagctcatcaatgctgccaagggctcctcgaactcctatgccattaagaagaaggacgagctggagcgtgtggccaagtccaaccgctgattttcccagctgctgcccaataaacctgtctgccctttggggcagtcccagccacctgtgc

SEQ ID NO: 2057 - DNA, 2184 bp, Homo sapiens
cgaccggaagtccggtcactctcgcgaggccccagagagcaggcgctgggcagtgtggaggtcgttggagtcacttccccgtcaccagctcctgtgcctgccagtcggtgcccctcccgctccagccatgctctccgccctcgcccggcctgccagcgctgctctccgccgcagcttcagcacctcggcccagaacaatgctaaagtagctgtgctaggggcctctggaggcatcgggcagccactttcacttctcctgaagaacagccccttggtgagccgcctgaccctctatgatatcgcgcacacacccggagtggccgcagatctgagccacatcgagaccaaagccgctgtgaaaggctacctcggacctgaacagctgcctgactgcctgaaaggttgtgatgtggtagttattccggctggagtccccagaaagccaggcatgacccgggacgacctgttcaacaccaatgccacgattgtggccaccctgaccgctgcctgtgcccagcactgcccggaagccatgatctgcgtcattgccaatccggttaattccaccatccccatcacagcagaagttttcaagaagcatggagtgtacaaccccaacaaaatcttcggcgtgacgaccctggacatcgtcagagccaacacctttgttgcagagctgaagggtttggatccagctcgagtcaacgtccctgtcattggtggccatgctgggaagaccatcatccccctgatctctcagtgcacccccaaggtggactttccccaggaccagctgacagcactcactgggcggatccaggaggccggcacggaggtggtcaaggctaaagccggagcaggctctgccaccctctccatggcgtatgccggcgcccgctttgtcttctcccttgtggatgcaatgaatggaaaggaaggtgttgtggaatgttccttcgttaagtcacaggaaacggaatgtacctacttctccacaccgctgctgcttgggaaaaagggcatcgagaagaacctgggcatcggcaaagtctcctcttttgaggagaagatgatctcggatgccatccccgagctgaaggcctccatcaagaagggggaagatttcgtgaagaccctgaagtgagccgctgtgacgggtggccagtttccttaatttatgaaggcatcatgtcactgcaaagccgttgcagataaactttgtattttaatttgctttggtgatgattactgtattgacatcatcatgccttccaaattgtgggtggctctgtgggcgcatcatttcttccctgtgagagccaactttagagtgtctgctacctcttcattaccaatcagaattagatgatgtttaactgttagactgaagcgtgacgctttcatcagtagcttcaagaaagtctaaattgttaatttatggaattggacacagtattcagtttacccgtacatgctcctcccgcccctcctgttggcacccttgcatcgcccaggcctgattcctcctgggggtagttcacccccacgggttcatagttcagcggcgaatgccaggcagctgttttctggctgagcaaacagcacctttctcattgagcttcctctactgacctctgtcccccttgggatttcatcttctgaccgaaccctgatgttcagtggcagagacagcccatagccagaactgtgggtagaccagggttggggtgtgcggtttgggacagcccaaaccccagccgctgtgtcaaggcctaggacgccatgctgccatcaaaagggggttccaggtttccatcagtggcctaaagaagggacttcttgttgtactgaggagtgcggaattaaagagatttgactccctttagtattgggggcagtccgttccccagacactgtggcctctgaagtggaaactgaaagctgcatacctgggaaagaactttctaggaataggcaatggccttcagtggaagagggagggctggaggtgtgcccagtacttggatgttcatctgtccacaacagctttttgtttttttaaaaaagctaaaatggaaatggattttatcataaaggatgacatcgttttcttctacaattaatacatgttcattgtataaaacccaaaaagcagctaaaaaataaagcgggaaaggaactact

SEQ ID NO: 2058 - DNA, 1321 bp, Homo sapiens
ggcgctgggcagtgtggaggtcgttggagtcacttccgcgtcaccagctcctgtgcctgccagtcggtgcccctcccgctccagccatgctctccgccctcgcccggcctgtcagcgctgctctccgccgcagcttcagcacctcagcccagaacaatgctaaagtagctgtgctaggggcctctggaggcatcgggcagccactttcacttctcctgaagaacagccccttggtgagccgcctgaccctctatgatatcgcgcacacacccggagtggccgcagatctgagccacatcgagaccaaagccgctgtgaaaggctacctcggacctgaacagctgcctgactgcctgaaaggttgtgatgtggtagttattccggctggagtccccagaaagccaggcatgacccgggacgacctgttcaacaccaatgccacgattgtggccaccctgaccgctgcctgtgcccagcactgcccggaagccatgatctgcgtcattgccaatccggttaattccaccatccccatcacagcagaagttttcaagaagcatggagtgtacaaccccaacaaaatcttcggcgtgacgaccctggacatcgtcagagccaacacctttgttgcagagctgaagggtttggatccagctcgagtcaacgtccctgtcattggtggccatgctgggaagaccatcatccccctgatctctcagtgcacccccaaggtggactttccccaggaccagctgacagcactcactgggcggatccaggaggccggcacggaggtggtcaaggctaaagccggagcaggctctgccaccctctccatggcgtatgccggcgcccgctttgtcttctcccttgtggatgcaatgaatggaaaggaaggtgttgtggaatgttccttcgttaagtcacaggaaacggaatgtacctacttctccacaccgctgctgcttgggaaaaagggcatcgagaagaacctgggcatcggcaaagtctcctcttttgaggagaagatgatctcggatgccatccccgagctgaaggcctccatcaagaagggggaagatttcgtgaagaccctgaagtgagccgctgtgacgggtggccagtttccttaatttatgaaggcatcatgtcactgcaaagccgttgcagataaactttgtattttaatttgctttggtgatgattactgtattgacatcatcatgccttccaaattgtgggtggctctgtgggcgcatcaataaaagccgtccttgattttatttttcaaggtcccttctgtaaaaaaaaaaaaaaaaaa

SEQ ID NO: 2059 - DNA, 2184 bp, Homo sapiens; identical to SEQ ID NO: 2057

SEQ ID NO: 2060 - DNA, 1321 bp, Homo sapiens
ggcgctgggcagtgtggaggtcgttggagtcacttccgcgtcaccagctcctgtgcctgccagtcggtgcccctcccgctccagccatgctctccgccctcgcccggcctgccagcgctgctctccgccgcagcttcagcacctcggcccagaacaatgctaaagtagctgtgctaggggcctctggaggcatcgggcagccactttcacttctcctgaagaacagccccttggtgagccgcctgaccctctatgatatcgcgcacacacccggagtggccgcagatctgagccacatcgagaccaaagccgctgtgaaaggctacctcggacctgaacagctgcctgactgcctgaaaggttgtgatgtggtagttattccggctggagtccccagaaagccaggcatgacccgggacgacctgttcaacaccaatgccacgattgtggccaccctgaccgctgcctgtgcccagcactgcccggaagccatgatctgcgtcattgccaatccggttaattccaccatccccatcacagcagaagttttcaagaagcatggagtgtacaaccccaacaaaatcttcggcgtgacgaccctggacatcgtcagagccaacacctttgttgcagagctgaagggtttggatccagctcgagtcaacgtccctgtcattggtggccatgctgggaagaccatcatccccctgatctctcagtgcacccccaaggtggactttccccaggaccagctgacagcactcactgggcggatccaggaggccggcacggaggtggtcaaggctaaagccggagcaggctctgccaccctctccatggcgtatgccggcgcccgctttgtcttctcccttgtggatgcaatgaatggaaaggaaggtgttgtggaatgttccttcgttaagtcacaggaaacggaatgtacctacttctccacaccgctgctgcttgggaaaaagggcatcgagaagaacctgggcatcggcaaagtctcctcttttgaggagaagatgatctcggatgccatccccgagctgaaggcctccatcaagaagggggaagatttcgtgaagaccctgaagtgagccgctgtgacgggtggccagtttccttaatttatgaaggcatcatgtcactgcaaagccgttgcagataaactttgtattttaatttgctttggtgatgattactgtattgacatcatcatgccttccaaattgtgggtggctctgtgggcgcatcaataaaagccgtccttgattttatttttcaaggtcccttctgtaaaaaaaaaaaaaaaaaa

SEQ ID NO: 2061 - DNA, 2184 bp, Homo sapiens; identical to SEQ ID NO: 2057

SEQ ID NO: 2062 - DNA, 1879 bp, Homo sapiens
atggcggcagccagcgctggggcaacccggctgctcctgctcttgctgatggcggtagcagcgcccagtcgagcccggggcagcggctgccgggccgggactggtgcgcgaggggctggggcggaaggtcgagagggcgaggcctgtggcacggtggggctgctgctggagcactcatttgagatcgatgacagtgccaacttccggaagcggggctcactgctctggaaccagcaggatggtaccttgtccctgtcacagcggcagctcagcgaggaggagcggggccgactccgggatgtggcagccctgaatggcctgtaccgggtccggatcccaaggcgacccggggccctggatggcctggaagctggtggctatgtctcctcctttgtccctgcgtgctccctggtggagtcgcacctgtcggaccagctgaccctgcacgtggatgtggccggcaacgtggtgggcgtgtcggtggtgacgcaccctgggggctgccggggccatgaggtggaggacgtggacctggagctgttcaacacctcggtgcagctgcagccgcccaccacagccccaggccctgagacggcggccttcattgagcgcctggagatggaacaggcccagaaggccaagaacccccaggagcagaagtccttcttcgccaaatactggatgtacatcattcccgtcgtcctgttcctcatgatgtcaggagcgccagacaccgggggccagggtgggggtgggggtgggggtggtggtggggtcagtgccggtgagggcccaggctggtcagcgtcccgtcttgcacacccaggggcctccctttctgctggagtcccctgtgtcctcagccatcccaagaagggtttgctggtccctcctttccccccgtcccacgaggccacctgggccagccccttgtcctctgccttctgctggcagaggagcagctggactggggcctttggcacagcagccggtgtctcctgcgcccgcctcccccatggccccatgcagccccaggggcttcccccctgcccatggagtagagcccgagatcctggccactatgccagttctgacctcgcatccccctaccccgagcccatgcagtctgggaacatgccgccttctctccagcctctgtgcctttgttccaggtggtctcaccctcctgtccctggctgggctaggtggtcctgtccaggctcctgcagcgcccccctcactttgacactggactaggatgcagcctcccttctgtgtccccttgagggtaccctgggtcccctcatcaggggcagaggcatgaaagagtcggggctggatggccaggggcttctgggcccgacgcctagtgcagcccctggggtcgtggtttgacatttgtctgcctggtgcaaacaaggaatccttgcctttaaggtgacaggccctccacaggcttccagacttgaaggaaaaggtttaagaaagaaaacaaaaccaacagttagtggagtcaaagcccagacactgtaaatagaaccccctccaccaccccccgccgcccagcatcctacctggactgcggtgctacgagggcctgcgggcctttgctgtgtgccaccctccctgtaagtctatttaaaaacatcgacgatacattgaaatgtgtgaacgttttgaaaagctacagcttccagcagccaaaagcaactgttgttttggcaagacggtcctgatgtacaagcttgattgaaattcactgctcacttgatacgttattcagaaacccaaggaatggctgtccccatcctcatgtggctgtgtggagctcagctgtgttgtgtggcagtttattaaactgtcccccagatcgacacgc

SEQ ID NO: 2063 - DNA, 1981 bp, Homo sapiens
tgggaagaagccgagatggcggcagccagcgctggggcaacccggctgctcctgctcttgctgatggcggtagcagcgcccagtcgagcccggggcagcggctgccgggccgggactggtgcgcgaggggctggggcggaaggtcgagagggcgaggcctgtggcacggtggggctgctgctggagcactcatttgagatcgatgacagtgccaacttccggaagcggggctcactgctctggaaccagcaggatggtaccttgtccctgtcacagcggcagctcagcgaggaggagcggggccgactccgggatgtggcagccctgaatggcctgtaccgggtccggatcccaaggcgacccggggccctggatggcctggaagctggtggctatgtctcctcctttgtccctgcgtgctccctggtggagtcgcacctgtcggaccagctgaccctgcacgtggatgtggccggcaacgtggtgggcgtgtcggtggtgacgcaccctgggggctgccggggccatgaggtggaggacgtggacctggagctgttcaacacctcggtgcagctgcagccgcccaccacagccccaggccctgagacggcggccttcattgagcgcctggagatggaacaggcccagaaggccaagaacccccaggagcagaagtccttcttcgccaaatactggcacatcatcctggggggggccgtgttgctcacagccctgcgtcctgctgcgccagggcccgcgccaccgccacaggaggcctgatggatgtacatcattcccgtcgtcctgttcctcatgatgtcaggagcgccagacaccgggggccagggtgggggtgggggtgggggtggtggtggggtcagtgccggtgagggcccaggctggtcagcgtcccgtcttgcacacccaggggcctccctttctgctggagtcccctgtgtcctcagccatcccaagaagggtttgctggtccctcctttccccccgtcccacgaggccacctgggccagccccttgtcctctgccttctgctggcagaggagcagctggactggggcctttggcacagcagccggtgtctcctgcgcccgcctcccccatggccccatgcagccccaggggcttcccccctgcccatggagtagagcccgagatcctggccactatgccagttctgacctcgcatccccctaccccgagcccatgcagtctgggaacatgccgccttctctccagcctctgtgcctttgttccaggtggtctcaccctcctgtccctggctgggctaggtggtcctgtccaggctcctgcagcgcccccctcactttgacactggactaggatgcagcctcccttctgtgtccccttgagggtaccctgggtcccctcatcaggggcagaggcatgaaagagtcggggctggatggccaggggcttctgggcccgacgcctagtgcagcccctggggtcgtggtttgacatttgtctgcctggtgcaaacaaggaatccttgcctttaaggtgacaggccctccacaggcttccagacttgaaggaaaaggtttaagaaagaaaacaaaaccaacagttagtggagtcaaagcccagacactgtaaatagaaccccctccaccaccccccgccgcccagcatcctacctggactgcggtgctacgagggcctgcgggcctttgctgtgtgccaccctccctgtaagtctatttaaaaacatcgacgatacattgaaatgtgtgaacgttttgaaaagctacagcttccagcagccaaaagcaactgttgttttggcaagacggtcctgatgtacaagcttgattgaaattcactgctcacttgatacgttattcagaaacccaaggaatggctgtccccatcctcatgtggctgtgtggagctcagctgtgttgtgtggcagtttattaaactgtcccccagatcgacacgc

SEQ ID NO: 2064 - DNA, 1879 bp, Homo sapiens; identical to SEQ ID NO: 2062

SEQ ID NO: 2065 - DNA, 6201 bp, Homo sapiens
cgccggtggaggggcgcgcggccgcgagcaaaggagggagggaaggaaggaagagagggaggcgggcaagcaggcgggcgcgggggtcggggactgaggcagtagagggaggcgagagcccggcagccgcttcgcgctgtttgctgcgcgggcttttggagggggcggccgtttagtcggctgaggagaagcggacaccagcggcgttggtgatagcgcctgggggagggggactggagaggcgagaaggggggtcgctgcggtggttctctcgctgtcgctctctctttgcctcgctcccggctcggcgggctcctcccggcgtctctctcgcctccggggtcccgctccccgccccccgcggtatgtcttgatcccgagcagcgggtttcatggggctcctcaggattatgatgccgcccaagttgcagctgctggcggtggtggccttcgcggtggcgatgctcttcttggaaaaccagatccagaaactggaggagtcccgctcgaagctagaaagggctattgcaagacacgaagtccgagaaattgagcagcgacatacaatggatggccctcggcaagatgccactttagatgaggaagaggacatggtgatcatttataacagagttcccaaaacggcaagcacttcatttaccaatatcgcctatgacctgtgtgcaaagaataaataccatgtccttcatatcaacactaccaaaaataatccagtgatgtcattgcaagatcaggtgcgctttgtaaagaatataacttcctggaaagagatgaaaccaggattttatcatggacacgtttcttacttggattttgcaaaatttggtgtgaagaagaaaccaatttacattaatgtcataagggatcctattgagaggctagtttcttattattactttctgagatttggagatgattatagaccagggttacggagacgaaaacaaggagacaaaaagacctttgatgaatgtgtagcagaaggtggctcagactgtgctccagagaagctctggcttcaaatcccgttcttctgtggccatagctccgaatgctggaatgtgggaagcaggtgggctatggatcaagccaagtataacctaattaatgaatattttctggtgggagttactgaagaacttgaagattttatcatgttattggaggcagcattgccccggtttttcaggggtgctactgaactctatcgcacaggaaagaaatctcatcttaggaaaaccacagagaagaaactccccactaaacaaaccattgcaaaactacagcaatctgatatttggaaaatggagaatgagttctatgaatttgcactagagcagttccaattcatcagagcccatgccgttcgagaaaaagatggagacctctacatcctcgcacaaaactttttctatgaaaagatttaccctaagtcgaactgagtataaggtgtgactattggattcttgaactaaaatttgaccctgtcttcacctttgttctcagctccacagtctggattgctgacagtaggtgtatatgacaatttgtattgagccaaattaggaaacagacagtaacgtcaaggaagtagatactggctggcattgtcagtgttctaagtttcaggcatttttatttttcctggctaaacgttggtgaaagttataacctcctgcctgggagaaaatatacatcacctaaaatgaacttatggcaggtctaatcaaaaggctaaatacaatttcagaaaaggttctgatactcttgtttttgataaagcattttttcaactaaccatgaattaagatgagtccatttgcctcttctgccttcactgagggtttgggttatacacctctactgaattgtgttaataactgtttggcagtgtgtactttgtttttgtgagtcatgtctcatgaaatttattggaatgtttaatcatatttgctaagaaatgtttctgctgtagttggatttgcccatatttatgtaggtggttttaattttttaaatggtgattagtgttaaaaatcaatttaaatcatgactaatatggtaaaaagataaagcatcaaagcagtatttctcattcctgcctcctcaatatctaatactgggaagatacttcaaagaatattgagattgtctgaagttttagttaagattttcacacattaatatcaaaaaagtaagtttagtatttgtttctccatgggttatttgtaaagctgtaaactgagatatcggtgactccgtattatgactccattagtgagctgtggtatgggtaggattttcctacttcttctgtacttttacctgtagactatttttactaaggtgctttataatgtgttttaaagcattgcatttacaaaacaaggaaaatgctgtaaatattgcatattttatgtatttggaccaaaaggttacaagtaattagacaaaagtggttttgcaccaattttatgtcaagtaaaaccatcagacctactgttcttgtatttctcatttaactttactgttaagacatcactgaaatgaacttcagtaagctttcaattttgatacacagttcattattcataacttgaggcagtaattacagtggaatgagtactggacaaggagtcaaaaaacttgatttcaggtcctagctctagcacttacagctgtgtgatcttgggcaagtcacttaacctctctttgcctcaatttcctcatcttgaaatgaggataataatacctgctgtacctacctcacagggctgttgtgaggattaaatgagatggcatgtgaaagcactttgaaaattgtaaagttagctgactagggtcagggaaacttttctcttcaaatttgaaagctgtttctgttttcattttacattattattcagaaatggtagctattctatacctatggtttaagtaaatatttctgaataaggcttcaccatactgtaagcattttaggtagattgccttaaaggttatgggagggcatgagggaacacttcttatgagaaaacatttataaacaaaagaaacatttataaactaaagaaaaactaaaagaatgacagaacaatcatcttagcaccctttcctcacaataatataaaaatattaaaagaacataggcaggctttttttaaatttggcttttttctttccttttttcaaattgacttttataggtatttcctgaaagtgtatacaaattatttcctcgcccaaaataaagcaccacttcaaggtgtggtttgacattacatgctaatgaacaaacccagtatgcaagttattcttgcaccacatgctcaaatcttcttgaggtgcattaactcttttaggtaactagagcagtacttggtgaactagatcaggaggtcagtaaactttctgtggaagggccagagagtaaatattttaggctttgcagcccatacggtctctgtcacagctagtcaaccctgccattttaccacaaaagcagcaatagacattatgtaaacaaatgagcacagttatgttccaataaaactttatttacaaaaacagatgacatcccagatgcagaccatgggcaaccaaccattgcactggccaaatcattatttatggagaaatcctctttgtgtctctactctagatgcctaaaagagtttatatacttctaaaagctcctaacttatatccaaagaattgctttctgattcgtgtagtctctcccacagattcataaacttttatgacttatattgtttccaggtgggcatggtttatttcccagtttaacagttcagaataggggcatttattttatcatattttagggtgggttaggagtatcctttctggagactgagaaaggggtgtatttaattccatcaggtccagtacagtactaggagtcataatactttataatcaattaaataaatagaaccactgagacaataatgtatttttttaaagtggcaaatgtggttttcttttttcagcctttgcgctttttcagtattttgaccatagggagataatttttttataatacaaaagtaaccacttggaattttaaagataatgttatgtgtgtatgtgaaatatatatacatatatatatatatttcctaaaagaagaaaagatacctttctgttcaacttgtatcaactcctcttttctaattgctgtgaaatggcaactgttgataaattattgtgattgttttaaaatctaatgggaagtaaaatatattttgattttacccagcttaatctgtaaagtagcacttaaatatatctgatagcaacacttaagatattgcatggggattactttcctatcatccatatgcatttgtgcaacttcaaacatattgggtgcttctgaattcctgatgattggatttaagctattgaaaattggataatttaaacttaatgatttttataattttctgatcttaaaatttggttaatgcctataatctgttgctttttctcaatatgtgtcctattggaaattcctcaaatcgttggtgccatcagtgatttacaaacaatattttgatattgcagatgacttgcttactgtatttgcattgttagaaaacagtttgtagacaatgattcttttttaataaaatcaaataattctaaaagtgctagagaatttaactaaaagctggttcccaaatgcatagctggcattttaatttaaattcaaatctacatagagaacatctgtgtaaatcatctaactggattttcccattggtcattcccaaacacacctatggtcctagaatccttaagagaagcaccctgtaaccttttatgtggtttgcctttaagaggcccaggtgcttctcctttatgatttgagttggcctcttcataaattagtgctgtttactttcagaggaagcagagaagttgctgttatgtttttgcatccgtttaccctatgcaaagttgctgtatgatgccaactaaactgctctttaggcagccttctgaggagaaaagcaaccctgtttcaaatccactgccaattcagctcctctggagtggagctttctgatttcttggagcaggaattttagagattgaaatgaatgatcatttagtcagatttatcctgtaatttcatgcagctttgtggcctttgcagtactatttataaaatggaccctgatggtgatgaactctttagaacgcattactgttaagcctgtgttgagacattgatgctgtctatctcattttttagacagtttttgtagctttctattgagagtcaggtatgtgagcatctctgaagcagtgttgaatgtaattttcggaaacatggattgtgtattttgacttttattttataaatacacagctcaacagtgccttttttttccctcatagtcctgttggaagatgctcactactttctctcttctctctccctgccctcccccactccattcagttgattcatttatgcaaattctgtttccaacttgaaaccattttgtcacatctgttggagagataatcactccttttccttaacattctgccagctttctgatgttgaagtgtttcagttgactacctgatgcaaaagctataaaataaacagtgggaaggggaaaaattggtgtcctgttttaatattttcttttgtagccttgacactgatggacattttccaagctgactcagtgttcagtgtcaacttaactctcagatagtgttgccatcaagaaagcatgcaacatcattggtttctaatgattttatggcttgtgacaatattttatctggactgacatgcctctgctgcttttgctttgtacttcattgctggtaataaaatttcagatggaaaacttacaaaatatatacttaattagaagaaaaaaatagagaaagggctattagaattaaaaaaatttgaaagtaacttaatctaacatttatggcacagtttggacatatccataattttttttgggaacacacatttctgattttttttttcccccttaaagaagaaagtctcaattccattgattttcaattcttagccactggctcattgctttgagcaatgcttgattgattctatttatattatatgatattgggttgataaaataccagttcaatgat

SEQ ID NO: 2066 - DNA, 909 bp, Homo sapiens
atgctgtttatcaaattcattcatctcgaagtattcagtatgccagaaagggctattgcaagacacgaagtccgagaaattgagcagcgacatacaatggatggccctcggcaagatgccactttagatgaggaagaggacatggtgatcatttataacagagttcccaaaacggcaagcacttcatttaccaatatcgcctatgacctgtgtgcaaagaataaataccatgtccttcatatcaacactaccaaaaataatccagtgatgtcattgcaagatcaggtgcgctttgtaaagaatataacttcctggaaagagatgaaaccaggattttatcatggacacgtttcttacttggattttgcaaaatttggtgtgaagaagaaaccaatttacattaatgtcataagggatcctattgagaggctagtttcttattattactttctgagatttggagatgattatagaccagggttacggagacgaaaacaaggagacaaaaagacctttgatgaatgtgtagcagaaggtggctcagactgtgctccagagaagctctggcttcaaatcccgttcttctgtggccatagctccgaatgctggaatgtgggaagcaggtgggctatggatcaagccaagtataacctaattaatgaatattttctggtgggagttactgaagaacttgaagattttatcatgttattggaggcagcattgccccggtttttcaggggtgctactgaactctatcgcacagcaccagatactgctacaccatctcatcggcatggacctatatgtggcagcaagtccatctcatcgcttttggtgaaagtcagtccagtttgtaaagattctcattgccttggaaagtgttccaggaatggactttctgcagta

SEQ ID NO: 2067 - DNA, 6708 bp, Homo sapiens
agggagggaaggaaggaagagagggaggcgggcaagcaggcgggcgcgggggtcggggactgaggcagtagagggaggcgagagcccggcagccgcttcgcgctgtttgctgcgcgggcttttggagggggcggccgtttagtcggctgaggagaagcggacaccagcggcgttggtgatagcgcctgggggagggggactggagaggcgagaaggggggtcgctgcggtggttctctcgctgtcgctctctctttgcctcgctcccggctcggcgggctcctcccggcgtctctctcgcctccggggtcccgctccccgccccccgcggtatgtcttgatcccgagcagcgggtttcatggggctcctcaggattatgatgccgcccaagttgcagctgctggcggtggtggccttcgcggtggcgatgctcttcttggaaaaccagatccagaaactggaggagtcccgctcgaagctagaaagggctattgcaagacacgaagtccgagaaattgagcagcgacatacaatggatggccctcggcaagatgccactttagatgaggaagaggacatggtgatcatttataacagagttcccaaaacggcaagcacttcatttaccaatatcgcctatgacctgtgtgcaaagaataaataccatgtccttcatatcaacactaccaaaaataatccagtgatgtcattgcaagatcaggtgcgctttgtaaagaatataacttcctggaaagagatgaaaccaggattttatcatggacacgtttcttacttggattttgcaaaatttggtgtgaagaagaaaccaatttacattaatgtcataagggatcctattgagaggctagtttcttattattactttctgagatttggagatgattatagaccagggttacggagacgaaaacaaggagacaaaaagacctttgatgaatgtgtagcagaaggtggctcagactgtgctccagagaagctctggcttcaaatcccgttcttctgtggccatagctccgaatgctggaatgtgggaagcaggtgggctatggatcaagccaagtataacctaattaatgaatattttctggtgggagttactgaagaacttgaagattttatcatgttattggaggcagcattgccccggtttttcaggggtgctactgaactctatcgcacaggaaagaaatctcatcttaggaaaaccacagagaagaaactccccactaaacaaaccattgcaaaactacagcaatctgatatttggaaaatggagaatgagttctatgaatttgcactagagcagttccaattcatcagagcccatgccgttcgagaaaaagatggagacctctacatcctcgcacaaaactttttctatgaaaagatttaccctaagtcgaactgagtataaggtgtgactattagattcttgaactaaaatttgaccctgtcttcacctttgttctcagctccacagtctggattgctgacagtaggtgtatatgacaatttgtattgagccaaattaggaaacagacagtaacgtcaaggaagtagatactggctggcattgtcagtgttctaagtttcaggcatttttatttttcctggctaaacgttggtgaaagttataacctcctgcctgggagaaaatatacatcacctaaaatgaacttatggcaggtctaatcaaaaggctaaatacaatttcagaaaaggttctgatactcttgtttttgataaagcattttttcaactaaccatgaattaagatgagtccatttgcctcttctgccttcactgagggtttgggttatacacctctactgaattgtgttaataactgtttggcagtgtgtactttgtttttgtgagtcatgtctcatgaaatttattggaatgtttaatcatatttgctaagaaatgtttctgctgtagttggatttgcccatatttatgtaggtggttttaattttttaaatggtgattagtgttaaaaatcaatttaaatcatgactaatatggtaaaaagataaagcatcaaagcagtatttctcattcctgcctcctcaatatctaatactgggaagatacttcaaagaatattgagattgtctgaagttttagttaagattttcacacattaatatcaaaaaagtaagtttagtatttgtttctccatgggttatttgtaaagctgtaaactgagatatcggtgactccgtattatgactccattagtgagctgtggtatgggtaggattttcctacttcttctgtacttttacctgtagactatttttactaaggtgctttataatgtgttttaaagcattgcatttacaaaacaaggaaaatgctgtaaatattgcatattttatgtatttggaccaaaaggttacaagtaattagacaaaagtggttttgcaccaattttatgtcaagtaaaaccatcagacctactgttcttgtatttctcatttaactttactgttaagacatcactgaaatgaacttcagtaagctttcaattttgatacacagttcattattcataacttgaggcagtaattacagtggaatgagtactggacaaggagtcaaaaaacttgatttcaggtcctagctctagcacttacagctgtgtgatcttgggcaagtcacttaacctctctttgcctcaatttcctcatcttgaaatgaggataataatacctgctgtacctacctcacagggctgttgtgaggattaaatgagatggcatgtgaaagcactttgaaaattgtaaagcgctatgtaaatgtaaggtattatagaaacatctttaacatatagtttcataccattcattttttaacaaagaaagggaaaagtctgcttgtaagctggttgaaaaagttaatcttgatataaatttgtgtttgataaatatcctctcagtgttttatcttccatgtttcaacaactattgaaatatgaaatgcctgtgaactcttaaagcttcatgagcagctgcttgagttcaggaagttcactgttagaaataggctttgttagctgactagggtcagggaaacttttctcttcaaatttgaaagctgtttctgttttcattttacattattattcagaaatggtagctattctatacctatggtttaagtaaatatttctgaataaggcttcaccatactgtaagcattttaggtagattgccttaaaggttatgggagggcatgagggaacacttcttatgagaaaacatttataaacaaaagaaacatttataaactaaagaaaaactaaaagaatgacagaacaatcatcttagcaccctttcctcacaataatataaaaatattaaaagaacataggcaggctttttttaaatttggcttttttctttccttttttcaaattgacttttataggtatttcctgaaagtgtatacaaattatttcctcgcccaaaataaagcaccacttcaaggtgtggtttgacattacatgctaatgaacaaacccagtatgcaagttattcttgcaccacatgctcaaatcttcttgaggtgcattaactcttttaggtaactagagcagtacttggtgaactagatcaggaggtcagtaaactttctgtggaagggccagagagtaaatattttaggctttgcagcccatacggtctctgtcacagctagtcaaccctgccattttaccacaaaagcagcaatagacattatgtaaacaaatgagcacagttatgttccaataaaactttatttacaaaaacagatgacatcccagatgcagaccatgggcaaccaaccattgcactggctaaatcattatttatggagaaatcctctttgtgtctctactctagatgcctaaaagagtttatatacttctaaaagctcctaacttatatccaaagaattgctttctgattcgtgtagtctctcccacagattcataaacttttatgacttatattgtttccaggtgggcatggtttatttcccagtttaacagttcagaataggggcatttattttatcatattttagggtgggttaggagtatcctttctggagactgagaaaggggtgtatttaattccatcaggtccagtacagtactaggagtcataatactttataatcaattaaataaatagaaccactgagacaataatgtatttttttaaagtggcaaatgtggttttcttttttcagcctttgcgctttttcagtattttgaccatagggagataatttttttataatacaaaagtaaccacttggaattttaaagataatgttatgtgtgtatgtgaaatatatatacatatatatatatatttcctaaaagaagaaaagatacctttctgttcaacttgtatcaactcctcttttctaattgctgtgaaatggcaactgttgataaattattgtgattgttttaaaatctaatgggaagtaaaatatattttgattttacccagcttaatctgtaaagtagcacttaaatatatctgatagcaacacttaagatattgcatggggattactttcctatcatccatatgcatttgtgcaacttcaaacatattgggtgcttctgaattcctgatgattggatttaagctattgaaaattggataatttaaacttaatgatttttataattttctgatcttaaaatttggttaatgcctataatctgttgctttttctcaatatgtgtcctattggaaattcctcaaatcgttggtgccatcagtgatttacaaacaatattttgatattgcagatgacttgcttactgtatttgcattgttagaaaacagtttgtagacaatgattcttttttaataaaatcaaataattctaaaagtgctagagaatttaactaaaagctggttcccaaatgcatagctggcattttaatttaaattcaaatctacatagagaacatccgtgtaaatcatctaactggattttcccattggtcattcccaaacacacctatggtcctagaatccttaagagaagcaccctgtaaccttttatgtggtttgcctttaagaggcccaggtgcttctcctttatgatttgagttggcctcttcataaattagtgctgtttactttcagaggaagcagagaagttgctgttatgtttttgcatccgtttaccctatgcaaagttgctgtatgatgccaactaaactgctctttaggcagccttctgaggagaaaagcaaccctgtttcaaatccactgccaattcagctcctctggagtggagctttctgatttcttggagcaggaattttagagattgaaatgaatgatcatttagtcagatttatcctgtaatttcatgcagctttgtggcctttgcagtactatttataaaatggaccctgatggtgatgaactctttagaacgcattactgttaagcctgtgttgagacattgatgctgtctatctcattttttagacagtttttgtagctttctattgagagtcaggtatgtgagcatctctgaagcagtgttgaatgtaattttcggaaacatggattgtgtattttgacttttattttataaatacacagctcaacagtgccttttttttccctcatagtcctgttggaagatgctcactactttctctcttctctctccctgccctcccccactccattcagttgattcatttatgcaaattctgtttccaacttgaaaccattttgtcacatctgttggagagataatcactccttttccttaacattctgccagctttctgatgttgaagtgtttcagttgactacctgatgcaaaagctataaaataaacagtgggaaggggaaaaattggtgtcctgttttaatattttcttttgtagccttgacactgatggacattttccaagctgactcagtgttcagtgtcaacttaactctcagatagtgttgccatcaagaaagcatgcaacatcattggtttctaatgattttatggcttgtgacaatattttatctggactgacatgcctctgctgcttttgctttgtacttcattgctggtaataaaatttcagatggaaaacttacaaaatatatacttaattagaagaaaaaaatagagaaagggctattagaattaaaaaaatttgaaagtaacttaatctaacatttatggcacagtttggacatatccataattttttttgggaacacacatttctgattttttttttcccccttaaagaagaaagtctcaattccattgattttcaattcttagccactggctcattgctttgagcaatgcttgattgattctatttatattatatgatattgggttgataaaataccagttcaatgatgagttttcttaacagaatttggtttgtacttgcagtggctgaacaaagagcatggcttgagaatcaaagggatctgcatttagcaatgtgatgtcagtaaatggacataacaggattgttgtaaaggttgggcatgatgtatgcaaagtactggccagggtagactaataactgatggcatttatatgctgtgctggaatattgttaccaagctgatgtgccgttctcaccctgcagaatactggttttgtcatttcataaatgatatttttataaat

SEQ ID NO: 2068 - DNA, 6201 bp, Homo sapiens; identical to SEQ ID NO: 2065

SEQ ID NO: 2069 - DNA, 6360 bp, Homo sapiens
tgggagtagaaggtaaaaagggagtggtgagaatgaatgtgagaaggaagccaggacagcgcagtccccagtcccgaacggccagggagaggaggtggcctagcgctggcggggctcaccccaatccgtctgccttttgatgccgtactgtaagctccgtccatctctgctggttgcgcagccacctcgggatactgcacacggagaggagggaaaataagcgaggcaccgccgcaccacgcgggagacctacggagacccacagcgcccgagccctggaagagcactactggatgtcagcggagaaatggctttgagctcagcctggcgctcggttctgcctctgtggctcctctggagcgctgcctgctcccgcgccgcgtccggggacgacaacgcttttccttttgacattgaagggagctcagcggttggcaggcaagacccgcctgagacgagcgaaccccgcgtggctctgggacgcctgccgcctgcggccgagaaatgcaatgctggattctttcacaccctgtcgggagaatgtgtgccctgcgactgtaatggcaattccaacgagtgtttggacggctcaggatactgtgtgcactgccagcggaacacaacaggagagcactgtgaaaagtgtctggatggttatatcggagattccatcaggggagcaccccaattctgccagccgtgcccctgtcccctgccccacttggccaattttgcagaatcctgctataggaaaaatggagctgttcggtgcatttgtaacgaaaattatgctggacctaactgtgaaagatgtgctcccggttactatggaaaccccttactcattggaagcacctgtaagaaatgtgactgcagtggaaattcagatcccaacctgatctttgaagattgtgatgaagtcactggccagtgtaggaattgcttacgcaacaccaccggattcaagtgtgaacgttgcgctcctggctactatggggacgccaggatagccaagaactgtgcaggctgtgataagtgcgtctgggacctgactgatgacctgcggttagcagcgctctccatcgaggaaggcaaatccggggtgctgagcgtatcctctggggccgccgctcataggcacgtgaatgaaatcaacgccaccatctacctcctcaaaacaaaattgtcagaaagagaaaaccaatacgccctaagaaagatacaaatcaacaatgctgagaacacgatgaaaagccttctgtctgacgtagaggaattagttgaaaaggaaaatcaagcctccagaaaaggacaacttgttcagaaggaaagcatggacaccattaaccacgcaagtcagctggtagagcaagcccatgatatgagggataaaatccaagagatcaacaacaagatgctctattatggggaagagcatgaacttagccccaaggaaatctctgagaagctggtgttggcccagaagatgcttgaagagattagaagccgtcaaccatttttcacccaacgggagctcgtggatgaggaggcagatgaggcttacgaactactgagccaggctgagagctggcagcggctgcacaatgagacccgcactctgtttcctgtcgtcctggagcagctggatgactacaatgctaagttgtcagatctccaggaagcacttgaccaggcccttaaccatgtcagggatgccgaagacatgaacagggccacagcagccaggcagcgggaccatgagaaacaacaggaaagagtgagggaacaaatggaagtggtgaacatgtctctgagcacatctgcggactctctgacaacacctcgtctaactctttcagaacttgatgatataataaagaatgcgtcagggatttatgcagaaatagatggagccaaaagtgaactacaagtaaaactatctaacctaagtaacctcagccatgatttagtccaagaagctattgaccatgcacaggaccttcaacaagaagctaatgaattgagcaggaagttgcacagttcagatatgaacgggctggtacagaaggctttggatgcatcaaatgtctatgaaaatattgttaattatgttagtgaagccaatgaaacagcagaatttgctttgaacaccactgaccgaatttatgatgcggtgagtgggattgatactcaaatcatttaccataaagatgaaagtgagaacctcctcaatcaagccagagaactgcaagcaaaggcagagtctagcagtgatgaagcagtggctgacactagcaggcgtgtgggtggagccctagcaaggaaaagtgcccttaaaaccagactcagtgatgccgttaagcaactacaagcagcagagagaggggatgcccagcagcgcctggggcagtctagactgatcaccgaggaagccaacaggacgacgatggaggtgcagcaggccactgcccccatggccaacaatctaaccaactggtcacagaatcttcaacattttgactcttctgcttacaacactgcagtgaactctgctagggatgcagtaagaaatctgaccgaggttgtccctcagctcctggatcagcttcgtacggttgagcagaagcgacctgcaagcaacgtttctgccagcatccagaggatccgagagctcattgctcagaccagaagtgttgccagcaagatccaagtctccatgatgtttgatggccagtcagctgtggaagtgcactcgagaaccagtatggatgacttaaaggccttcacgtctctgagcctgtacatgaaaccccctgtgaagcggccggaactgaccgagactgcagatcagtttatcctgtacctcggaagcaaaaacgccaaaaaagagtatatgggtcttgcaatcaaaaatgataatctggtatacgtctataatttgggaactaaagatgtggagattcccctggactccaagcccgtcagttcctggcctgcttacttcagcattgtcaagattgaaagggtgggaaaacatggaaaggtgtttttaacagtcccgagtctaagtagcacagcagaggaaaagttcattaaaaagggggaattttcgggagatgactctctgctggacctggaccctgaggacacagtgttttatgttggtggagtgccttccaacttcaagctccctaccagcttaaacctgcctggctttgttggctgcctggaactggccactttgaataatgatgtgatcagcttgtacaactttaagcacatctataatatggacccctccacatcagtgccatgtgcccgagataagctggccttcactcagagtcgggctgccagttacttcttcgatggctccggttatgccgtggtgagagacatcacaaggagagggaaatttggtcaggtgactcgctttgacatagaagttcgaacaccagctgacaacggccttattctcctgatggtcaatggaagtatgtttttcagactggaaatgcgcaatggttacctacatgtgttctatgattttggattcagcagtggccctgtgcatcttgaagatacgttaaagaaagctcaaattaatgatgcaaaataccatgagatctcaatcatttaccacaatgataagaaaatgatcttggtagttgacagaaggcatgtcaagagcatggataatgaaaagatgaaaataccttttacagatatatacattggaggagctcctccagaaatcttacaatccagggccctcagagcacaccttcccctagatatcaacttcagaggatgcatgaagggcttccagttccaaaagaaggacttcaatttactggagcagacagaaaccctgggagttggttatggatgcccagaagactcacttatatctcgcagagcatatttcaatggacagagcttcattgcttcaattcagaaaatatctttctttgatggctttgaaggaggttttaatttccgaacattacaaccaaatgggttactattctattatgcttcagggtcagacgtgttctccatctcactggataatggtactgtcatcatggatgtaaagggaatcaaagttcagtcagtagataagcagtacaatgatgggctgtcccacttcgtcattagctctgtctcacccacaagatatgaactgatagtagataaaagcagagttgggagtaagaatcctaccaaagggaaaatagaacagacacaagcaagtgaaaagaagttttacttcggtggctcaccaatcagtgctcagtatgctaatttcactggctgcataagtaatgcctactttaccagggtggatagagatgtggaggttgaagatttccaacggtatactgaaaaggtccacacttctctttatgagtgtcccattgagtcttcaccattgtttctcctccataaaaaaggaaaaaatttatccaagcctaaagcaagtcagaataaaaagggagggaaaagtaaagatgcaccttcatgggatcctgttgctctgaaactcccagagcggaatactccaagaaactctcattgccacctttccaacagccctagagcaatagagcacgcctatcaatatggaggaacagccaacagccgccaagagtttgaacacttaaaaggagattttggtgccaaatctcagttttccattcgtctgagaactcgttcctcccatggcatgatcttctatgtctcagatcaagaagagaatgacttcatgactctatttttggcccatggccgcttggtttacatgtttaatgttggtcacaaaaaactgaagattagaagccaggagaaatacaatgatggcctgtggcatgatgtgatatttattcgagaaaggagcagtggccgactggtaattgatggtctccgagtcctagaagaaagtcttcctcctactgaagctacctggaaaatcaagggtcccatttatttgggaggtgtggctcctggaaaggctgtgaaaaatgttcagattaactccatctacagttttagtggctgtctcagcaatctccagctcaatggggcctccatcacctctgcttctcagacattcagtgtgaccccttgctttgaaggccccatggaaacaggaacttacttttcaacagaaggaggatacgtggttctagatgaatctttcaatattggattgaagtttgaaattgcatttgaagtccgtcccagaagcagttccggaaccctggtccacggccacagtgtcaatggggagtacctaaatgttcacatgaaaaatggacaggtcatagtgaaagtcaataatggcatcagagatttttccacctcagtaacacccaagcagagtctctgtgatggcagatggcacagaattacagttattagagattctaatgtggttcagttggatgtggactctgaagtgaaccatgtggttggacccctgaatccaaaaccaattgatcacagggagcctgtgtttgttggaggtgttccagaatctctactgacaccacgcttggcccccagcaaacccttcacaggctgcatacgccactttgtgattgatggacacccagtgagcttcagtaaagcagccctggtcagcggcgccgtaagcatcaactcctgtccagcagcctgacatgacagagcacagctgcccaaatacaaagttctttagagcactgaaagaaacacaaagccagccaggaggaacagtaactcttccttcgggtggaagctttcatcgagttgaacaggacttaaacgaatcatcagggaccggatatttcttatttctcatttggattcttaaccttgaatccaaagtgtctgcaatggacaacaattgaaggagtggcaaacttacttgtattgagagcacacgcaattcctactggtgaaattactgtttctgtttctaataaaatagaagggattccaaataaacacttgcacacatttttgaagtgcggctagattctcagattcacctttcttccagggaagataactttcaatctatataaaaatctctgtcctaaaactacctttctttattttgaagagacttactaacttacatataatctaaattagatgatagatttgtttttagcccttttgtttggtctatcagtataagaagaatattttaggtttatagctgaagttatcaaggtttaataaagtaaatttctaacagaatactagaaaaatgcagtataatttaattttttctaaataagaaacaaaggaaatcaactactttttccccttccttatctccttaaaagaaaaataaaattgtacatgaga

SEQ ID NO: 2070 - DNA, 6411 bp, Homo sapiens
agaaggtaaaaagggagtggtgagaatgaatgtgagaaggaagccaggacagcgcagtccccagtcccgaacggccagggagaggaggtggcctagcgctggcggggctcaccccaatccgtctgccttttgatgccgtactctgctggttgcgcagccacctcgggatactgcacacggagaggagggaaaataagcgaggcaccgccgcaccacgcgggagacctacggagacccacagcgcccgagccctggaagagcactactggatgtcagcggagaaatggctttgagctcagcctggcgctcggttctgcctctgtggctcctctggagcgctgcctgctcccgcgccgcgtccggggacgacaacgcttttccttttgacattgaagggagctcagcggttggcaggcaagacccgcctgagacgagcgaaccccgcgtggctctgggacgcctgccgcctgcggccgagaaatgcaatgctggattctttcacaccctgtcgggagaatgtgtgccctgcgactgtaatggcaattccaacgagtgtttggacggctcaggatactgtgtgcactgccagcggaacacaacaggagagcactgtgaaaagtgtctggatggttatatcggagattccatcaggggagcaccccaattctgccagccgtgcccctgtcccctgccccacttggccaattttgcagaatcctgctataggaaaaatggagctgttcggtgcatttgtaacgaaaattatgctggacctaactgtgaaagatgtgctcccggttactatggaaaccccttactcattggaagcacctgtaagaaatgtgactgcagtggaaattcagatcccaacctgatctttgaagattgtgatgaagtcactggccagtgtaggaattgcttacgcaacaccaccggattcaagtgtgaacgttgcgctcctggctactatggggacgccaggatagccaagaactgtgcagtgtgcaactgcgggggaggcccatgtgacagtgtaaccggagaatgcttggaagaaggttttgaaccccctacaggctgtgataagtgcgtctgggacctgactgatgacctgcggttagcagcgctctccatcgaggaaggcaaatccggggtgctgagcgtatcctctggggccgccgctcataggcacgtgaatgaaatcaacgccaccatctacctcctcaaaacaaaattgtcagaaagagaaaaccaatacgccctaagaaagatacaaatcaacaatgctgagaacacgatgaaaagccttctgtctgacgtagaggaattagttgaaaaggaaaatcaagcctccagaaaaggacaacttgttcagaaggaaagcatggacaccattaaccacgcaagtcagctggtagagcaagcccatgatatgagggataaaatccaagagatcaacaacaagatgctctattatggggaagagcatgaacttagccccaaggaaatctctgagaagctggtgttggcccagaagatgcttgaagagattagaagccgtcaaccatttttcacccaacgggagctcgtggatgaggaggcagatgaggcttacgaactactgagccaggctgagagctggcagcggctgcacaatgagacccgcactctgtttcctgtcgtcctggagcagctggatgactacaatgctaagttgtcagatctccaggaagcacttgaccaggcccttaaccatgtcagggatgccgaagacatgaacagggccacagcagccaggcagcgggaccatgagaaacaacaggaaagagtgagggaacaaatggaagtggtgaacatgtctctgagcacatctgcggactctctgacaacacctcgtctaactctttcagaacttgatgatataataaagaatgcgtcagggatttatgcagaaatagatggagccaaaagtgaactacaagtaaaactatctaacctaagtaacctcagccatgatttagtccaagaagctattgaccatgcacaggaccttcaacaagaagctaatgaattgagcaggaagttgcacagttcagatatgaacgggctggtacagaaggctttggatgcatcaaatgtctatgaaaatattgttaattatgttagtgaagccaatgaaacagcagaatttgctttgaacaccactgaccgaatttatgatgcggtgagtgggattgatactcaaatcatttaccataaagatgaaagtgagaacctcctcaatcaagccagagaactgcaagcaaaggcagagtctagcagtgatgaagcagtggctgacactagcaggcgtgtgggtggagccctagcaaggaaaagtgcccttaaaaccagactcagtgatgccgttaagcaactacaagcagcagagagaggggatgcccagcagcgcctggggcagtctagactgatcaccgaggaagccaacaggacgacgatggaggtgcagcaggccactgcccccatggccaacaatctaaccaactggtcacagaatcttcaacattttgactcttctgcttacaacactgcagtgaactctgctagggatgcagtaagaaatctgaccgaggttgtccctcagctcctggatcagcttcgtacggttgagcagaagcgacctgcaagcaacgtttctgccagcatccagaggatccgagagctcattgctcagaccagaagtgttgccagcaagatccaagtctccatgatgtttgatggccagtcagctgtggaagtgcactcgagaaccagtatggatgacttaaaggccttcacgtctctgagcctgtacatgaaaccccctgtgaagcggccggaactgaccgagactgcagatcagtttatcctgtacctcggaagcaaaaacgccaaaaaagagtatatgggtcttgcaatcaaaaatgataatctggtatacgtctataatttgggaactaaagatgtggagattcccctggactccaagcccgtcagttcctggcctgcttacttcagcattgtcaagattgaaagggtgggaaaacatggaaaggtgtttttaacagtcccgagtctaagtagcacagcagaggaaaagttcattaaaaagggggaattttcgggagatgactctctgctggacctggaccctgaggacacagtgttttatgttggtggagtgccttccaacttcaagctccctaccagcttaaacctgcctggctttgttggctgcctggaactggccactttgaataatgatgtgatcagcttgtacaactttaagcacatctataatatggacccctccacatcagtgccatgtgcccgagataagctggccttcactcagagtcgggctgccagttacttcttcgatggctccggttatgccgtggtgagagacatcacaaggagagggaaatttggtcaggtgactcgctttgacatagaagttcgaacaccagctgacaacggccttattctcctgatggtcaatggaagtatgtttttcagactggaaatgcgcaatggttacctacatgtgttctatgattttggattcagcagtggccctgtgcatcttgaagatacgttaaagaaagctcaaattaatgatgcaaaataccatgagatctcaatcatttaccacaatgataagaaaatgatcttggtagttgacagaaggcatgtcaagagcatggataatgaaaagatgaaaataccttttacagatatatacattggaggagctcctccagaaatcttacaatccagggccctcagagcacaccttcccctagatatcaacttcagaggatgcatgaagggcttccagttccaaaagaaggacttcaatttactggagcagacagaaaccctgggagttggttatggatgcccagaagactcacttatatctcgcagagcatatttcaatggacagagcttcattgcttcaattcagaaaatatctttctttgatggctttgaaggaggttttaatttccgaacattacaaccaaatgggttactattctattatgcttcagggtcagacgtgttctccatctcactggataatggtactgtcatcatggatgtaaagggaatcaaagttcagtcagtagataagcagtacaatgatgggctgtcccacttcgtcattagctctgtctcacccacaagatatgaactgatagtagataaaagcagagttgggagtaagaatcctaccaaagggaaaatagaacagacacaagcaagtgaaaagaagttttacttcggtggctcaccaatcagtgctcagtatgctaatttcactggctgcataagtaatgcctactttaccagggtggatagagatgtggaggttgaagatttccaacggtatactgaaaaggtccacacttctctttatgagtgtcccattgagtcttcaccattgtttctcctccataaaaaaggaaaaaatttatccaagcctaaagcaagtcagaataaaaagggagggaaaagtaaagatgcaccttcatgggatcctgttgctctgaaactcccagagcggaatactccaagaaactctcattgccacctttccaacagccctagagcaatagagcacgcctatcaatatggaggaacagccaacagccgccaagagtttgaacacttaaaaggagattttggtgccaaatctcagttttccattcgtctgagaactcgttcctcccatggcatgatcttctatgtctcagatcaagaagagaatgacttcatgactctatttttggcccatggccgcttggtttacatgtttaatgttggtcacaaaaaactgaagattagaagccaggagaaatacaatgatggcctgtggcatgatgtgatatttattcgagaaaggagcagtggccgactggtaattgatggtctccgagtcctagaagaaagtcttcctcctactgaagctacctggaaaatcaagggtcccatttatttgggaggtgtggctcctggaaaggctgtgaaaaatgttcagattaactccatctacagttttagtggctgtctcagcaatctccagctcaatggggcctccatcacctctgcttctcagacattcagtgtgaccccttgctttgaaggccccatggaaacaggaacttacttttcaacagaaggaggatacgtggttctagatgaatctttcaatattggattgaagtttgaaattgcatttgaagtccgtcccagaagcagttccggaaccctggtccacggccacagtgtcaatggggagtacctaaatgttcacatgaaaaatggacaggtcatagtgaaagtcaataatggcatcagagatttttccacctcagtaacacccaagcagagtctctgtgatggcagatggcacagaattacagttattagagattctaatgtggttcagttggatgtggactctgaagtgaaccatgtggttggacccctgaatccaaaaccaattgatcacagggagcctgtgtttgttggaggtgttccagaatctctactgacaccacgcttggcccccagcaaacccttcacaggctgcatacgccactttgtgattgatggacacccagtgagcttcagtaaagcagccctggtcagcggcgccgtaagcatcaactcctgtccagcagcctgacatgacagagcacagctgcccaaatacaaagttctttagagcactgaaagaaacacaaagccagccaggaggaacagtaactcttccttcgggtggaagctttcatcgagttgaacaggacttaaacgaatcatcagggaccggatatttcttatttctcatttggattcttaaccttgaatccaaagtgtctgcaatggacaacaattgaaggagtggcaaacttacttgtattgagagcacacgcaattcctactggtgaaattactgtttctgtttctaataaaatagaagggattccaaataaacacttgcacacatttttgaagtgcggctagattctcagattcacctttcttccagggaagataactttcaatctatataaaaatctctgtcctaaaactacctttctttattttgaagagacttactaacttacatataatctaaattagatgatagatttgtttttagcccttttgtttggtctatcagtataagaagaatattttaggtttatagctgaagttatcaaggtttaataaagtaaatttctaacagaatactagaaaaatgcagtataatttaattttttctaaataagaaacaaaggaaatcaactactttttccccttccttatctccttaaaagaaaaataaaattgtacatgaga

SEQ ID NO: 2071 - DNA, 6411 bp, Homo sapiens; identical to SEQ ID NO: 2070

SEQ ID NO: 2072 - DNA, 6456 bp, Homo sapiens
tgggagtagaaggtaaaaagggagtggtgagaatgaatgtgagaaggaagccaggacagcgcagtccccagtcccgaacggccagggagaggaggtggcctagcgctggcggggctcaccccaatccgtctgccttttgatgccgtactgtaagctccgtccatctctgctggttgcgcagccacctcgggatactgcacacggagaggagggaaaataagcgaggcaccgccgcaccacgcgggagacctacggagacccacagcgcccgagccctggaagagcactactggatgtcagcggagaaatggctttgagctcagcctggcgctcggttctgcctctgtggctcctctggagcgctgcctgctcccgcgccgcgtccggggacgacaacgcttttccttttgacattgaagggagctcagcggttggcaggcaagacccgcctgagacgagcgaaccccgcgtggctctgggacgcctgccgcctgcggccgagaaatgcaatgctggattctttcacaccctgtcgggagaatgtgtgccctgcgactgtaatggcaattccaacgagtgtttggacggctcaggatactgtgtgcactgccagcggaacacaacaggagagcactgtgaaaagtgtctggatggttatatcggagattccatcaggggagcaccccaattctgccagccgtgcccctgtcccctgccccacttggccaattttgcagaatcctgctataggaaaaatggagctgttcggtgcatttgtaacgaaaattatgctggacctaactgtgaaagatgtgctcccggttactatggaaaccccttactcattggaagcacctgtaagaaatgtgactgcagtggaaattcagatcccaacctgatctttgaagattgtgatgaagtcactggccagtgtaggaattgcttacgcaacaccaccggattcaagtgtgaacgttgcgctcctggctactatggggacgccaggatagccaagaactgtgcagtgtgcaactgcgggggaggcccatgtgacagtgtaaccggagaatgcttggaagaaggttttgaaccccctacaggcatggactgcccaaccataagctgtgataagtgcgtctgggacctgactgatgacctgcggttagcagcgctctccatcgaggaaggcaaatccggggtgctgagcgtatcctctggggccgccgctcataggcacgtgaatgaaatcaacgccaccatctacctcctcaaaacaaaattgtcagaaagagaaaaccaatacgccctaagaaagatacaaatcaacaatgctgagaacacgatgaaaagccttctgtctgacgtagaggaattagttgaaaaggaaaatcaagcctccagaaaaggacaacttgttcagaaggaaagcatggacaccattaaccacgcaagtcagctggtagagcaagcccatgatatgagggataaaatccaagagatcaacaacaagatgctctattatggggaagagcatgaacttagccccaaggaaatctctgagaagctggtgttggcccagaagatgcttgaagagattagaagccgtcaaccatttttcacccaacgggagctcgtggatgaggaggcagatgaggcttacgaactactgagccaggctgagagctggcagcggctgcacaatgagacccgcactctgtttcctgtcgtcctggagcagctggatgactacaatgctaagttgtcagatctccaggaagcacttgaccaggcccttaaccatgtcagggatgccgaagacatgaacagggccacagcagccaggcagcgggaccatgagaaacaacaggaaagagtgagggaacaaatggaagtggtgaacatgtctctgagcacatctgcggactctctgacaacacctcgtctaactctttcagaacttgatgatataataaagaatgcgtcagggatttatgcagaaatagatggagccaaaagtgaactacaagtaaaactatctaacctaagtaacctcagccatgatttagtccaagaagctattgaccatgcacaggaccttcaacaagaagctaatgaattgagcaggaagttgcacagttcagatatgaacgggctggtacagaaggctttggatgcatcaaatgtctatgaaaatattgttaattatgttagtgaagccaatgaaacagcagaatttgctttgaacaccactgaccgaatttatgatgcggtgagtgggattgatactcaaatcatttaccataaagatgaaagtgagaacctcctcaatcaagccagagaactgcaagcaaaggcagagtctagcagtgatgaagcagtggctgacactagcaggcgtgtgggtggagccctagcaaggaaaagtgcccttaaaaccagactcagtgatgccgttaagcaactacaagcagcagagagaggggatgcccagcagcgcctggggcagtctagactgatcaccgaggaagccaacaggacgacgatggaggtgcagcaggccactgcccccatggccaacaatctaaccaactggtcacagaatcttcaacattttgactcttctgcttacaacactgcagtgaactctgctagggatgcagtaagaaatctgaccgaggttgtccctcagctcctggatcagcttcgtacggttgagcagaagcgacctgcaagcaacgtttctgccagcatccagaggatccgagagctcattgctcagaccagaagtgttgccagcaagatccaagtctccatgatgtttgatggccagtcagctgtggaagtgcactcgagaaccagtatggatgacttaaaggccttcacgtctctgagcctgtacatgaaaccccctgtgaagcggccggaactgaccgagactgcagatcagtttatcctgtacctcggaagcaaaaacgccaaaaaagagtatatgggtcttgcaatcaaaaatgataatctggtatacgtctataatttgggaactaaagatgtggagattcccctggactccaagcccgtcagttcctggcctgcttacttcagcattgtcaagattgaaagggtgggaaaacatggaaaggtgtttttaacagtcccgagtctaagtagcacagcagaggaaaagttcattaaaaagggggaattttcgggagatgactctctgctggacctggaccctgaggacacagtgttttatgttggtggagtgccttccaacttcaagctccctaccagcttaaacctgcctggctttgttggctgcctggaactggccactttgaataatgatgtgatcagcttgtacaactttaagcacatctataatatggacccctccacatcagtgccatgtgcccgagataagctggccttcactcagagtcgggctgccagttacttcttcgatggctccggttatgccgtggtgagagacatcacaaggagagggaaatttggtcaggtgactcgctttgacatagaagttcgaacaccagctgacaacggccttattctcctgatggtcaatggaagtatgtttttcagactggaaatgcgcaatggttacctacatgtgttctatgattttggattcagcagtggccctgtgcatcttgaagatacgttaaagaaagctcaaattaatgatgcaaaataccatgagatctcaatcatttaccacaatgataagaaaatgatcttggtagttgacagaaggcatgtcaagagcatggataatgaaaagatgaaaataccttttacagatatatacattggaggagctcctccagaaatcttacaatccagggccctcagagcacaccttcccctagatatcaacttcagaggatgcatgaagggcttccagttccaaaagaaggacttcaatttactggagcagacagaaaccctgggagttggttatggatgcccagaagactcacttatatctcgcagagcatatttcaatggacagagcttcattgcttcaattcagaaaatatctttctttgatggctttgaaggaggttttaatttccgaacattacaaccaaatgggttactattctattatgcttcagggtcagacgtgttctccatctcactggataatggtactgtcatcatggatgtaaagggaatcaaagttcagtcagtagataagcagtacaatgatgggctgtcccacttcgtcattagctctgtctcacccacaagatatgaactgatagtagataaaagcagagttgggagtaagaatcctaccaaagggaaaatagaacagacacaagcaagtgaaaagaagttttacttcggtggctcaccaatcagtgctcagtatgctaatttcactggctgcataagtaatgcctactttaccagggtggatagagatgtggaggttgaagatttccaacggtatactgaaaaggtccacacttctctttatgagtgtcccattgagtcttcaccattgtttctcctccataaaaaaggaaaaaatttatccaagcctaaagcaagtcagaataaaaagggagggaaaagtaaagatgcaccttcatgggatcctgttgctctgaaactcccagagcggaatactccaagaaactctcattgccacctttccaacagccctagagcaatagagcacgcctatcaatatggaggaacagccaacagccgccaagagtttgaacacttaaaaggagattttggtgccaaatctcagttttccattcgtctgagaactcgttcctcccatggcatgatcttctatgtctcagatcaagaagagaatgacttcatgactctatttttggcccatggccgcttggtttacatgtttaatgttggtcacaaaaaactgaagattagaagccaggagaaatacaatgatggcctgtggcatgatgtgatatttattcgagaaaggagcagtggccgactggtaattgatggtctccgagtcctagaagaaagtcttcctcctactgaagctacctggaaaatcaagggtcccatttatttgggaggtgtggctcctggaaaggctgtgaaaaatgttcagattaactccatctacagttttagtggctgtctcagcaatctccagctcaatggggcctccatcacctctgcttctcagacattcagtgtgaccccttgctttgaaggccccatggaaacaggaacttacttttcaacagaaggaggatacgtggttctagatgaatctttcaatattggattgaagtttgaaattgcatttgaagtccgtcccagaagcagttccggaaccctggtccacggccacagtgtcaatggggagtacctaaatgttcacatgaaaaatggacaggtcatagtgaaagtcaataatggcatcagagatttttccacctcagtaacacccaagcagagtctctgtgatggcagatggcacagaattacagttattagagattctaatgtggttcagttggatgtggactctgaagtgaaccatgtggttggacccctgaatccaaaaccaattgatcacagggagcctgtgtttgttggaggtgttccagaatctctactgacaccacgcttggcccccagcaaacccttcacaggctgcatacgccactttgtgattgatggacacccagtgagcttcagtaaagcagccctggtcagcggcgccgtaagcatcaactcctgtccagcagcctgacatgacagagcacagctgcccaaatacaaagttctttagagcactgaaagaaacacaaagccagccaggaggaacagtaactcttccttcgggtggaagctttcatcgagttgaacaggacttaaacgaatcatcagggaccggatatttcttatttctcatttggattcttaaccttgaatccaaagtgtctgcaatggacaacaattgaaggagtggcaaacttacttgtattgagagcacacgcaattcctactggtgaaattactgtttctgtttctaataaaatagaagggattccaaataaacacttgcacacatttttgaagtgcggctagattctcagattcacctttcttccagggaagataactttcaatctatataaaaatctctgtcctaaaactacctttctttattttgaagagacttactaacttacatataatctaaattagatgatagatttgtttttagcccttttgtttggtctatcagtataagaagaatattttaggtttatagctgaagttatcaaggtttaataaagtaaatttctaacagaatactagaaaaatgcagtataatttaattttttctaaataagaaacaaaggaaatcaactactttttccccttccttatctccttaaaagaaaaataaaattgtacatgaga

SEQ ID NO: 2073 - DNA, 2751 bp, Homo sapiens
ttcggcacgaggaggaaggggggtgggcgctctttctttttctcttagaagagggtttagcacaggttttttcgttctcacttccacaccaccttaccgcctcccgaccccccctctccccctccccacctatcgtcatgacggcctctccggattacttggtggtgctttttgggatcactgctggggccaccggggccaagctaggctcggatgagaaggagttgatcctgctgttctggaaagtcgtggatctggccaacaagaaggtgggacagttgcacgaagtgctagttagaccggatcagttggaactgacggaggactgcaaagaagaaactaaaatagacgtcgaaagcctgtcctcggcgtcgcagctggaccaagccctccgacagtttaaccagtcagtgagcaatgaactgaatattggagtagggacttccttctgtctctgtactgatgggcagcttcatgtcaggcaaatcctgcatcctgaggcttccaagaagaatgtactattacctgaatgcttctattccttttttgatcttcgaaaagaattcaagaaatgttgccctggttcacctgatattgacaaactggacgttgccacaatgacagagtatttaaattttgagaagagtagttcagtctctcgatatggagcctctcaagttgaagatatggggaatataattttagcaatgatttcagagccttataatcacaggttttcagatccagagagagtgaattacaagtttgaaagtggaacttgcagcaagatggaacttattgatgataacaccgtagtcagggcacgaggtttaccatggcagtcttcagatcaagatattgcaagattcttcaaaggactcaatattgccaagggaggtgcagcactttgtctgaatgctcagggtcgaaggaacggagaagctctggttaggtttgtaagtgaggagcaccgagacctagcactacagaggcacaaacatcacatggggacccggtatattgaggtttacaaagcaacaggtgaagatttccttaaaattgctggtggtacttccaatgaggtagcccagtttctctccaaggaaaatcaagtcattgttcgcatgcgggggctccctttcacggccacagctgaagaagtggtggccttctttggacagcattgccctattactgggggaaaggaaggcatcctctttgtcacctacccagatggtaggccaacaggggacgcttttgtcctctttgcctgtgaggaatatgcacagaatgcgttgaggaagcataaagacttgttgggtaaaagatacattgaactcttcaggagcacagcagctgaagttcagcaggtgctgaatcgattctcctcggcccctctcattccacttccaacccctcccattattccagtactacctcagcaatttgtgccccctacaaatgttagagactgtatacgccttcgaggtcttccctatgcagccacaattgaggacatcctggatttcctgggggagttcgccacagatattcgtactcatggggttcacatggttttgaatcaccagggccgcccatcaggagatgcctttatccagatgaagtctgcggacagagcatttatggctgcacagaagtgtcataaaaaaaacatgaaggacagatatgttgaagtctttcagtgttcagctgaggagatgaactttgtgttaatggggggcactttaaatcgaaatggcttatccccaccgccatgtaagttaccatgcctgtctcctccctcctacacatttccagctcctgctgcagttattcctacagaagctgccatttaccagccctctgtgattttgaatccacgagcactgcagccctccacagcgtactacccagcaggcactcagctcttcatgaactacacagcgtactatcccagccccccaggttcgcctaatagtcttggctacttccctacagctgctaatcttagcggtgtccctccacagcctggcacggtggtcagaatgcagggcctggcctacaatactggagttaaggaaattcttaacttcttccaaggttaccagtatgcaaccgaggatggacttatacacacaaatgaccaggccaggactctacccaaagaatgggtttgtatttaagggccccagcagttagaacatcctcagaaaagaagtgtttgaaagatgtatggtgatcttgaaacctccagacacaagaaaacttctagcaaattcaggggaagtttgtctacactcaggctgcagtattttcagcaaacttgattggacaaacgggcctgtgccttatcttttggtggagtgaaaaaatttgagctagtgaagccaaatcgtaacttacagcaagcagcatgcagcatacctggctctttgctgattgcaaataggcatttaaaatgtgaatttggaatcagatgtctccattacttccagttaaagtggcatcataggtgtttcctaagttttaagtcttggataaaaactccaccagtgtctaccatctccaccatgaactctgttaaggaagcttcatttttgtatattcccgctcttttctcttcatttccctgtcttctgcataatcatgccttcttgctaagtaattcaagcataagatcttggaataataaaatcacaatcttaggagaaagaataaaattgttattttcccaaaaaaaaaaaaaaaaaa

SEQ ID NO: 2074 - DNA, 3547 bp, Homo sapiens
ctgtgtgaaaactgaaagggctgctagtgctgcctgaaaatacagatgttctaaaatggttatggctggaaaaaattagtattaacagccagaaaatatgaagtataacagcacaaatgtatcacagcttcagaattgttttgaatggaatgcatactggagcacaaacattgtaatccactgccttaaaacaagaggaatttttttcatgagacttgtacataggatctaatatagaaacaggaccaacttttaaaaataaatctacttttacattaaattttaaatttttccattgtaaaatatgcttatattcaatttttaggttcctaattgtgagagaaacattgaaccaaattcacctagttaacattatctaccttgtccttcctcagaatgtactattacctgaatgcttctattccttttttgatcttcgaaaagaattcaagaaatgttgccctggttcacctgatattgacaaactggacgttgccacaatgacagagtatttaaattttgagaagagtagttcagtctctcgatatggagcctctcaagttgaagatatggggaatataattttagcaatgatttcagagccttataatcacaggttttcagatccagagagagtgaattacaagtttgaaagtggaacttgcagcaagatggaacttattgatgataacaccgtagtcagggcacgaggtttaccatggcagtcttcagatcaagatattgcaagattcttcaaaggactcaatattgccaagggaggtgcagcactttgtctgaatgctcagggtcgaaggaacggagaagctctggttaggtttgtaagtgaggagcaccgagacctagcactacagaggcacaaacatcacatggggacccggtatattgaggtttacaaagcaacaggtgaagatttccttaaaattgctggtggtacttccaatgaggtagcccagtttctctccaaggaaaatcaagtcattgtccgcatgcgggggctccctttcacggccacagctgaagaagtggtggccttctttggacagcattgccctattactgggggaaaggaaggcatcctctttgtcacctacccagatggtaggccaacaggggacgcttttgtcctctttgcctgtgaggaatatgcacagaatgcgttgaggaagcataaagacttgttgggtaaaagatacattgaactcttcaggagcacagcagctgaagttcagcaggtgctgaatcgattctcctcggcccctctcattccacttccaacccctcccattattccagtactacctcagcaatttgtgccccctacaaatgttagagactgtatacgccttcgaggtcttccctatgcagccacaattgaggacatcctggatttcctgggggagttcgccacagatattcgtactcatggggttcacatggttttgaatcaccagggccgcccatcaggagatgcctttatccagatgaagtctgcggacagagcatttatggctgcacagaagtgtcataaaaaaaacatgaaggacagatatgttgaagtctttcagtgttcagctgaggagatgaactttgtgttaatggggggcactttaaatcgaaatggcttatccccaccgccatgtaagttaccatgcctgtctcctccctcctacacatttccagctcctgctgcagttattcctacagaagctgccatttaccagccctctgtgattttgaatccacgagcactgcagccctccacagcgtactacccagcaggcactcagctcttcatgaattacacagcgtactatcccagccccccaggttcgcctaatagtcttggctacttccctacagctgctaatcttagcggtgtccctccacagcctggcacggtggtcagaatgcagggcctggcctacaatactggagttaaggaaattcttaacttcttccaaggttaccagtgtttgaaagatgtatggtgatcttgaaacctccagacacaagaaaacttctagcaaattcaggggaagtttgtctacactcaggctgcagtattttcagcaaacttgattggacaaacgggcctgtgccttatcttttggtggagtgaaaaaatttgagccagtgaagccaaatcgtaacttacagcaagcagcatgcagcatacctggctctttgctgattgcaaataggcatttaaaatgtgaatttggaatcagatgtctccattacttccagttaaagtggcatcataggcgtttcctaagttttaagtcttggataaaaactccaccagtgtctaccatctccaccatgaactctgttaaggaagcttcattttcgtatattcccgctcttttctcttcatttccctgtcttctgcataatcatgccttcttgctaagtaattcaagcataagatcttggaataataaaatcacaatcttaggagaaagaataaaattgttattttcccagtctcttggccatgatgatatcttatgattaaaaacaaattaaattttaaaacacctgaagatatattagaagaaattgtgcaccctccacaaaacatacaaagtttaaaagtttggatctttttctcagcaggtatcagttgtaaataatgaattaggggccaaaatgcaaaacgaaaaatgaagcagctacatgtagttagtaatttctagtttgaactgtaattgaatattgtggcttcatatgtattattttatattgtacttttttcattattgatggtttggactttaataagagaaattccatagtttttaatatcccagaagtgagacaatttgaacagtgtattctagaaaacaatacactaactgaacagaagtgaatgcttatatatattatgatagccttaaacctttttcctctaatgccttaactgtcaaataattataaccttttaaagcataggactatagtcagcatgctagactgagaggtaaacactgatgcaattagaacaggtactgatgctgtcagtgtttaacactatgtttagctgtgtttatgctataaaagtgcaatattagacactagctagtactgctgcctcatgtaactccaaagaaaacaggatttcattaagtgcattgaatgtggctatttctctaagttactcatattgtcctttgcttgaatgcaatgccgtgcagatttatgtggctgctatttttattttctgtgcattactttaacaccttaaagggagaagcaaacatttccttcttcagctgactggcaatggccctttaactgcaataggaagaaaaaaaaaaaggtttgtgtgaaaattggtgataactggcacttaagatcgaaaagaaatttctgtatacttgatgccttaagatgcccaaagctgcccaaagctctgaaagactttaagataggcagtaatgcttactacaatactactgagtttttgtagagttaacatttgataataaaacttgcctgtttaatctcaatgtttgcgattttt

SEQ ID NO: 2075 - DNA, 3097 bp, Homo sapiens
cccctccccacctatcgtcatgacggcctctccggattacttggtggtgctttttgggatcactgctggggccaccggggccaagctaggctcggatgagaaggagttgatcctgctgttctggaaagtcgtggatctggccaacaagaaggtgggacagttgcacgaagtgctagttagaccggatcagttggaactgacggaggactgcaaagaagaaactaaaatagacgtcgaaagcctgtcctcggcgtcgcagctggaccaagccctccgacagtttaaccagtcagtgagcaatgaactgaatattggagtagggacttccttctgtctctgtactgatgggcagcttcatgtcaggcaaatcctgcatcctgaggcttccaagaagaatgtactattacctgaatgcttctattccttttttgatcttcgaaaagaattcaagaaatgttgccctggttcacctgatattgacaaactggacgttgccacaatgacagagtatttaaattttgagaagagtagttcagtctctcgatatggagcctctcaagttgaagatatggggaatataattttagcaatgatttcagagccttataatcacaggttttcagatccagagagagtgaattacaagtttgaaagtggaacttgcagcaagatggaacttattgatgataacaccgtagtcagggcacgaggtttaccatggcagtcttcagatcaagatattgcaagattcttcaaaggactcaatattgccaagggaggtgcagcactttgtctgaatgctcagggtcgaaggaacggagaagctctggttaggtttgtaagtgaggagcaccgagacctagcactacagaggcacaaacatcacatggggacccggtatattgaggtttacaaagcaacaggtgaagatttccttaaaattgctggtggtacttccaatgaggtagcccagtttctctccaaggaaaatcaagtcattgtccgcatgcgggggctccctttcacggccacagctgaagaagtggtggccttctttggacagcattgccctattactgggggaaaggaaggcatcctctttgtcacctacccagatggtaggccaacaggggacgcttttgtcctctttgcctgtgaggaatatgcacagaatgcgttgaggaagcataaagacttgttgggtaaaagatacattgaactcttcaggagcacagcagctgaagttcagcaggtgctgaatcgattctcctcggcccctctcattccacttccaacccctcccattattccagtactacctcagcaatttgtgccccctacaaatgttagagactgtatacgccttcgaggtcttccctatgcagccacaattgaggacatcctggatttcctgggggagttcgccacagatattcgtactcatggggttcacatggttttgaatcaccagggccgcccatcaggagatgcctttatccagatgaagtctgcggacagagcatttatggctgcacagaagtgtcataaaaaaaacatgaaggacagatatgttgaagtctttcagtgttcagctgaggagatgaactttgtgttaatggggggcactttaaatcgaaatggcttatccccaccgccatgtaagttaccatgcctgtctcctccctcctacacatttccagctcctgctgcagttattcctacagaagctgccatttaccagccctctgtgattttgaatccacgagcactgcagccctccacagcgtactacccagcaggcactcagctcttcatgaattacacagcgtactatcccagccccccaggttcgcctaatagtcttggctacttccctacagctgctaatcttagcggtgtccctccacagcctggcacggtggtcagaatgcagggcctggcctacaatactggagttaaggaaattcttaacttcttccaaggttaccagtatgcaaccgaggatggacttatacacacaaatgaccaggccaggactctacccaaagaatgggtttgtatttaagggccccagcagttagaacatcctcagaaaagaagtgtttgaaagatgtatggtgatcttgaaacctccagacacaagaaaacttctagcaaattcaggggaagtttgtctacactcaggctgcagtattttcagcaaacttgattggacaaacgggcctgtgccttatcttttggtggagtgaaaaaatttgagccagtgaagccaaatcgtaacttacagcaagcagcatgcagcatacctggctctttgctgattgcaaataggcatttaaaatgtgaatttggaatcagatgtctccattacttccagttaaagtggcatcataggcgtttcctaagttttaagtcttgcttcattttcgtatattcccgctcttttctcttcatttccctgtcttctgcataatcatgccttcttgctaagtaattcaagcataagatcttggaataataaaatcacaatcttaggagaaagaataaaattgttattttcccagtctcttggccatgatgatatcttatgattaaaaacaaattaaattttaaaacacctgaagatatattagaagaaattgtgcaccctccacaaaacatacaaagtttaaaagtttggatctttttctcagcaggtatcagttgtaaataatgaattaggggccaaaatgcaaaacgaaaaatgaagcagctacatgtagttagtaatttctagtttgaactgtaattgaatattgtggcttcatatgtattattttatattgtacttttttcattattgatggtttggactttaataagagaaattccatagtttttaatatcccagaagtgagacaatttgaacagtgtattctagaaaacaatacactaactgaacagaagtgaatgcttatatatattatgatagccttaaacctttttcctctaatgccttaactgtcaaataattataaccttttaaagcataggactatagtcagcatgctagactgagaggtaaacactgatgcaattagaacaggtactgatgctg

SEQ ID NO: 2076 - DNA, 2425 bp, Homo sapiens
tagcctcccgcccgccgcctctgtctccctctctccacaaactgcccaggagtgagtagctgctttcggtccgccggacacaccggacagatagacgtgcggacggcccaccaccccagcccgccaactagtcagcctgcgcctggcgcctcccctctccaggtccatccgccatgtggcccctgtggcgcctcgtgtctctgctggccctgagccaggccctgccctttgagcagagaggcttctgggacttcaccctggacgatgggccattcatgatgaacgatgaggaagcttcgggcgctgacacctcgggcgtcctggacccggactctgtcacacccacctacagcgccatgtgtcctttcggctgccactgccacctgcgggtggttcagtgctccgacctgggtctcgagttcatgctggtggtgggggtggggcccctaggtctcaagttcatgctggtgatgggggtggggcccctaggtctgaagtctgtgcccaaagagatctcccctgacaccacgctgctggacctgcagaacaacgacatctccgagctccgcaaggatgacttcaagggtctccagcacctctacgccctcgtcctggtgaacaacaagatctccaagatccatgagaaggccttcagcccactgcggaagctgcagaagctctacatctccaagaaccacctggtggagatcccgcccaacctacccagctccctggtggagctccgcatccacgacaaccgcatccgcaaggtgcccaagggagtgttcagtgggctccggaacatgaactgcatcgagatgggcgggaacccactggagaacagtggctttgaacctggagccttcgatggcctgaagctcaactacctgcgcatctcagaggccaagctgactggcatccccaaagacctccctgagaccctgaatgaactccacctagaccacaacaaaatccaggccatcgaactggaggacctgcttcgctactccaagctgtacaggctgggcctaggccacaaccagatcaggatgatcgagaacgggagcctgagcttcctgcccaccctccgggagctccacttggacaacaacaagttggccagggtgccctcagggctcccagacctcaagctcctccaggtggtctatctgcactccaacaacatcaccaaagtgggtgtcaacgacttctgtcccatgggcttcggggtgaagcgggcctactacaacggcatcagcctcttcaacaaccccgtgccctactgggaggtgcagccggccactttccgctgcgtcactgaccgcctggccatccagtttggcaactacaaaaagtagaggcagctgcagccaccgcggggcctcagtgggggtctctggggaacacagccagacatcctgatggggaggcagagccaggaagctaagccagggcccagctgcgtccaacccagccccccacctcgggtccctgaccccagctcgatgccccatcaccgcctctccctggctcccaagggtgcaggtgggcgcaaggcccggcccccatcacatgttcccttggcctcagagctgcccctgctctcccaccacagccacccagaggcaccccatgaagcttttttctcgttcactcccaaacccaagtgtccaaggctccagtcctaggagaacagtccctgggtcagcagccaggaggcggtccataagaatggggacagtgggctctgccagggctgccgcacctgtccagacacacatgttctgttcctcctcctcatgcatttccagcctttcaaccctccccgactctgcggctcccctcagcccccttgcaagttcatggcctgtccctcccagacccctgctccactggcccttcgaccagtcctcccttctgttctctctttccccgtccttcctctctctctctctctctctttctctctttctgtgtgtgtgtgtgtgtgtgtgtgtgtgtgtgtgtgtgtgtgtgtcttgtgcttcctcagacctttctcgcttctgagcttggtggcctgttccctccatctctccgaacctggcttcgcctgtccctttcactccacaccctctggccttctgccttgagctgggactgctttctgtctgtccggcctgcacccagcccctgcccacaaaaccccagggacagcggtctccccagcctgccctgctcaggccttgcccccaaacctgtactgtcccggaggaggttgggaggtggaggcccagcatcccgcgcagatacaccggttttcctagaagcccctcacccccactggcccactggtggctaggtctccccttatccttctggtccagcgcaaggaggggctgcttctgaggtcggtggctgtctttccattaaagaaacaccgtgc

SEQ ID NO: 2077 - DNA, 2347 bp, Homo sapiens
tagcctcccgcccgccgcctctgtctccctctctccacaaactgcccaggagtgagtagctgctttcggtccgccggacacaccggacagatagacgtgcggacggcccaccaccccagcccgccaactagtcagcctgcgcctggcgcctcccctctccaggtccatccgccatgtggcccctgtggcgcctcgtgtctctgctggccctgagccaggccctgccctttgagcagagaggcttctgggacttcaccctggacgatgggccattcatgatgaacgatgaggaagcttcgggcgctgacacctcgggcgtcctggacccggactctgtcacacccacctacagcgccatgtgtcctttcggctgccactgccacctgcgggtggttcagtgctccgacctgggtctgaagtctgtgcccaaagagatctcccctgacaccacgctgctggacctgcagaacaacgacatctccgagctccgcaaggatgacttcaagggtctccagcacctctacgccctcgtcctggtgaacaacaagatctccaagatccatgagaaggccttcagcccactgcggaagctgcagaagctctacatctccaagaaccacctggtggagatcccgcccaacctacccagctccctggtggagctccgcatccacgacaaccgcatccgcaaggtgcccaagggagtgttcagtgggctccggaacatgaactgcatcgagatgggcgggaacccactggagaacagtggctttgaacctggagccttcgatggcctgaagctcaactacctgcgcatctcagaggccaagctgactggcatccccaaagacctccctgagaccctgaatgaactccacctagaccacaacaaaatccaggccatcgaactggaggacctgcttcgctactccaagctgtacaggctgggcctaggccacaaccagatcaggatgatcgagaacgggagcctgagcttcctgcccaccctccgggagctccacttggacaacaacaagttggccagggtgccctcagggctcccagacctcaagctcctccaggtggtctatctgcactccaacaacatcaccaaagtgggtgtcaacgacttctgtcccatgggcttcggggtgaagcgggcctactacaacggcatcagcctcttcaacaaccccgtgccctactgggaggtgcagccggccactttccgctgcgtcactgaccgcctggccatccagtttggcaactacaaaaagtagaggcagctgcagccaccgcggggcctcagtgggggtctctggggaacacagccagacatcctgatggggaggcagagccaggaagctaagccagggcccagctgcgtccaacccagccccccacctcgggtccctgaccccagctcgatgccccatcaccgcctctccctggctcccaagggtgcaggtgggcgcaaggcccggcccccatcacatgttcccttggcctcagagctgcccctgctctcccaccacagccacccagaggcaccccatgaagcttttttctcgttcactcccaaacccaagtgtccaaggctccagtcctaggagaacagtccctgggtcagcagccaggaggcggtccataagaatggggacagtgggctctgccagggctgccgcacctgtccagacacacatgttctgttcctcctcctcatgcatttccagcctttcaaccctccccgactctgcggctcccctcagcccccttgcaagttcatggcctgtccctcccagacccctgctccactggcccttcgaccagtcctcccttctgttctctctttccccgtccttcctctctctctctctctctctttctctctttctgtgtgtgtgtgtgtgtgtgtgtgtgtgtgtgtgtgtgtgtgtgtcttgtgcttcctcagacctttctcgcttctgagcttggtggcctgttccctccatctctccgaacctggcttcgcctgtccctttcactccacaccctctggccttctgccttgagctgggactgctttctgtctgtccggcctgcacccagcccctgcccacaaaaccccagggacagcggtctccccagcctgccctgctcaggccttgcccccaaacctgtactgtcccggaggaggttgggaggtggaggcccagcatcccgcgcagatacaccggttttcctagaagcccctcacccccactggcccactggtggctaggtctccccttatccttctggtccagcgcaaggaggggctgcttctgaggtcggtggctgtctttccattaaagaaacaccgtgc

SEQ ID NO: 2078 - DNA, 2347 bp, Homo sapiens; identical to SEQ ID NO: 2077

SEQ ID NO: 2079 - DNA, 2425 bp, Homo sapiens; identical to SEQ ID NO: 2076

SEQ ID NO: 2080 - DNA, 2430 bp, Homo sapiens
tagcctcccgcccgccgcctctgtctccctctctccacaaactgcccaggagtgagtagctgctttcggtccgccggacacaccggacagatagacgtgcggacggcccaccaccccagcccgccaactagtcagcctgcgcctggcgcctcccctctccaggtccatccgccatgtggcccctgtggcgcctcgtgtctctgctggccctgagccaggccctgccctttgagcagagaggcttctgggacttcaccctggacgatgggccattcatgatgaacgatgaggaagcttcgggcgctgacacctcgggcgtcctggacccggactctgtcacacccacctacagcgccatgtgtcctttcggctgccactgccacctgcgggtggttcagtgctccgacctgggtctgaagtctgtgcccaaagagatctcccctgacaccacgctgctggacctgcagaacaacgacatctccgagctccgcaaggatgacttcaagggtctccagcacctctacgtaaggagctgggaggaaccagcaggcctacagcagagggcaggggtccgggccctcgtcctggtgaacaacaagatctccaagatccatgagaaggccttcagcccactgcggaagctgcagaagctctacatctccaagaaccacctggtggagatcccgcccaacctacccagctccctggtggagctccgcatccacgacaaccgcatccgcaaggtgcccaagggagtgttcagtgggctccggaacatgaactgcatcgagatgggcgggaacccactggagaacagtggctttgaacctggagccttcgatggcctgaagctcaactacctgcgcatctcagaggccaagctgactggcatccccaaagacctccctgagaccctgaatgaactccacctagaccacaacaaaatccaggccatcgaactggaggacctgcttcgctactccaagctgtacaggctgggcctaggccacaaccagatcaggatgatcgagaacgggagcctgagcttcctgcccaccctccgggagctccacttggacaacaacaagttggccagggtgccctcagggctcccagacctcaagctcctccaggtggtctatctgcactccaacaacatcaccaaagtgggtgtcaacgacttctgtcccatgggcttcggggtgaagcgggcctactacaacggcatcagcctcttcaacaaccccgtgccctactgggaggtgcagccggccactttccgctgcgtcactgaccgcctggccatccagtttggcaactacaaaaagtagaggcagctgcagccaccgcggggcctcagtgggggtctctggggaacacagccagacatcctgatggggaggcagagccaggaagctaagccagggcccagctgcgtccaacccagccccccacctcgggtccctgaccccagctcgatgccccatcaccgcctctccctggctcccaagggtgcaggtgggcgcaaggcccggcccccatcacatgttcccttggcctcagagctgcccctgctctcccaccacagccacccagaggcaccccatgaagcttttttctcgttcactcccaaacccaagtgtccaaggctccagtcctaggagaacagtccctgggtcagcagccaggaggcggtccataagaatggggacagtgggctctgccagggctgccgcacctgtccagacacacatgttctgttcctcctcctcatgcatttccagcctttcaaccctccccgactctgcggctcccctcagcccccttgcaagttcatggcctgtccctcccagacccctgctccactggcccttcgaccagtcctcccttctgttctctctttccccgtccttcctctctctctctctctctctttctctctttctgtgtgtgtgtgtgtgtgtgtgtgtgtgtgtgtgtgtgtgtgtgtcttgtgcttcctcagacctttctcgcttctgagcttggtggcctgttccctccatctctccgaacctggcttcgcctgtccctttcactccacaccctctggccttctgccttgagctgggactgctttctgtctgtccggcctgcacccagcccctgcccacaaaaccccagggacagcggtctccccagcctgccctgctcaggccttgcccccaaacctgtactgtcccggaggaggttgggaggtggaggcccagcatcccgcgcagatgacaccatcaaccgccagagtcccagacaccggttttcctagaagcccctcacccccactggcccactggtggctaggtctccccttatccttctggtccagcgcaaggaggggctgcttctgaggtcggtggctgtctttccattaaagaaacaccgtgcaacgtg

SEQ ID NO: 2081 - DNA, 20 bp, Homo sapiens
cgtcttgcctcaagtagctt

SEQ ID NO: 2082 - DNA, 4724 bp, Homo sapiens
ctgcgctgaagtgagtcaagtgatgaaatcaagactacacgggaaggaagctcacgaaacctaactggtgacagaagctgctgaaccctgcccgaagaaaccacatgagccagcagttgctgccctcccgaagtggtcctcggaggcagcgcaccccttcattttggcgaaccgaggaggaagggaggaaccgtgtgggggaaatctagaacttctggttccccaaggacccagcagactgtgttctggctacaaggtgatcactgccaccaggtcagtgcaggattcctccaatgtagatgggccgggagccacaacttgcgcggagcagcagcctcgccgaccactcagagagaagccgcgcgacagccaggcttggcccggacggcgcccccaccctgcgcgcgcgatccaaggttctcacctggagcgctcaggtagggctggggcggggcgggaggctggcgcgcaggcgcggaagtggggcctcgcccctgccgacgtcgcaggctggagctcacctgggagactccaagtggaagccgagcctcggttctgcctctccaggcaacgcgggaggcccagcgggaaggcaggaggcggcggcggaggaggagctctactgagccgcaactgtggcgacagcaaccggagtcgcagccgccgccacctgcacctggcgcctagcccacgtccagcgcctgcccggccgccgcttcccgccaccctgccctgcccacccgccaggtactaccattaaagataccttcttctcagcaaatctatgataaaaaatataagtaacagaagaagaaataactgttatttgtcaagtgacaagcttttaatgtcagaatggctcacctaaagcgactagtaaaattacacattaaaagacattaccataaaaagttctggaagcttggtgcagtaatttttttctttataatagttttggttttaatgcaaagagaagtaagtgttcaatattccaaagaggaatcaaggatggaaaggaacatgaaaaacaaaaacaagatgttggatttaatgctagaagctgtaaacaatattaaggatgccatgccaaaaatgcaaataggagcacctgtcaggcaaaacattgatgctggtgagagaccttgtttgcaaggatattatacagcagcagaattgaagcctgtccttgaccgtccacctcaggattcaaatgcacctggtgcttctggtaaagcattcaagacaaccaatttaagtgttgaagagcaaaaggaaaaggaacgtggggaagctaaacactgctttaatgctttcgcaagtgacaggatttctttgcaccgagatcttggaccagacactcgacctcctgaatgtattgaacaaaaatttaagcgctgccctcccctgcccaccaccagtgtcataatagtttttcataatgaagcgtggtccacgttgcttagaactgtccacagtgtgctctattcttcacctgcaatactgctgaaggaaatcattttggtggatgatgctagtgtagatgagtacttacatgataaactagatgaatatgtaaaacaattttctatagtaaaaatagtcagacaaagagaaagaaaaggtctgatcactgctcggttgctaggagcaacagtcgcaacagctgaaacgctcacatttttagatgctcactgtgagtgtttctatggttggctagaacctctgttggccagaatagctgagaactacacggctgtcgtaagtccagatattgcatccatagatctgaacacgtttgaattcaacaaaccttctccttatggaagtaaccataaccgtggaaattttgactggagtctttcatttggctgggagtcgcttcctgatcatgagaagcaaagaaggaaagatgaaacctacccaattaaaacacccacttttgcaggaggacttttttccatatcaaaagaatattttgagtatattggaagctatgatgaagaaatggaaatctggggaggtgaaaatatagaaatgtctttcagagtatggcaatgtggtgggcagttggagattatgccttgctctgttgttggacatgtttttcgcagcaaaagccctcatagctttccaaaaggcactcaggtgattgctagaaaccaagttcgccttgcagaagtctggatggatgaatacaaggaaatattttataggagaaatacagatgcagcaaaaattgttaaacaaaaagcatttggtgatctttcaaaaagatttgaaataaaacaccgccttcagtgtaaaaattttacatggtatctgaacaacatttatccagaggtgtatgtgccagaccttaatcctgttatatctggatacattaaaagcgttggtcagcctctatgtctggatgttggagaaaacaatcaaggaggcaaaccattaattatgtatacatgtcatggacttgggggaaaccagtactttgaatactctgctcaacatgaaattcggcacaacatccagaaggaattatgtcttcatgctgctcaaggtctcgttcagctgaaggcatgtacctacaaaggtcacaagacagttgtcactggagagcagatatgggagatccagaaggatcaacttctatacaatccattcttaaaaatgtgcctttcagcaaatggagagcatccaagtttagtgtcatgcaacccatcagatccactccaaaaatggatacttagccaaaatgattaagtgttccttaaaattaagttgaaaaaggaaatattctttctcataaaactgtgactaggcatacactgtagtttttgaaaattatgcaaaagcagctaaatgtaacttattccaagtgcatttttcttatttatatctttatgtagcactactacagaaattctgcaagtttctgtttcaaagcacaataactagtaataccaaagactatttcaaaatgtccagatgtaggggaagagatgtttacagtatgatgaaaataattttccaagtaaagtgatgtttgtgtgttttgtacacttagggatatatatatatagctacattcacacactcacaatttaaaatatttcccctagttttttggggggataggaagaaagatttgttactgtatttttttaactacataaaaatagatcaataaatgtcagcattggcctctgtgtacaaaccaagagcttttacagatccagaatttattagtttaaaatgcaggtgaacttttttttgcgtttggtttacttgtctgtcaaatgtttccttaaacatgaaactgaataaggagaagagtatttttaacacttaaatttcttggcaaattttaaaacattttttagtctgtaatacactccacttgaagcacttaagtcttccttaaatgacttttcttaagtaatgatactgtgtgttttcccaaagcacttttaaaaaaatttttataaattactatctgttgaaaaggtgtccttttcctttcttctagtatttttttcttaccaaaattcactaatcttgaatgtttgtgatattaaatttcaaatgcagaatacttgactcatttaaagctaaattttgttactgattcaattataattgtaatggatttttgactttgtaatggattcttttcatcaaaaagccttatttttttatctatgtggaaaacacaataaaaaatcctcaacactattgtaatcatttggttaagtttttttcctcttttgggtaaaatctgtaattgataataggtgggggaaaatgaattttgtatgctgaatttctaagcgcctattgtttgtaaaaccatcagatatttcttatggcacaaaaaatgaggaatagcaaaattcctgtgttcaatatttagaaaattttgtattaatttctgataaagttccttaagcatctgatagaatgatgttttaaaaaaatttgacgcttgcttaggagatttaccactttttttttttgtttttcgtcattttatatttagatctcctgtattcttgttcccgaagtaaaatacgatcggtttcatattttaaatctggcagagcctcagctgtacgaaaaagagcatatactggttattgaccctatcttctcattgtttgtttgtaagtttgaatttgtattaaaaagcctgcattctgagctggacatggtggctcagcttctaatcccagcactttggtaggcaaaggtgggaggatcatttgagctcaggagttccagaccagcctgggcaacatagcaaaatctcatctctacaaaaagtaaaaattaaaaaatgaaattaaaaataaaattacctaggtgtggtggcacgcatctgtagttccagctatacaggaaggtgaggcagaagcattgcttgagcttgggagatcgaggctacagtgagctatgattacaccactgcacttcagtctgtgtgactgagcaagactctttcaaaaaaaaaaaaaaagcctacattctccagttgattatttcaactaatgtgtattatgtgcctaattttctatcagaagttgtattagcccgttttcacactgctgttaaagacatacctgagactgggtaatttataaagaaaaataggttcgatggactcacaggtccgcgtggctggggaggcttcacaatcatggcggaaggtgaaaggcatgtcttacgtggag

SEQ ID NO: 2083 - DNA, 874 bp, Homo sapiens
aggaagcaaagaaggacctgggctttgggaagatctaaagacccaggaaggtctctgggtgggataaagccaagatgaaactccccttacttctggctcttctatttggggcagtttctgctcttcatctaaggtctgagacttccacctttgagacccctttgggtgctaagacgctgcctgaggatgaggagacaccagagcaggagatggaggagaccccttgcagggagctggaggaagaggaggagtggggctctggaagtgaagatgcctccaagaaagatggggctgttgagtctatctcagtgccagatatggtggacaaaaaccttacgtgtcctgaggaagaggacacagtaaaagtggtgggcatccctgggtgccagacctgccgctacctcctggtgagaagtcttcagacgtttagtcaagcttggtttacttgccggaggtgctacaggggcaacctggtttccatccacaacttcaatattaattatcgaatccagtgttctgtcagcgcgctcaaccagggtcaagtctggattggaggcaggatcacaggctcgggtcgctgcagacgctttcagtgggttgacggcagccgctggaactttgcgtactgggctgctcaccagccctggtcccgcggtggtcactgcgtggccctgtgtacccgaggaggccactggcgtcgagcccactgcctcagaagacttcctttcatctgttcctactgagctggtcccagccagcagttcagagctgccctctcctgggcagctgcctcccctcctctgcttgccatccctccctccacctccctgcaataaaatgggttttactgaaatggaaaaaaaaaaaaaaaaaa

SEQ ID NO: 2084 - DNA, 3652 bp, Homo sapiens
acgcgcgcacgcagccagcgagcggccggagcggacggcagacggggcgggcggcgtcagggtcgcagcgtctacagctgctcgggggcggtttcttggcggaggcttggccggctcctctctcccggctccgcggcggctgcgaaggcggcggctcctgccctctcgctttccctctcgcgtctctggctgcaggtgaaaggaaagcaagccaggatggatatttacgacactcaaaccttgggggttgtggtctttggaggattcatggttgtttctgccattggcatcttcctggtgtcgactttctccatgaaggaaacgtcatatgaagaagccctagccaaccagcgcaaggagatggcgaaaactcaccaccagaaagtcgagaagaaaaagaaggagaaaacagtggagaagaaaggaaagaccaagaaaaaggaagagaaacctaatgggaagatacctgatcatgatccagcccccaatgtgactgtcctccttcgagaaccagtgcgggctcctgctgtggctgtggctccaaccccagtgcagccccccattatcgttgctcctgtcgccacagttccagccatgccccaggagaagctggcctcctcccccaaggacaaaaagaagaaggagaaaaaagtggcaaaagtggaaccagctgtcagctctgtagtgaattccatccaggttctcacttcgaaggctgccatcttggaaactgctcccaaggagggcagaaatacagatgtggcccagagcccagaggcaccaaagcaagaggctcctgccaagaagaagtctggttcaaagaaaaaagggcccccagatgccgacggccctctctacctcccctacaagacgctggtctccacggttgggagcatggtgttcaacgagggcgaggcccagcggctcatcgagatcctgtctgagaaggctggcatcattcaggacacctggcacaaggccactcagaagggtgaccctgtggcgattctgaaacgccagctggaagagaaggaaaaactgctggccacagaacaggaagatgcggctgtcgccaagagcaaactgagggagctcaacaaggagatggcagcagaaaaggccaaagcagcagccggggaggccaaagtgaaaaagcagctggtggcccgggagcaggagatcacggctgtgcaggcacgcatgcaggccagctaccgggagcacgtgaaggaggtgcagcagctgcagggcaagatccggactcttcaggagcagctggagaatggccccaacacgcagctggcccgcctgcagcaggagaactccatcctgcgggatgccttgaaccaggccacgagccaggtggagagcaagcagaacgcagagctggccaagcttcggcaggagctcagcaaggtcagcaaagagctggtggagaagtcagaggctgtgcggcaagatgagcagcagcggaaagctctggaagccaaggcagctgccttcgagaagcaggtcctgcagctgcaggcgtcccacagggagagtgaggaggccctgcagaagcgcctggacgaggtcagccgggagctgtgccacacgcagagcagccacgccagcctccgggcggatgccgagaaggcccaggagcaacagcagcagatggccgagctgcacagcaagttacagtcctccgaggcggaggtgcgcagcaaatgcgaggagctgagtggcctccacgggcagctccaggaggccagggcggagaactcccagctcacagagagaatccgttccattgaggccctgctggaggcgggccaggcgcgggatgcccaggacgtccaggccagccaggcggaggctgaccagcagcagactcgcctcaaggagctggagtcccaggtgtcgggtctggagaaggaggccatcgagctcagggaggccgtcgagcagcagaaagtgaagaacaatgacctccgggagaagaactggaaggccatggaggcactggccacggccgagcaggcctgcaaggagaagctgcactccctgacccaggccaaggaggaatcggagaagcagctctgtctgattgaggcgcagaccatggaggccctgctggctctgctcccagaactctctgtcttggcacaacagaattacaccgagtggctgcaggatctcaaagagaaaggccccacgctgctgaagcacccgccagctcccgcggagccctcctcggacctggcctccaagttgagggaggccgaggagacgcagagcacactgcaggccgagtgtgaccagtaccgcagcatcctggcggagacggagggcatgctcagagacctgcagaagagcgtggaggaggaggagcaggtgtggagggccaaggtgggcgccgcagaggaggagctccagaagtcccgggtcacagtgaagcatctcgaagagattgtagagaagctaaaaggagaacttgaaagttcggaccaggtgagggagcacacgtcgcatttggaggcagagctggaaaagcacatggcggccgccagcgccgagtgccagaactacgccaaggaggtggcagggctgaggcaacttctcctagaatctcaatctcagctcgatgccgccaagagcgaagcccagaaacagagcgatgagcttgccctggtcaggcagcagttgagtgaaatgaagagccacgtagaggatggtgacatagctggggccccagcttcctccccagaggcgcccccagccgagcaggaccccgttcagctgaagacgcagctggagtggacagaagccatcctggaggatgagcagacacagcggcagaagctcacggccgagtttgaggaggctcagacctcggcatgtcggttacaagaagaattggagaagctccgcacagccggccccctagagtcttcagaaacagaggaggcctcacagctgaaggagagactagaaaaagagaagaagttaacaagtgacctggggcgcgccgccacgagactgcaggagcttctgaagacgacccaggagcagctggcaagggagaaggacacggtgaagaagctgcaggaacagctggaaaaggcagaggacggcagcagctcaaaggagggcacctctgtctgagtttcctctttggaaaaagaagttactgttcaacttaccaaaatgccttacacattccttacaaataaaccaaccaacctacacagcgttatccaggcccaacttccggtagctccgagagaagccatgagagacaagtctcttagagccacagaagtagaccttccagagccccagtttgtaaatgaacctgtgtcacatttgataaacactatcctgggcgcagccccgggccaccgccgagtgacgccaaagccctggttgactctgacagccccgtgggtgtgtgggaggccgggcgctctggggtctgtctgtcagtgcaatcgtttagtgttttttcagtggggcggggcgggaagcgggtgggaccgggcagccagttctcaaaggctgtggggccgactggaggccacagcccctcacccctagacgttgccaaccagaactgacgtgtgacctcctgggtgttgatgccattaaaaccaacgttggtgcccgg

SEQ ID NO: 2085 - DNA, 1006 bp, Homo sapiens
ctccagggctagtgagctggaccggaagtaggtttctacccgaccgcattttacgtggtgctgcatttccggtagcggcggcgggaaatcggctgtgggagagaggctaggcctctgaggaggcgaatccggcgggtatcagagccatcagaaccgccaccatgacggtgggcaagagcagcaagatgctgcagcatattgattacaggatgaggtgcatcctgcaggacggccggatcttcattggcaccttcaaggcttttgacaagcacatgaatttgatcctctgtgactgtgatgagttcagaaagatcaagccaaagaactccaaacaagcagaaagggaagagaagcgagtcctcggtctggtgctgctgcgaggggagaatctggtctcaatgacagtagagggacctcctcccaaagatactggtattgctcgagttccacttgctggagctgccgggggcccagggatcggcagggctgctggcagaggaatcccagctggggttcccatgccccaggctcctgcaggacttgctgggccagtccgtggggttggcgggccatcccaacaggtgatgaccccacaaggaagaggtactgttgcagccgctgcagctgctgccacagccagtattgccggggctccaacccagtacccacctggccgtgggggtcctcccccacctatgggccgaggagcaccccctccaggcatgatgggcccacctcctggtatgagacctcctatgggtcccccaatggggatcccccctggaagagggactccaatgggcatgccccctccgggaatgcggcctcctccccctgggatgcgagggccccctcccccgggaatgcgcccaccaaggccctagactcatcttggccctcctcagctccctgcctgtttcccgtaaggctgtacatagtccttttatctccttgtggcctatgaaactggtttataataaactcttaagagaacattataattgca

SEQ ID NO: 2086 - DNA, 1474 bp, Homo sapiens
gctgctgcagcgagtctggcgcagagtggagcggccgccggagatgcctgacgcatctgtctgaggagcggtcagtgacgcgatggagcgggcaagggatcgcttacacctgagacgaactacagaacagcacgtaccagaggtggaagtccaagtcaaacgcagaaggactgcctcactgagcaaccaagagtagtgacttgtcaggaggatcaatatgaaggacggcctaaacatctccctgcaaatgctttagcagcatctccctcccctcacccctggggagaaaggattgttcacacaggataatttgaaagtgtcagttgtacccgaggcgttctcagcagcagcaagtacctgtggtggatttccaggctgaactgaggcaggcattcttagctgagacaccaagaggtggttaaagccatattggagtagcgaggaatctgattccaagcaaaaaccaggctccatctactctttgaagcttctgcccagcttgcattgtttctaggagaacctgcgtcatacctttatctatagccttcccctaggtcttcagaagcatcaagttttaactgtggacattggatttggtggaacagcaatcatgactgttggcaagagtagcaagatgctgcagcacattgactatagaatgagatgtatcctgcaagatggccgaatcttcattggcacctttaaggcttttgacaagcatatgaatttgatcctctgtgattgtgatgagttcagaaagatcaagccaaagaatgcgaagcaaccagagcgtgaagaaaagcgggttttgggtctggtgttgctgcgtggggagaacttggtatccatgactgtggaggggccaccccccaaagatactggcattgctcgggtaccacttgctggagctgctggaggccctggggttggtagggcagctggtagaggagtaccagctggtgtgccaattccccaggcccctgctggattggcaggccctgtccgaggagttgggggaccatcccagcaggtaatgactccacagggaagaggcactgtagcagctgctgctgttgctgcgactgccagtattgctggagccccaacacagtacccaccaggacggggcactccgcccccacccgtcggcagagcaaccccacctccaggcattatggctcctccacctggtatgagaccacccatgggcccaccaattgggcttccccctgctcgagggacgccaataggcatgccgcctccgggaatgagaccccctccaccaggcattagaggtccacctcccccaggaatgcgtccaccaagaccttagcatactgttgatccatctcagtcactttttcccctgcaatgcgtcttgtgaaattgtgtagagtgtttgtgagctttttgttccctcattctgcattaataatagctaataataaatgcatagagcaattaaactgtgagg

SEQ ID NO: 2087 - DNA, 1148 bp, Homo sapiens
ctccagggctagtgagctggaccggaagtaggtttctacccgaccgcattttacgtggtgctgcatttccggtagcggcggcgggaaatcggctgtgggagagaggctaggcctctgaggaggcgaatccggcgggtatcagagccatcagaaccgccaccatgacggtgggcaagagcagcaagatgctgcagcatattgattacaggatgaggtgcatcctgcaggacggccggatcttcattggcaccttcaaggcttttgacaagcacatgaatttgatcctctgtgactgtgatgagttcagaaagatcaagccaaagaactccaaacaagcagaaagggaagagaagcgagtcctcggtctggtgctgctgcgaggggagaatctggtctcaatgacagtagagggacctcctcccaaagatactggtattgctcgagttccacttgctggagctgccgggggcccagggatcggcagggctgctggcagaggaatcccagctggggttcccatgccccaggctcctgcaggacttgctgggccagtccgtggggttggcgggccatcccaacaggtgatgaccccacaaggaagaggtactgttgcagccgctgcagctgctgccacagccagtattgccggggctccaacccagtacccacctggccgtgggggtcctcccccacctatgggccgaggagcaccccctccaggcatgatgggcccacctcctggtatgagacctcctatgggtcccccaatggggatcccccctggaagagggactccaatgggcatgccccctccgggaatgcggcctcctccccctgggatgcgaggccttctttgacccttggccacagagtatggaagtagctccgcagaggcgtgggctcgattcctcagggccacgttaccacagacctgtttgtttcttatgctgttgttcgtggagtctcatgggattgtctggtttcccttacagggccccctcccccgggaatgcgcccaccaaggccctagactcatcttggccctcctcagctccctgcctgtttcccgtaaggctgtacatagtccttttatctccttgtggcctatgaaactggtttataataaactcttaagagaacattataat

SEQ ID NO: 2088 - DNA, 1474 bp, Homo sapiens; identical to SEQ ID NO: 2086

SEQ ID NO: 2089 - DNA, 1474 bp, Homo sapiens; identical to SEQ ID NO: 2086

SEQ ID NO: 2090 - DNA, 1474 bp, Homo sapiens; identical to SEQ ID NO: 2086

SEQ ID NO: 2091 - DNA, 1428 bp, Homo sapiens
ccgtctgaccgactccttgggtatattagtgcggcatctgcgtgtaacacgttgcctttattatggtggtctgaggttgttgattgtgaaatccaggatgtaggagctatgttgccgcagcctctgggctccgggatccgagagctcttttgtatcggccggtggaatctttggatgttcgagctgtattgccgcgacctgtagattcagggatcgtttacacttgagaagaactactgaacagcacgtgccagagattgaggtccaggtcaaacgtagaaggacagcctcactgagcaaccaagagtgtcacttgtacccacggcgttctcagcaacagcaaattcctgtggtggatttccaggcagaactgagacaggcgttcttagctgagacaccaagaggtggttaaagcagtattggaacttcaaggtggtggaagtcaacaaacacaggacctatccactgattgtgaaactttggtcaagcttacactgtgttaatagcctgcatcaaacctttatttattgcccttctccaagtattaaggatcttgaaattttagtgttgacaactgctattgtggaacagcaatcatgactgtgggtaagagtagcaagatgctccagcatattgactatagaatgagatgtatcctgcaagatggaagaatcttcattggcacctttaaggcttttgacaagcatatgaatttgatcctctgtgattgtgatgagttcaggaagatcaagccaaagaatgcaaaacagccagaacgtgaagaaaaacgggttttgggtctggtcttgctacgtggagagaacttggtttccatgacagtggagggtccacctcctaaagatactggcattgctcgtgtgccacttgctggtgctgcaggtggccctggtgttggaagagcagctggcagaggagtaccagcaggtgtacctattccccaagctcctgctggattagcaggccctgtccgaggagttggaggcccatcccagcaggtcatgaccccacagggaagaggcactgttgcagctgctgctgttgctgctactgctagcattgcaggagccccaacccagtacccgccaggacggggaactccacctccacctgtaggcagagcaaccccacctccaggcattatggctcctccacctggaatgagaccacccatgggcccaccaattggacttccccctgctcgagggacacctataggcatgccccctccaggaatgagaccccctcctccaggaattagaggcccacctcccccaggaatgcgtccaccaagaccctaagatacagttgataaatctcagcccttctctttccctacaatgcttcttgtgaaattgtgtcgcctgcaagcttttgacccctcttactgcattaactatagataatacc

SEQ ID NO: 2092 - DNA, 1474 bp, Homo sapiens; identical to SEQ ID NO: 2086

SEQ ID NO: 2093 - DNA, 1474 bp, Homo sapiens; identical to SEQ ID NO: 2086

SEQ ID NO: 2094 - DNA, 1474 bp, Homo sapiens; identical to SEQ ID NO: 2086

SEQ ID NO: 2095 - DNA, 1006 bp, Homo sapiens; identical to SEQ ID NO: 2085

SEQ ID NO: 2096 - DNA, 1474 bp, Homo sapiens; identical to SEQ ID NO: 2086

SEQ ID NO: 2097 - DNA, 1474 bp, Homo sapiens; identical to SEQ ID NO: 2086

SEQ ID NO: 2098 - DNA, 1474 bp, Homo sapiens; identical to SEQ ID NO: 2086

SEQ ID NO: 2099 - DNA, 1474 bp, Homo sapiens; identical to SEQ ID NO: 2086

SEQ ID NO: 2100 - DNA, 1007 bp, Homo sapiens
aactccagggctagtgagctggaccggaagtaggtttctacccgaccgcattttacgtggtgctgcatttccggtagcggcggcgggaaatcggctgtgggagagaggctaggcctctgaggaggcgaatccggcgggtatcagagccatcagaaccgccaccatgacggtgggcaagagcagcaagatgctgcagcatattgattacaggatgaggtgcatcctgcaggacggccggatcttcattggcaccttcaaggcttttgacaagcacatgaatttgatcctctgtgactgtgatgagttcagaaagatcaagccaaagaactccaaacaagcagaaagggaagagaagcgagtcctcggtctggtgctgctgcgaggggagaatctggtctcaatgacagtagagggacctcctcccaaagatactggtattgctcgagttccacttgctggagctgccgggggcccagggatcggcagggctgctggcagaggaatcccagctggggttcccatgccccaggctcctgcaggacttgctgggccagtccgtggggttggcgggccatcccaacaggtgatgaccccacaaggaagaggtactgttgcagccgctgcagctgctgccacagccagtattgccggggctccaacccagtacccacctggccgtgggggtcctcccccacctatgggccgaggagcaccccctccaggcatgatgggcccacctcctggtatgagacctcctatgggtcccccaatggggatcccccctggaagagggactccaatgggcatgccccctccgggaatgcggcctcctccccctgggatgcgagggccccctcccccgggaatgcgcccaccaaggccctagactcatcttggccctcctcagctccctgcctgtttcccgtaaggctgtacatagtccttttatctccttgtggcctatgaaactggtttataataaactcttaagagaacattataattgc

SEQ ID NO: 2101 - DNA, 4974 bp, Homo sapiens
ctcgaaagcatcagcagcctcctagctccacccacaacctctagccccctcccaacagcttcctcttcccaggccagaacggcgtcttccagttccccaccggatgaagcggaagtgcgtcatgtcgaggcgccaaggcgctcgtttggcgcgcgcgccctaggcggcggatctaagctaacttcttggatcttttcttgtttctccttggtttttgactttttctggaccctggtgtctacgatttccgagatgccgtcttctttgttgggcgcggcgatgccggcctctacatctgccgcagccctgcaggaagctctggaaaatgctggacggctcatcgaccgtcagttgcaagaggaccgcatgtacccggacctttccgagctgcttatggtgtctgccccaaataatcccaccgtttctggcatgtcagatatggattatcctttacaaggacctggtttgctgtccgtacccaaccttccagagatcagttccatccgaagagttcctctcccacctgaacttgttgagcagtttggacatatgcagtgtaattgcatgatgggtgtgttccctcctatcagcagagcttggctcacaattgacagtgatatattcatgtggaactatgaggatggaggagaccttgcctattttgatggacttagtgagactattcttgctgtggggcttgtgaagccaaaagcaggcatctttcaacctcatgtgcgacacctcctggttttggcgacccctgtagacatagtaattcttggactcagctatgctaatttgcaaacaggttctggagttcttaatgatagtttgtctggtggaatgcagttgcttccagatcctttatattctcttcctactgataatacttaccttttaacaataacttccactgataatggcagaattttcttggctggaaaggatggctgtttatatgaagtagcctaccaggctgaagcagggtggtttagccaaagatgtaggaaaataaaccactcaaagagctcactttctttccttgttccttccttgctacaattcacgttctcagaagatgatcctattcttcaaattgcaattgataattctagaaatattttatatacacgatctgagaaaggagtaatacaggtgtatgatttgggacaagatggacaaggaatgagcagagttgcctctgtgtcacagaatgccattgtctctgctgctggtaacattgctaggaccatcgatcgttctgtttttaaaccaattgtccaaatagcagtgattgaaaattctgaatcactggactgtcagttattggctgtcacacatgcaggtgttaggttatattttagcacttgtccattcagacagccattagcacggcctaatacactgacgctggttcatgtccgcttacctcctggattctcagcatcttcaaccgtggaaaagccttcaaaagtacatagagctctttatagtaaaggtattctattgatggcagcctcagaaaatgaggataatgatattttatggtgtgtcaaccatgatacttttcctttccaaaagccaatgatggaaacccagatgacagctggtgttgatggtcattcctgggctctttctgcgatagatgaattgaaagtagataaaataattacacctttaaacaaggatcatattccaataactgattcaccagttgttgtacagcagcacatgttacctccgaagaaatttgttctcctctcagcacaggggagccttatgtttcataaacttagacctgtagatcaactgaggcatctacttgtgagtaatgtgggaggagatggagaagagattgaaagattctttaaattacatcaggaagaccaggcttgtgcaacttgccttattcttgcttgctccactgctgcctgtgatagagaagtatctgcctgggctactcgggctttctttaggtatggtggtgaagcacagatgagatttccaaccactcttccgcctccaagtaatgttggtcccatcttggggtctcctgtctattctagttctcctgttcctagtggtagtccctatccaaatccatcctttttgggaacaccgtctcatggtatacagcctcctgccatgtcaactccagtgtgtgctctgggaaacccagcaactcaggccacaaatatgagttgtgtgactggaccagagattgtgtactctggaaaacacaatggtatttgcatttacttttctcggatcatgggaaacatttgggatgcaagcttagttgtggagagaatattcaagagtggcaacagagagatcactgcaattgaaagtagtgttccctgccaactgctagagtcagtgctacaagaactaaagggtttgcaggaatttctagacagaaactcccagtttgcaggaggaccattaggaaatccaaatactactgctaaagtgcagcagaggctgataggattcatgcgtcctgaaaacggaaatccccagcaaatgcaacaggaactgcagaggaagtttcatgaggctcaactaagtgaaaagatttcacttcaggcaattcagcagttggttcgaaaatcatatcaggctctggctttatggaaacttctttgtgaacatcaattcactatcattgtggcagaacttcagaaggaacttcaagagcagctgaagatcaccacctttaaagatcttgtaatcagggacaaagaactcacaggggcattaattgcttctcttatcaactgctacatcagagataatgccgctgttgatggcattagtttacatttacaggatatctgcccacttctatatagcactgatgatgcaatttgttctaaggcaaatgagcttctccagcgttcccgacaagttcaaaataagactgaaaaagaaagaatgttaagggaatcattaaaggaatatcaaaaaattagcaatcaagtggacctttccaatgtttgtgctcagtatagacaagtgagattttatgagggtgtggtggaactttctcttacggctgcagagaaaaaagatcctcaaggtcttgggcttcatttctataaacatggagaaccagaagaagacatagttggacttcaggccttccaagaaagattaaacagttacaaatgcattacagacacacttcaagaactggtaaatcaaagtaaggccgctcctcagtctcccagtgtacccaaaaaacctggtcctccagtgttgtcatctgatccaaatatgctgagtaatgaagaagcaggacatcattttgaacaaatgcttaaattgtcacagcgatccaaggatgagctctttagtattgccctttataattggctaatacaagtcgaccttgcagataagctgctacaggttgcttctccatttctggagccacatctagtccgaatggccaaagttgatcaaaacagagttcgttatatggatttactctggcggtattacgagaagaacagaagtttcagtaatgctgctcgtgtactgtccagactggctgacatgcatagcacagaaatttcacttcagcagcgactagagtacattgctcgagccattcttagtgccaaaagttccactgccatttcatcaatagctgccgatggtgaatttcttcatgaattagaagaaaaaatggaggttgctaggatccaacttcagatacaggagacactacaaaggcagtattcccatcattcttctgtacaggatgcagtttctcagctggattctgagctgatggacataactaagctttatggggaatttgctgacccatttaaacttgcagagtgcaaacttgcaataattcattgtgccggttattcagaccctatattggtgcagacactttggcaagatatcatagagaaagaattgagtgacagtgtgacattgagctcctcggatagaatgcatgctcttagtctcaagattgttctccttggcaaaatttatgctggcacaccacgcttctttcctttagattttattgtacagtttttagaacagcaggtttgtactttgaactgggatgtgggcttcgtaatacagacaatgaatgaaattggagtaccattacctagactactagaagtttatgatcagttgttcaaatcacgggatccattctggaacagaatgaagaagccactgcaccttttggattgtatacatgtattattgataagatatgttgagaatcccagccaagttttaaattgtgaaaggagaagatttacaaatctctgcctggatgctgtttgtggttaccttgttgagctccagtctatgagctcgtcagtagcagtacaagccatcactgggaattttaaatctcttcaagctaaattagaacggcttcattaattactgtgatatactttcatccgttttatgatctgtaaaataaaaactcagctgggtccagatatcaggtgttctaaatctaagaatgtaagaacaatcttaatagaaatatgtttttaataagtggctaatatctacaaatagtacctttgctaaatgaattcttttttatgactattttgttttttagtaattgggtgaaaaaacaactgaaatgagtgcaggcagaaatttcgaatttatattattcattttcaagttagtccaaggatattggcattaaaactccactaggcggccaggcacagtgacttacacctgtaatcccagcactttgggaggccaaggtgggcgaatcacgaggctggtcttgaactcctgacctcaagtgatctgcccgcctccacctcccaaagtgttgagattacagacgtgagccaatgtgcctggcctattcccttctctctttatgctaccacaaataattaccttctgtttattgtaagtgatgcatgtctaacaatttgtacaatacattttgaatat

SEQ ID NO: 2102 - DNA, 4355 bp, Homo sapiens
aaggcgctcgtttggcgcgcgcgccctaggcggcggatctaagctaacttcttggatcttttcttgtttctccttggtttttgactttttctggaccctggtgtctacgatttccgagatgccgtcttctttgttgggcgcggcgatgccggcctctacatctgccgcagccctgcaggaagctctggaaaatgctggacggctcatcgaccgtcagttgcaagaggaccgcatgtacccggacctttccgagctgcttatggtgtctgccccaaataatcccaccgtttctggcatgtcagatatggattatcctttacaaggacctggtttgctgtccgtacccaaccttccagagatcagttccatccgaagagttcctctcccacctgaacttgttgagcagtttggacatatgcagtgtaattgcatgatgggtgtgttccctcctatcagcagagcttggctcacaattgacagtgatatattcatgtggaactatgaggatggaggagaccttgcctattttgatggacttagtgagactattcttgctgtggggcttgtgaagccaaaagcaggcatctttcaacctcatgtgcgacacctcctggttttggcgacccctgtagacatagtaattcttggactcagctatgctaatttgcaaacaggttctggagttcttaatgatagtttgtctggtggaatgcagttgcttccagatcctttatattctcttcctactgataatacttaccttttaacaataacttccactgataatggcagaattttcttggctggaaaggatggctgtttatatgaagtagcctaccaggctgaagcagggtggtttagccaaagatgtaggaaaataaaccactcaaagagctcactttctttccttgttccttccttgctacaattcacgttctcagaagatgatcctattcttcaaattgcaattgataattctagaaatattttatatacacgatctgagaaaggagtaatacaggtgtatgatttgggacaagatggacaaggaatgagcagagttgcctctgtgtcacagaatgccattgtctctgctgctggtaacattgctaggaccatcgatcgttctgtttttaaaccaattgtccaaatagcagtgattgaaaattctgaatcactggactgtcagttattggctgtcacacatgcaggtgttaggttatattttagcacttgtccattcagacagccattagcacggcctaatacactgacgctggttcatgtccgcttacctcctggattctcagcatcttcaaccgtggaaaagccttcaaaagtacatagagctctttatagtaaaggtattctattgatggcagcctcagaaaatgaggataatgatattttatggtgtgtcaaccatgatacttttcctttccaaaagccaatgatggaaacccagatgacagctggtgttgatggtcattcctgggctctttctgcgatagatgaattgaaagtagataaaataattacacctttaaacaaggatcatattccaataactgattcaccagttgttgtacagcagcacatgttacctccgaagaaatttgttctcctctcagcacaggggagccttatgtttcataaacttagacctgtagatcaactgaggcatctacttgtgagtaatgtgggaggagatggagaagagattgaaagattctttaaattacatcaggaagaccaggcttgtgcaacttgccttattcttgcttgctccactgctgcctgtgatagagaagtatctgcctgggctactcgggctttctttaggtatggtggtgaagcacagatgagatttccaaccactcttccgcctccaagtaatgttggtcccatcttggggtctcctgtctattctagttctcctgttcctagtggtagtccctatccaaatccatcctttttgggaacaccgtctcatggtatacagcctcctgccatgtcaactccagtgtgtgctctgggaaacccagcaactcaggccacaaatatgagttgtgtgactggaccagagattgtgtactctggaaaacacaatggtatttgcatttacttttctcggatcatgggaaacatttgggatgcaagcttagttgtggagagaatattcaagagtggcaacagagagatcactgcaattgaaagtagtgttccctgccaactgctagagtcagtgctacaagaactaaagggtttgcaggaatttctagacagaaactcccagtttgcaggaggaccattaggaaatccaaatactactgctaaagtgcagcagaggctgataggattcatgcgtcctgaaaacggaaatccccagcaaatgcaacaggaactgcagaggaagtttcatgaggctcaactaagtgaaaagatttcacttcaggcaattcagcagttggttcgaaaatcatatcaggctctggctttatggaaacttctttgtgaacatcaattcactatcattgtggcagaacttcagaaggaacttcaagagcagctgaagatcaccacctttaaagatcttgtaatcagggacaaagaactcacaggggcattaattgcttctcttatcaactgctacatcagagataatgccgctgttgatggcattagtttacatttacaggatatctgcccacttctatatagcactgatgatgcaatttgttctaaggcaaatgagcttctccagcgttcccgacaagttcaaaataagactgaaaaagaaagaatgttaagggaatcattaaaggaatatcaaaaaattagcaatcaagtggacctttccaatgtttgtgctcagtatagacaagtgagattttatgagggtgtggtggaactttctcttacggctgcagagaaaaaagatcctcaaggtcttgggcttcatttctataaacatggagaaccagaagaagacatagttggacttcaggccttccaagaaagattaaacagttacaaatgcattacagacacacttcaagaactggtaaatcaaagtaaggccgctcctcagtctcccagtgtacccaaaaaacctggtcctccagtgttgtcatctgatccaaatatgctgagtaatgaagaagcaggacatcattttgaacaaatgcttaaattgtcacagcgatccaaggatgagctctttagtattgccctttataattggctaatacaagtcgaccttgcagataagctgctacaggttgcttctccatttctggagccacatctagtccgaatggccaaagttgatcaaaacagagttcgttatatggatttactctggcggtattacgagaagaacagaagtttcagtaatgctgctcgtgtactgtccagactggctgacatgcatagcacagaaatttcacttcagcagcgactagagtacattgctcgagccattcttagtgccaaaagttccactgccatttcatcaatagctgccgatggtgaatttcttcatgaattagaagaaaaaatggaggttgctaggatccaacttcagatacaggagacactacaaaggcagtattcccatcattcttctgtacaggatgcagtttctcagctggattctgagctgatggacataactaagctttatggggaatttgctgacccatttaaacttgcagagtgcaaacttgcaataattcattgtgccggttattcagaccctatattggtgcagacactttggcaagatatcatagagaaagaattgagtgacagtgtgacattgagctcctcggatagaatgcatgctcttagtctcaagattgttctccttggcaaaatttatgctggcacaccacgcttctttcctttagattttattgtacagtttttagaacagcaggtttgtactttgaactgggatgtgggcttcgtaatacagacaatgaatgaaattggagtaccattacctagactactagaagtttatgatcagttgttcaaatcacgggatccattctggaacagaatgaagaagccactgcaccttttggattgtatacatgtattattgataagatatgttgagaatcccagccaagttttaaattgtgaaaggagaagatttacaaatctctgcctggatgctgtttgtggttaccttgttgagctccagtctatgagctcgtcagtagcagtacaagccatcactgggaattttaaatctcttcaagctaaattagaacggcttcattaattactgtgatatactttcatccgttttatgatctgtaaaataaaaactcagctgggtccag

SEQ ID NO: 2103 - DNA, 4974 bp, Homo sapiens; identical to SEQ ID NO: 2101

SEQ ID NO: 2104 - DNA, 4974 bp, Homo sapiens; identical to SEQ ID NO: 2101

SEQ ID NO: 2105 - DNA, 4200 bp, Homo sapiens
gactctcgcctgacttcctaatttgctacttatccccagcgttggtcccggcgaggatatgctgagatttatggcactgttggctgcatttttggagaacagcaagcagcttcttttcagataatcccaccgtttctggcatgtcagatatggattatcctttacaaggacctggtttgctgtccgtacccaaccttccagagatcagttccatccgaagagttcctctcccacctgaacttgttgagcagtttggacatatgcagtgtaattgcatgatgggtgtgttccctcctatcagcagagcttggctcacaattgacagtgatatattcatgtggaactatgaggatggaggagaccttgcctattttgatggacttagtgagactattcttgctgtggggcttgtgaagccaaaagcaggcatctttcaacctcatgtgcgacacctcctggttttggcgacccctgtagacatagtaattcttggactcagctatgctaatttgcaaacaggttctggagttcttaatgatagtttgtctggtggaatgcagttgcttccagatcctttatattctcttcctactgataatacttaccttttaacaataacttccactgataatggcagaattttcttggctggaaaggatggctgtttatatgaagtagcctaccaggctgaagcagggtggtttagccaaagatgtaggaaaataaaccactcaaagagctcactttctttccttgttccttccttgctacaattcacgttctcagaagatgatcctattcttcaaattgcaattgataattctagaaatattttatatacacgatctgagaaaggagtaatacaggtgtatgatttgggacaagatggacaaggaatgagcagagttgcctctgtgtcacagaatgccattgtctctgctgctggtaacattgctaggaccatcgatcgttctgtttttaaaccaattgtccaaatagcagtgattgaaaattctgaatcactggactgtcagttattggctgtcacacatgcaggtgttaggttatattttagcacttgtccattcagacagccattagcacggcctaatacactgacgctggttcatgtccgcttacctcctggattctcagcatcttcaaccgtggaaaagccttcaaaagtacatagagctctttatagtaaaggtattctattgatggcagcctcagaaaatgaggataatgatattttatggtgtgtcaaccatgatacttttcctttccaaaagccaatgatggaaacccagatgacagctggtgttgatggtcattcctgggctctttctgcgatagatgaattgaaagtagataaaataattacacctttaaacaaggatcatattccaataactgattcaccagttgttgtacagcagcacatgttacctccgaagaaatttgttctcctctcagcacaggggagccttatgtttcataaacttagacctgtagatcaactgaggcatctacttgtgagtaatgtgggaggagatggagaagagattgaaagattctttaaattacatcaggaagaccaggcttgtgcaacttgccttattcttgcttgctccactgctgcctgtgatagagaagtatctgcctgggctactcgggctttctttaggtatggtggtgaagcacagatgagatttccaaccactcttccgcctccaagtaatgttggtcccatcttggggtctcctgtctattctagttctcctgttcctagtggtagtccctatccaaatccatcctttttgggaacaccgtctcatggtatacagcctcctgccatgtcaactccagtgtgtgctctgggaaacccagcaactcaggccacaaatatgagttgtgtgactggaccagagattgtgtactctggaaaacacaatggtatttgcatttacttttctcggatcatgggaaacatttgggatgcaagcttagttgtggagagaatattcaagagtggcaacagagagatcactgcaattgaaagtagtgttccctgccaactgctagagtcagtgctacaagaactaaagggtttgcaggaatttctagacagaaactcccagtttgcaggaggaccattaggaaatccaaatactactgctaaagtgcagcagaggctgataggattcatgcgtcctgaaaacggaaatccccagcaaatgcaacaggaactgcagaggaagtttcatgaggctcaactaagtgaaaagatttcacttcaggcaattcagcagttggttcgaaaatcatatcaggctctggctttatggaaacttctttgtgaacatcaattcactatcattgtggcagaacttcagaaggaacttcaagagcagctgaagatcaccacctttaaagatcttgtaatcagggacaaagaactcacaggggcattaattgcttctcttatcaactgctacatcagagataatgccgctgttgatggcattagtttacatttacaggatatctgcccacttctatatagcactgatgatgcaatttgttctaaggcaaatgagcttctccagcgttcccgacaagttcaaaataagactgaaaaagaaagaatgttaagggaatcattaaaggaatatcaaaaaattagcaatcaagtggacctttccaatgtttgtgctcagtatagacaagtgagattttatgagggtgtggtggaactttctcttacggctgcagagaaaaaagatcctcaaggtcttgggcttcatttctataaacatggagaaccagaagaagacatagttggacttcaggccttccaagaaagattaaacagttacaaatgcattacagacacacttcaagaactggtaaatcaaagtaaggccgctcctcagtctcccagtgtacccaaaaaacctggtcctccagtgttgtcatctgatccaaatatgctgagtaatgaagaagcaggacatcattttgaacaaatgcttaaattgtcacagcgatccaaggatgagctctttagtattgccctttataattggctaatacaagtcgaccttgcagataagctgctacaggttgcttctccatttctggagccacatctagtccgaatggccaaagttgatcaaaacagagttcgttatatggatttactctggcggtattacgagaagaacagaagtttcagtaatgctgctcgtgtactgtccagactggctgacatgcatagcacagaaatttcacttcagcagcgactagagtacattgctcgagccattcttagtgccaaaagttccactgccatttcatcaatagctgccgatggtgaatttcttcatgaattagaagaaaaaatggaggttgctaggatccaacttcagatacaggagacactacaaaggcagtattcccatcattcttctgtacaggatgcagtttctcagctggattctgagctgatggacataactaagctttatggggaatttgctgacccatttaaacttgcagagtgcaaacttgcaataattcattgtgccggttattcagaccctatattggtgcagacactttggcaagatatcatagagaaagaattgagtgacagtgtgacattgagctcctcggatagaatgcatgctcttagtctcaagattgttctccttggcaaaatttatgctggcacaccacgcttctttcctttagattttattgtacagtttttagaacagcaggtttgtactttgaactgggatgtgggcttcgtaatacagacaatgaatgaaattggagtaccattacctagactactagaagtttatgatcagttgttcaaatcacgggatccattctggaacagaatgaagaagccactgcaccttttggattgtatacatgtattattgataagatatgttgagaatcccagccaagttttaaattgtgaaaggagaagatttacaaatctctgcctggatgctgtttgtggttaccttgttgagctccagtctatgagctcgtcagtagcagtacaagccatcactgggaattttaaatctcttcaagctaaattagaacggcttcattaattactgtgatatactttcatccgttttatgatctgtaaaataaaaactcagctgggtccag

SEQ ID NO: 2106 - DNA, 1745 bp, Homo sapiens
ccacgtggcctaaggcgccatcagccgcccgggagatatccgccgggggagaatagggttgcaccatcccagaagctgctgttagctcgccggtcctcggcacgccgcccgttcgcccctgcgctgtccgcccttcccctagcgttacttccggtccctcgctgagggggttcgtgcggctcccaggaggcgtgaaccgcggaccatgagcgtgggcttcatcggggccggccagctggcctatgctctggcgcggggcttcacggccgcaggcatcctgtcggctcacaagataatagccagctccccagaaatgaacctgcccacggtgtccgcgctcaggaagatgggtgtgaacctgacacgcagcaacaaggagacggtgaagcacagcgacgtcctgtttctggctgtgaagccacatatcatccccttcatcctggatgagattggggccgacgtgcaagccagacacatcgtggtctcctgtgcggctggtgtcaccatcagctctgtggagaagaagctgatggcattccagccagcccccaaagtgattcgctgcatgaccaacacacctgtggtagtgcaggaaggcgctacagtgtacgccacgggcacccatgccctggtggaggatgggcagctcctggagcagctcatgagcagcgtgggcttctgcactgaggtggaagaggacctcatcgatgccgtcacggggctcagtggcagcgggcctgcctatgcattcatggctctggacgcattggctgatggtggggtgaagatgggtttgccacggcgcctggcaatccaactcggggcccaggctttgctgggagctgccaagatgctgctggactcggagcagcatccatgccagcttaaggacaatgtctgctcccctgggggagccaccatccacgccctgcactttctagagagtgggggcttccgctctctgctcatcaatgcagttgaggcctcctgtatccgaacacgagagctacagtccatggccgaccaagaaaagatctccccagctgcccttaagaagaccctcttagacagagtgaagctggaatcccccacagtctccacactgaccccctccagcccagggaagctcctcacaagaagcctggccctgggaggcaagaaggactaaggcagcatctgtcccctctgtgattcagagcccttagttgagagcccctgccgcccctgccacccccctgccccgctcccaccattgcccctcctcagctgtgcaaggagaaagcatgcttaggaagttttcaggtccttgtgataaaacctccttaaatctgttcagaccaagcaatgcgagcttcctctcctgtcccatgttggaagttgctctgaaggggtggtagatgctggaagccagacacaaccctgcgtacgctgctcagttggtggagactggggctgggactggagtcagcccagctgggaggaggggctggggaggatctgcagctgaagcccgaggcagggttggtgtgatgccaaggcaaagtggtgaggagaaaacaggaaacgggctttctctgaattggtaaatgggaaagaagtgagcaacttaagattgtcacaattaatcacaagtgtacaggattagactgggtttatatttaactcttgcttcataggtgtaccatttaaagagtgttatttaatgctaagtttaactgctttaataaagtttatttttaaatatc

SEQ ID NO: 2107 - DNA, 2653 bp, Homo sapiens
aggagtgtgggaggggcagtggaactggagtcagctaatggctgacgcactacgcgcagagggaaagacgggtcaccaatagcgacacggatatggccccgcgggcggggtttaggcccaaagtggtgtcggagcagcgcctattagtgtcatcctcaccgtcacggccggcgcctcctcctggattcattcactcgctcttttcattcacgaaggtagtgaggcctagtggaaagccatggagagcgctctccccgccgccggcttcctgtactgggtcggcgcgggcaccgtggcctacctagccctgcgtatttcgtactcgctcttcacggccctccgggtctggggagtggggaatgaggcgggggtcggcccggggctcggagaatgggcagttgtcacaggtagtactgatggaattggaaaatcatatgcagaagagctactcaggaggctgaggcaggagaatcgcttgaacccaggaggtggaggttgcagtgagccgagatcacaccgtggcactccagcctgggtgacagagcaagactctgtctcaaaaaaattagcaaagcatggaatgaaggttgtccttatcagcagatcaaaggataaacttgaccaggtttccagtgaaataaaagaaaaattcaaagtggagacaagaaccattgctgttgactttgcatcagaagatatttatgataaaattaaaacaggcttggctggtcttgaaatcggcatcttagtgaacaacgtgggaatgtcgtatgagtatcctgaatactttttggatgttcctgacttggacaatgtgatcaagaaaatgataaatattaatattctttctgtttgtaagatgacacaattggtactgcctggcatggtggaaagatccaaaggggctattctgaacatttcatctggcagtggcatgctccctgtcccactcttgaccatctattctgcaaccaagacttttgtagatttcttctctcagtgcctccatgaggagtataggagcaagggcgtctttgtgcagagtgtcctgccatacttcgtagctacaaaactggctaaaatccggaagccaactttggataagccctctccggagacgtttgtgaagtctgcaattaaaacagtcggcctgcaatcccgaaccaatggatacctgatccatgctcttatgggcttgataatctcaaacctgccttcttggatttatttgaaaatagtcatgaatatgaacaagtctacacgggctcactatctgaagaaaaccaagaagaactaagcattgataactgcattgtaacttggccagatgctccagcatatgcacgttcactgcaaagcaccctactggttttgaaaatctgaccttgtcatttcaatagttattaacatgactaaatattatcttaattaagaggaaaatagaagttgcttttaggggtttctgacatatattctggatactatccgaggtaattttgaagtttaatataaatgctcatatcaaatgaatatagaactaatattgtcgggaacacctaatagaaaggaatactattatagcaaatcacagaatgatagactcaagcataaaacttggcagttttatctgcttcaaaatgccattgatcattattcctgtattttctctgaaactgattataaaaaccaatgtccagctactcttttgacacttgaagaaatggagatcgatttgatttgtttataagcagacacactgcaatttacaaagatctctttacggttttataaaattatcttccagtttgtacatttatatggaattgttctttatcaagggtagctaatgacatgaaaataattgtgaaatatggaattatttctgacacatgaagcccactaaactatgctttcttataatgcatatttcttctcagtttaaatgtatgtaaatatcgaagctatatggtatgatttataaagataaatgggccaaagtgtacattgagactggcagccatctatggtaccactgaaaccctgacccagaaaagtggcttgcttggacacccagctgcctttgtttctgcattaaaccaatattgatcacacatatgacacaggctagtcctataaaagtaatgacttcatagaaatggcattataatttttaagttgatactctacaggtagctattgatataattagttttaataaaacatgctgcaaccatggtatacaacaaaaatacatttctttggtgattgaaattaaggccgtatttacaatgacttaatataagactgacttttatcctgcttcataacttgtatggagaactcaccaagaaagaattcaatactgtgaaatatgcagcaagaagattggtctttacctaggctgtgtttcctaagctctgagttttcagcaccagtagatttgtattaaaagaaaaaaaaatggggccttagcttctggcttttaattttgccagctaaggacataaaacaaaaataaacaaacaaaaacaaatagccatctgctatcagcatcattatgtaaaagaaaatatattttagcccctaaaattaggaagaatgtaatctcagaataaaggttgtcatttaagttgaataaatatatagctttatg

SEQ ID NO: 2108 - DNA, 2135 bp, Homo sapiens
aggagtgtgggaggggcagtggaactggagtcagctaatggctgacgcactacgcgcagagggaaagacgggtcaccaatagcgacacggatatggccccgcgggcggggtttaggcccaaagtggtgtcggagcagcgcctattagtgtcatcctcaccgtcacggccggcgcctcctcctggattcattcactcgctcttttcattcacgaaggtagtgaggcctagtggaaagccatggagagcgctctccccgccgccggcttcctgtactgggtcggcgcgggcaccgtggcctacctagccctgcgtatttcgtactcgctcttcacggccctccgggtctggggagtggggaatgaggcgggggtcggcccggggctcggagaatgggcagttgtcacaggtagtactgatggaattggaaaatcatatgcagaagagttagcaaagcatggaatgaaggttgtccttatcagcagatcaaaggataaacttgaccaggtttccagtgaaataaaagaaaaattcaaagtggagacaagaaccattgctgttgactttgcatcagaagatatttatgataaaattaaaacaggcttggctggtcttgaaatcggcatcttagtgaacaacgtgggaatgtcgtatgagtatcctgaatactttttggatgttcctgacttggacaatgtgatcaagaaaatgataaatattaatattctttctgtttgtaagatgacacaattggtactgcctggcatggtggaaagatccaaaggggctattctgaacatttcatctggcagtggcatgctccctgtcccactcttgaccatctattctgcaaccaagacttttgtagatttcttctctcagtgcctccatgaggagtataggagcaagggcgtctttgtgcagagtgtcctgccatacttcgtagctacaaaactggctaaaatccggaagccaactttggataagccctctccggagacgtttgtgaagtctgcaattaaaacagtcggcctgcaatcccgaaccaatggatacctgatccatgctcttatgggcttgataatctcaaacctgccttcttggatttatttgaaaatagtcatgaatatgaacaagtctacacgggctcactatctgaagaaaaccaagaagaactaagcattgataactgcattgtaacttggccagatgctccagcatatgcacgttcactgcaaagcaccctactggttttgaaaatctgaccttgtcatttcaatagttattaacatgactaaatattatcttaattaagaggaaaatagaagttgcttttaggggtttctgacatatattctggatactatccgaggtaattttgaagtttaatataaatgctcatatcaaatgaatatagaactaatattgtcgggaacacctaatagaaaggaatactattatagcaaatcacagaatgatagactcaagcataaaacttggcagttttatctgcttcaaaatgccattgatcattattcctgtattttctctgaaactgattataaaaaccaatgtccagctactcttttgacacttgaagaaatggagatcgatttgatttgtttataagcagacacactgcaatttacaaagatctctttacggttttataaaattatcttccagtttgtacatttatatggaattgttctttatcaagggtagctaatgacatgaaaataattgtgaaatatggaattatttctgacacatgaagcccactaaactatgctttcttataatgcatatttcttctcagtttaaatgtataatgttcctttttttttttttgagacagggtctcactctgtcgcccaggctggaatgcagtggcatgatctcggctcactgcaagctctgcctcccgggttcacgccattctcctgcctcagcctcccaagtagctgggactacaggcatccaccaccacgcctggctaattttttgtatttttagtagagatggggtttcaccgtgttagccaggctggtcttgaactcctgacctcaggcgatgtgcctgccttggcctcccaaagtgctgggattacaggcctgagccaccgcacccagccaag

SEQ ID NO: 2109 - DNA, 2653 bp, Homo sapiens; identical to SEQ ID NO: 2107

SEQ ID NO: 2110 - DNA, 2135 bp, Homo sapiens; identical to SEQ ID NO: 2108

SEQ ID NO: 2111 - DNA, 3515 bp, Homo sapiens
ggcagcaccggccccgggtcgcggcgttcccggcgctcggcaggccgcaggatggcctggtcccgggccgggagcccagcaggccgggagcggctgaggccacaccccgcgggccgggccgcttccctccggtgaatcatcgctcgcagcggcggcgcccgcagtggccgcagcagcgcgccgggccctggccgcgccccagccgagcgcagcgcggagtcgccccgacctttctctgcgcagtacggccgccgggaccgcagcatggcgggcatcgcggccaagctggcgaaggaccgggaggcggccgaggggctgggctcccacgacagggccatcaagtacctcaaccaggactacgaggcgctgcggaacgagtgcctggaggccgggacgctcttccaggacccgtccttcccggccatcccctcggccctgggcttcaaggagttggggccctactccagcaaaacccggggcatcgagtggaagcgccccacggagatctgcgctgacccccagtttatcattggaggagccacccgcacagacatctgccaaggagccctaggtgactgctggctgctggcagccattgcctccctcaccttgaatgaagaaatcctggctcgagtcgtccccctaaaccagagcttccaggaaaactatgcagggatctttcacttccagttctggcaatacggcgagtgggtggaggtggtggtggatgacaggctgcccaccaaggacggggagctgctctttgtgcattcagccgaagggagcgagttctggagcgccctgctggagaaggcatacgccaagatcaacggatgctatgaagcactatcagggggtgccaccactgagggcttcgaagacttcaccggaggcattgctgagtggtatgagttgaagaagccccctcccaacctgttcaagatcatccagaaagctctgcaaaaaggctctctccttggctgctccatcgacatcaccagcgccgcggactcggaggccatcacgtttcagaagctggtgaaggggcacgcgtactcggtcaccggagccgaggaggttgaaagtaacggaagcctacagaaactgatccgcatccgaaatccctggggagaagtggagtggacagggcggtggaatgacaactgcccaagctggaacactatagacccagaggagagggaaaggctgaccagacggcatgaagatggagaattctggatgtctttcagtgacttcctgaggcactattcccgcctggagatctgtaacctgaccccagacactctcaccagcgatacctacaagaagtggaaactcaccaaaatggatgggaactggaggcggggctccaccgcgggaggttgcaggaactacccgaacacattctggatgaaccctcagtacctgatcaagctggaggaggaggatgaggacgaggaggatggggagagcggctgcaccttcctggtggggctcattcagaagcaccgacggcggcagaggaagatgggcgaggacatgcacaccatcggctttggcatctatgagttaagtgggcagaccaacatccacctcagcaaaaacttcttcctgacgaatcgcgccagggagcgctcagacaccttcatcaacctccgggaggtgctcaaccgcttcaagctgccgccaggagagtacattctcgtgccttccaccttcgaacccaacaaggatggggatttctgcatccgggtcttttctgaaaagaaagctgactaccaagctgtcgatgatgaaatcgaggccaatcttgaagagttcgacatcagcgaggatgacattgatgatggattcaggagactgtttgcccagttggcaggagaggatgcggagatctctgcctttgagctgcagaccatcctgagaagggttctagcaaagcgccaagatatcaagtcagatggcttcagcatcgagacatgcaaaattatggttgacatgctagattcggacgggagtggcaagctggggctgaaggagttctacattctctggacgaagattcaaaaataccaaaaaatttaccgagaaatcgacgttgacaggtctggtaccatgaattcctatgaaatgcggaaggcattagaagaagcaggtttcaagatgccctgtcaactccaccaagtcatcgttgctcggtttgcagatgaccagctcatcatcgattttgataattttgttcggtgtttggttcggctggaaacgctattcaagatatttaagcagctggatcccgagaatactggaacaatagagctcgaccttatctcttggctctgtttctcagtactttgaagttataactaatctgcctgaagacttctcatgatggaaaatcagccaaggactaagcttccatagaaatacactttgtatctggacctcaaaattatgggaacatttacttaaacggatgatcatagctgaaaataatgatactgtcaatttgagatagcagaagtttcacacatcaaagtaaaagatttgcatatcattatactaaatgcaaatgagtcgcttaacccttgacaaggtcaaagaaagctttaaatctgtaaatagtatacactttttacttttacacactttcctgttcatagcaatattaaatcaggaaaaaaaaatgcagggaggtatttaacagctgagcaaaaacattgagtcgctctcaaaggacacgaggcccttggcagggaatatttaaagcaacttcaagtttaaaatgcagctgttgattctaccaaacaacagtccaagattaccatttcccatgagccaactgggaaacatggtatatcatgaagtaatcttgtcaaggcatctggagagtccaggagagaagactcacctctgtcgcttgggttaaacaagagacaggttttgtagaatattgattggtaatagtaaatcgttctccttacaatcaagttcttgaccctattcggccttatacatctggtcttacaaagaccaaagggatcctgcgcttgatcaactgaaccagtatgccaaaaccaggcatccaatttgtaaaccaattatgataaaggacaaaataagctgtttgccacctcaaaactttatgaacttcaccaccactagtgtctgtccatggagttagaggggacatcacttagaagttcttatagaaaggacacaagtttgtttcctggctttaccttgggaaaatgctagcaacattatagaaattttgccttgttgccttatcttcttccaaatgtactgttaaataaaaataaagggttaccccatgcaatcacaccatgccatgttttccttcctggagggcagccccacaggacggtttatgagcacacaattatagcttgtttctactttaacaaggtatgctgcctctgtaaattcatgtattcaaaggaaaagacaccttgcctataattaaaatgtggaactataaaattttttaaaatcca

SEQ ID NO: 2112 - DNA, 3529 bp, Homo sapiens
ggcagcaccggccccgggtcgcggcgttcccggcgctcggcaggccgcaggatggcctggtcccgggccgggagcccagcaggccgggagcggctgaggccacaccccgcgggccgggccgcttccctccggtgaatcatcgctcgcagcggcggcgcccgcagtggccgcagcagcgcgccgggccctggccgcgccccagccgagcgcagcgcggagtcgccccgacctttctctgcgcagtacggccgccgggaccgcagcatggcgggcatcgcggccaagctggcgaaggaccgggaggcggccgaggggctgggctcccacgacagggccatcaagtacctcaaccaggactacgaggcgctgcggaacgagtgcctggaggccgggacgctcttccaggacccgtccttcccggccatcccctcggccctgggcttcaaggagttggggccctactccagcaaaacccggggcatcgagtggaagcgccccacggagatctgcgctgacccccagtttatcattggaggagccacccgcacagacatctgccaaggagccctaggtgactgctggctgctggcagccattgcctccctcaccttgaatgaagaaatcctggctcgagtcgtccccctaaaccagagcttccaggaaaactatgcagggatctttcacttccagttctggcaatacggcgagtgggtggaggtggtggtggatgacaggctgcccaccaaggacggggagctgctctttgtgcattcagccgaagggagcgagttctggagcgccctgctggagaaggcatacgccaagatcaacggatgctatgaagcactatcagggggtgccaccactgagggcttcgaagacttcaccggaggcattgctgagtggtatgagttgaagaagccccctcccaacctgttcaagatcatccagaaagctctgcaaaaaggctctctccttggctgctccatcgacatcaccagcgccgcggactcggaggccatcacgtttcagaagctggtgaaggggcacgcgtactcggtcaccggagccgaggaggttgaaagtaacggaagcctacagaaactgatccgcatccgaaatccctggggagaagtggagtggacagggcggtggaatgacaactgcccaagctggaacactatagacccagaggagagggaaaggctgaccagacggcatgaagatggagaattctggatgtctttcagtgacttcctgaggcactattcccgcctggagatctgtaacctgaccccagacactctcaccagcgatacctacaagaagtggaaactcaccaaaatggatgggaactggaggcggggctccaccgcgggaggttgcaggaactacccgaacacattctggatgaaccctcagtacctgatcaagctggaggaggaggatgaggacgaggaggatggggagagcggctgcaccttcctggtggggctcattcagaagcaccgacggcggcagaggaagatgggcgaggacatgcacaccatcggctttggcatctatgaggtgcagagcgcaggttaagtgggcagaccaacatccacctcagcaaaaacttcttcctgacgaatcgcgccagggagcgctcagacaccttcatcaacctccgggaggtgctcaaccgcttcaagctgccgccaggagagtacattctcgtgccttccaccttcgaacccaacaaggatggggatttctgcatccgggtcttttctgaaaagaaagctgactaccaagctgtcgatgatgaaatcgaggccaatcttgaagagttcgacatcagcgaggatgacattgatgatggattcaggagactgtttgcccagttggcaggagaggatgcggagatctctgcctttgagctgcagaccatcctgagaagggttctagcaaagcgccaagatatcaagtcagatggcttcagcatcgagacatgcaaaattatggttgacatgctagattcggacgggagtggcaagctggggctgaaggagttctacattctctggacgaagattcaaaaataccaaaaaatttaccgagaaatcgacgttgacaggtctggtaccatgaattcctatgaaatgcggaaggcattagaagaagcaggtttcaagatgccctgtcaactccaccaagtcatcgttgctcggtttgcagatgaccagctcatcatcgattttgataattttgttcggtgtttggttcggctggaaacgctattcaagatatttaagcagctggatcccgagaatactggaacaatagagctcgaccttatctcttggctctgtttctcagtactttgaagttataactaatctgcctgaagacttctcatgatggaaaatcagccaaggactaagcttccatagaaatacactttgtatctggacctcaaaattatgggaacatttacttaaacggatgatcatagctgaaaataatgatactgtcaatttgagatagcagaagtttcacacatcaaagtaaaagatttgcatatcattatactaaatgcaaatgagtcgcttaacccttgacaaggtcaaagaaagctttaaatctgtaaatagtatacactttttacttttacacactttcctgttcatagcaatattaaatcaggaaaaaaaaatgcagggaggtatttaacagctgagcaaaaacattgagtcgctctcaaaggacacgaggcccttggcagggaatatttaaagcaacttcaagtttaaaatgcagctgttgattctaccaaacaacagtccaagattaccatttcccatgagccaactgggaaacatggtatatcatgaagtaatcttgtcaaggcatctggagagtccaggagagaagactcacctctgtcgcttgggttaaacaagagacaggttttgtagaatattgattggtaatagtaaatcgttctccttacaatcaagttcttgaccctattcggccttatacatctggtcttacaaagaccaaagggatcctgcgcttgatcaactgaaccagtatgccaaaaccaggcatccaatttgtaaaccaattatgataaaggacaaaataagctgtttgccacctcaaaactttatgaacttcaccaccactagtgtctgtccatggagttagaggggacatcacttagaagttcttatagaaaggacacaagtttgtttcctggctttaccttgggaaaatgctagcaacattatagaaattttgccttgttgccttatcttcttccaaatgtactgttaaataaaaataaagggttaccccatgcaatcacaccatgccatgttttccttcctggagggcagccccacaggacggtttatgagcacacaattatagcttgtttctactttaacaaggtatgctgcctctgtaaattcatgtattcaaaggaaaagacaccttgcctataattaaaatgtggaactataaaattttttaaaatcca

SEQ ID NO: 2113 - DNA, 3419 bp, Homo sapiens
ttccctccggtgaatcatcgctcgcagcggcggcgcccgcagtggccgcagcagcgcgccgggccctggccgcgccccagccgagcgcagcgcggagtcgccccgacctttctctgcgcagtacggccgccgggaccgcagcatggcgggcatcgcggccaagctggcgaaggaccgggaggcggccgaggggctgggctcccacgagagggccatcaagtacctcaaccaggactacgaggcgctgcggaacgagtgcctggaggccgggacgctcttccaggacccgtccttcccggccatcccctcggccctgggcttcaaggagttggggccctactccagcaaaacccggggcatgagatggaagcgccccacggagatctgcgctgacccccagtttatcattggaggagccacccgcacagacatctgccaaggagccctaggtgactgctggctgctggcagccattgcctccctcaccttgaatgaagaaatcctggctcgagtcgtccccctaaaccagagcttccaggaaaactatgcagggatctttcacttccagttctggcaatacggcgagtgggtggaggtggtggtggatgacaggctgcccaccaaggacggggagctgctctttgtgcattcagccgaagggagcgagttctggagcgccctgctggagaaggcatacgccaagatcaacggatgctatgaagctctatcagggggtgccaccactgagggcttcgaagacttcaccggaggcattgctgagtggtatgagttgaagaagccccctcccaacctgttcaagatcatccagaaagctctgcaaaaaggctctctccttggctgctccatcgacatcaccagcgccgcggactcggaggccatcacgtttcagaagctggtgaaggggcacgcgtactcggtcaccggagccgaggaggttgaaagtaacggaagcctacagaaactgatccgcatccgaaatccctggggagaagtggagtggacagggcggtggaatgacaactgcccaagctggaacactatagacccagaggagagggaaaggctgaccagacggcatgaagatggagaattctggatgtctttcagtgacttcctgaggcactattcccgcctggagatctgtaacctgaccccagacactctcaccagcgatacctacaagaagtggaaactcaccaaaatggatgggaactggaggcggggctccaccgcgggaggttgcaggaactacccgaacacattctggatgaaccctcagtacctgatcaagctggaggaggaggatgaggacgaggaggatggggagagcggctgcaccttcctggtggggctcattcagaagcaccgacggcggcagaggaagatgggcgaggacatgcacaccatcggctttggcatctatgaggttccagaggagttaagtgggcagaccaacatccacctcagcaaaaacttcttcctgacgaatcgcgccagggagcgctcagacaccttcatcaacctccgggaggtgctcaaccgcttcaagctgccgccaggagagtacattctcgtgccttccaccttcgaacccaacaaggatggggatttctgcatccgggtcttttctgaaaagaaagctgactaccaagctgtcgatgatgaaatcgaggccaatcttgaagagttcgacatcagcgaggatgacattgatgatggagtcaggagactgtttgcccagttggcaggagaggatgcggagatctctgcctttgagctgcagaccatcctgagaagggttctagcaaagcgccaagatatcaagtcagatggcttcagcatcgagacatgcaaaattatggttgacatgctagattcggacgggagtggcaagctggggctgaaggagttctacattctctggacgaagattcaaaaataccaaaaaatttaccgagaaatcgacgttgacaggtctggtaccatgaattcctatgaaatgcggaaggcattagaagaagcaggtttcaagatgccctgtcaactccaccaagtcatcgttgctcggtttgcagatgaccagctcatcatcgattttgataattttgttcggtgtttggttcggctggaaacgctattcaagatatttaagcagctggatcccgagaatactggaacaatagagctcgaccttatctcttggctctgtttctcagtactttgaagttataactaatctgcctgaagacttctcatgatggaaaatcagccaaggactaagcttccatagaaatacactttgtatctggacctcaaaattatgggaacatttacttaaacggatgatcatagctgaaaataatgatactgtcaatttgagatagcagaagtttcacacatcaaagtaaaagatttgcatatcattatactaaatgcaaatgagtcgcttaacccttgacaaggtcaaagaaagctttaaatctgtaaatagtatacactttttacttttacacactttcctgttcatagcaatattaaatcaggaaaaaaaaatgcagggaggtatttaacagctgagcaaaaacattgagtcgctctcaaaggacacgaggcccttggcagggaatatttaaagcaacttcaagtttaaaatgcagctgttgattctaccaaacaacagtccaagattaccatttcccatgagccaactgggaaacatggtatatcatgaagtaatcttgtcaaggcatctggagagtccaggagaggagactcacctctgtcgcttgggttaaacaagagacaggttttgtagaatattgattggtaatagtaaatcgttctccttacaatcaagttcttgaccctattcggccttatacatctggtcttacaaagaccaaagggatcctgcgcttgatcaactgaaccagtatgccaaaaccaggcatccaatttgtaaaccaattatgataaaggacaaaataagctgtttgccacctcaaaactttatgaacttcaccaccactagtgtctgtccatggagttagaggggacatcacttagaagttcttatagaaaggacacaagtttgtttcctggctttaccttgggaaaatgctagcaacattatagaaattttgccttgttgccttatcttcttccaaatgtactgttaaataaaaataaagggttaccccatgcaatcacaccatgccatgttttccttcctggagggcagccccacaggacggtttatgagcacacaattatagcttgtttctactttaacagggtatgctgcctctgtaaattcatgtattcaaaggaaaagacaccttgcctataattaaaatgtggaactataaaattttttaaaatccaaaaaaaaaaaaaaa

SEQ ID NO: 2114 - DNA, 3530 bp, Homo sapiens
ggcagcaccggccccgggtcgcggcgttcccggcgctcggcaggccgcaggatggcctggtcccgggccgggagcccagcaggccgggagcggctgaggccacaccccgcgggccgggccgcttccctccggtgaatcatcgctcgcagcggcggcgcccgcagtggccgcagcagcgcgccgggccctggccgcgccccagccgagcgcagcgcggagtcgccccgacctttctctgcgcagtacggccgccgggaccgcagcatggcgggcatcgcggccaagctggcgaaggaccgggaggcggccgaggggctgggctcccacgacagggccatcaagtacctcaaccaggactacgaggcgctgcggaacgagtgcctggaggccgggacgctcttccaggacccgtccttcccggccatcccctcggccctgggcttcaaggagttggggccctactccagcaaaacccggggcatcgagtggaagcgccccacggagatctgcgctgacccccagtttatcattggaggagccacccgcacagacatctgccaaggagccctaggtgactgctggctgctggcagccattgcctccctcaccttgaatgaagaaatcctggctcgagtcgtccccctaaaccagagcttccaggaaaactatgcagggatctttcacttccagttctggcaatacggcgagtgggtggaggtggtggtggatgacaggctgcccaccaaggacggggagctgctctttgtgcattcagccgaagggagcgagttctggagcgccctgctggagaaggcatacgccaagatcaacggatgctatgaagcactatcagggggtgccaccactgagggcttcgaagacttcaccggaggcattgctgagtggtatgagttgaagaagccccctcccaacctgttcaagatcatccagaaagctctgcaaaaaggctctctccttggctgctccatcgacatcaccagcgccgcggactcggaggccatcacgtttcagaagctggtgaaggggcacgcgtactcggtcaccggagccgaggaggttgaaagtaacggaagcctacagaaactgatccgcatccgaaatccctggggagaagtggagtggacagggcggtggaatgacaactgcccaagctggaacactatagacccagaggagagggaaaggctgaccagacggcatgaagatggagaattctggatgtctttcagtgacttcctgaggcactattcccgcctggagatctgtaacctgaccccagacactctcaccagcgatacctacaagaagtggaaactcaccaaaatggatgggaactggaggcggggctccaccgcgggaggttgcaggaactacccgaacacattctggatgaaccctcagtacctgatcaagctggaggaggaggatgaggacgaggaggatggggagagcggctgcaccttcctggtggggctcattcagaagcaccgacggcggcagaggaagatgggcgaggacatgcacaccatcggctttggcatctatgaggtgcagagcgcagggttaagtgggcagaccaacatccacctcagcaaaaacttcttcctgacgaatcgcgccagggagcgctcagacaccttcatcaacctccgggaggtgctcaaccgcttcaagctgccgccaggagagtacattctcgtgccttccaccttcgaacccaacaaggatggggatttctgcatccgggtcttttctgaaaagaaagctgactaccaagctgtcgatgatgaaatcgaggccaatcttgaagagttcgacatcagcgaggatgacattgatgatggattcaggagactgtttgcccagttggcaggagaggatgcggagatctctgcctttgagctgcagaccatcctgagaagggttctagcaaagcgccaagatatcaagtcagatggcttcagcatcgagacatgcaaaattatggttgacatgctagattcggacgggagtggcaagctggggctgaaggagttctacattctctggacgaagattcaaaaataccaaaaaatttaccgagaaatcgacgttgacaggtctggtaccatgaattcctatgaaatgcggaaggcattagaagaagcaggtttcaagatgccctgtcaactccaccaagtcatcgttgctcggtttgcagatgaccagctcatcatcgattttgataattttgttcggtgtttggttcggctggaaacgctattcaagatatttaagcagctggatcccgagaatactggaacaatagagctcgaccttatctcttggctctgtttctcagtactttgaagttataactaatctgcctgaagacttctcatgatggaaaatcagccaaggactaagcttccatagaaatacactttgtatctggacctcaaaattatgggaacatttacttaaacggatgatcatagctgaaaataatgatactgtcaatttgagatagcagaagtttcacacatcaaagtaaaagatttgcatatcattatactaaatgcaaatgagtcgcttaacccttgacaaggtcaaagaaagctttaaatctgtaaatagtatacactttttacttttacacactttcctgttcatagcaatattaaatcaggaaaaaaaaatgcagggaggtatttaacagctgagcaaaaacattgagtcgctctcaaaggacacgaggcccttggcagggaatatttaaagcaacttcaagtttaaaatgcagctgttgattctaccaaacaacagtccaagattaccatttcccatgagccaactgggaaacatggtatatcatgaagtaatcttgtcaaggcatctggagagtccaggagagaagactcacctctgtcgcttgggttaaacaagagacaggttttgtagaatattgattggtaatagtaaatcgttctccttacaatcaagttcttgaccctattcggccttatacatctggtcttacaaagaccaaagggatcctgcgcttgatcaactgaaccagtatgccaaaaccaggcatccaatttgtaaaccaattatgataaaggacaaaataagctgtttgccacctcaaaactttatgaacttcaccaccactagtgtctgtccatggagttagaggggacatcacttagaagttcttatagaaaggacacaagtttgtttcctggctttaccttgggaaaatgctagcaacattatagaaattttgccttgttgccttatcttcttccaaatgtactgttaaataaaaataaagggttaccccatgcaatcacaccatgccatgttttccttcctggagggcagccccacaggacggtttatgagcacacaattatagcttgtttctactttaacaaggtatgctgcctctgtaaattcatgtattcaaaggaaaagacaccttgcctataattaaaatgtggaactataaaattttttaaaatcca

SEQ ID NO: 2115 - DNA, 1779 bp, Homo sapiens
atggaccatgctgtaccagcttgtcaggactggtttgcacaaacatcaagattgatgattgcacccgaaaggaaccaactgtccagccgagctacacgaggagatgaagggagcagaaatgtccagctcctgggctacgtggccaaagaggcagtcagcatgtttacctctctgaagcgtgcattctaccatcaggacacccatccatttgtcttccccacactgcacagtgaatccaggcgtggggaggtgctgaggggccgaggccgcggccagttagacgccgtactgtccagagagcactgcggcgggagccggcagtcggagcagccttggagcaggaggagcagcagcagcagcagccgtcgccgtttgcggagcgcagccgagccggccatggcgttgtcgatgccgttgaacgggctgaaggaggaggacaaagagcccctcattgagctcctcgtcaaagctggcagtgatggagttgtatttagtgtcacaactgttgacctgaaatggaagcctgcagacctacagaacttagctcccaggacccacccaccgtttgtaagtttcaacagtgaagtcaaaacggatgtaagtaagattgaggaatttcttgaagaagtcttatgccctcccaagtacttaaagctttcaccaaaacacccagaatcaaatactgctggaatggacatctttgccaaattctctgcatttatcaagaattgaaggcgagaggctaatgaagcactggagaaggatctcctgaaaaccctgcagaaactggataaatatctgaattctcctctccctgatgaaattgatgaaaatagtatagaggacattaagttttctacacataaatttctggatggcaatgaaatgacattagctgattgcagcctgctccccaaactgcatattgtcaaggtggtggccaaaaaatatcacaactttgatattccaaaagagatgactggcatctggagatacctaactaatgcatatagtagggacgagttcatcaatacctgtcccagtgataaggaggttgaaatagcatatagtgatgccaaaagacccaccaaagtttctcagagcacctccctcgcggggtggggaaaaggacctcactccccacgccccctccttccgctgcgggagatagccacaccttccccctatcggcgccaagcaggtggccaggccctcgggacctcgcgcccccgcagccagtggcccggccagctcgtgcgtcacgtgacgcgggtcagctgcaccgccgggacctccaggcaccgcggcggcgaccgcccagcgcgtggtctcgagatctcatctttccgcgcccctccccccacggtcccggaaaagggggaggccggtgacgtcatcatccgggttcttgtcggcggggctacggttcacaatggaacaaaaacaagcggcccgagtcaaactatgagcgacgcggctgcggctcacgcgattaaccctgtcgtggccacacaccccgccagtccctgccgcccagcccctcccgagtgctcccgggcctcgcgggagcccgccgccgccgcctctctctcacgggaggcggccgccttagcgcccggtgcttgggtcggcgccgggagcgaggagcgagctacttcaaagccaccaggcctggagcggggacagaggcggcgactaggggaaggtgaagccgtcgctgcaggaggaggagcaggaggaggtgacgcaggagaaacgcaccgcccggagcccgtctga

SEQ ID NO: 2116 - DNA, 2180 bp, Homo sapiens
cgcgagctgagaggagcaggtagaggggcagaggcgggactgtcgtctgggggagccgcccaggaggctcctcaggccgaccccagaccctggctggccaggatgaagtatctccggcaccggcggcccaatgccaccctcattctggccatcggcgctttcaccctcctcctcttcagtctgctagtgtcaccacccacctgcaaggtccaggagcagccaccggcgatccccgaggccctggcctggcccactccacccacccgcccagccccggccccgtgccatgccaacacctctatggtcacccacccggacttcgccacgcagccgcagcacgttcagaacttcctcctgtacagacactgccgccactttcccctgctgcaggacgtgcccccctctaagtgcgcgcagccggtcttcctgctgctggtgatcaagtcctcccctagcaactatgtgcgccgcgagctgctgcggcgcacgtggggccgcgagcgcaaggtacggggtttgcagctgcgcctcctcttcctggtgggcacagcctccaacccgcacgaggcccgcaaggtcaaccggctgctggagctggaggcacagactcacggagacatcctgcagtgggacttccacgactccttcttcaacctcacgctcaagcaggtcctgttcttacagtggcaggagacaaggtgcgccaacgccagcttcgtgctcaacggggatgatgacgtctttgcacacacagacaacatggtcttctacctgcaggaccatgaccctggccgccacctcttcgtggggcaactgatccaaaacgtgggccccatccgggctttttggagcaagtactatgtgccagaggtggtgactcagaatgagcggtacccaccctattgtgggggtggtggcttcttgctgtcccgcttcacggccgctgccctgcgccgtgctgcccatgtcttggacatcttccccattgatgatgtcttcctgggtatgtgtctggagcttgagggactgaagcctgcctcccacagcggcatccgcacgtctggcgtgcgggctccatcgcaacgcctgtcctcctttgacccctgcttctaccgagacctgctgctggtgcaccgcttcctaccttatgagatgctgctcatgtgggatgcgctgaaccagcccaacctcacctgcggcaatcagacacagatctactgagtcagcatcagggtccccagcctctgggctcctgtttccataggaaggggcgacaccttcctcccaggaagctgagacctttgtggtctgagcataagggagtgccagggaaggtttgaggtttgatgagtgaatattctggctggcgaactcctacacatccttcaaaacccacctggtactgttccagcatcttccctggatggctggaggaactccagaaaatatccatcttctttttgtggctgctaatggcagaagtgcctgtgctagagttccaactgtggatgcatccgtcccgtttgagtcaaagtcttacttccctgctctcacctactcacagacgggatgctaagcagtgcacctgcagtggtttaatggcagataagctccgtctgcagttccaggccagccagaaactcctgtgtccacatagagctgacgtgagaaatatctttcagcccaggagagaggggtcctgatcttaaccctttcctgggtctcagacaactcagaaggttggggggataccagagaggtggtggaataggaccgccccctccttacttgtgggatcaaatgctgtaatggtggaggtgtgggcagaggagggaggcaagtgtcctttgaaagttgtgagagctcagagtttctggggtcctcattaggagcccccatccctgtgttccccaagaattcagagaacagcactggggctggaatgatctttaatgggcccaaggccaacaggcatatgcctcactactgcctggagaagggagagattcaggtcctccagcagcctccctcacccagtatgttttacagattacggggggaccgggtgagccagtgaccccctgtagcccccagcttcaggcctcagtgtctgccagtcaagcttcacaggcattgtgatggggcagccttggggaatataaaattttgtgaagacttgg

SEQ ID NO: 2117 - DNA, 2395 bp, Homo sapiens
agagcctcctagcccgtcggtgtctgcgcccatcgatccctttgtctatccccgaccatggcgaagctgattgcgctcaccctcttggggatgggactggcactcttcaggaaccaccagtcttcttaccaaacacgacttaatgctctccgagaggtacaacccgtagaacttcctaactgtaatttagttaaaggaatcgaaactggctctgaagacttggagatactgcctaatggactggctttcattagctctggattaaagtatcctggaataaagagcttcaaccccaacagtcctggaaaaatacttctgatggacctgaatgaagaagatccaacagtgttggaattggggatcactggaagtaaatttgatgtatcttcatttaaccctcatgggattagcacattcacagatgaagataatgccatgtacctcctggtggtgaaccatccagatgccaagtccacagtggagttgtttaaatttcaagaagaagaaaaatcgcttttgcatctaaaaaccatcagacataaacttctgcctaatttgaatgatattgttgctgtgggacctgagcacttttatggcacaaatgatcactattttcttgacccctacttacaatcctgggagatgtatttgggtttagcgtggtcgtatgttgtctactatagtccaagtgaagttcgagtggtggcagaaggatttgattttgctaatggaatcaacatttcacccgatggcaagtatgtctatatagctgagttgctggctcataagattcatgtgtatgaaaagcatgctaattggactttaactccattgaagtcccttgactttaataccctcgtggataacatatctgtggatcctgagacaggagacctttgggttggatgccatcccaatggcatgaaaatcttcttctatgactcagagaatcctcctgcatcagaggtgcttcgaatccagaacattctaacagaagaacctaaagtgacacaggtttatgcagaaaatggcacagtgttgcaaggcagtacagttgcctctgtgtacaaagggaaactgctgattggcacagtgtttcacaaagctctttactgtgagctctaacagaccgatttgcacccatgccatagaaactgaggccattatttcaaccgcttgccatattccgaggacccagtgttcttagctgaacaatgaatgctgaccctaaatgtggacatcatgaagcatcaaagcactgtttaactgggagtgatatgatgtgtagggcttttttttgagaatacactatcaaatcagtcttggaatacttgaaaacctcatttaccataaaaatccttctcactaaaatggataaatcagttatgtcaattgtcagatattaaataacagtgtgtgaccccaaaagtacttaccctaaaacatgtgttgcctgaaagcacatgtgtgtatcgctgccttgccatgtcttgttcagaagacacaggggagcagggttagctcacgtgtctttagaactccagtactcacccagggactccagttcacaggccagaaaacatatgcattatgaagttcccctctactccatgcacatagtaagtctgactatggcagtcagacttacttactcccattttcccttcgatatatgactttttctcagtaaatattaacctgaactattccaactccccttgtactcttgctttttcaattctcctgttgcaatgacacataggaaaatcttaaaattcttgggagtgttgtcacacctgaaaattatgagtctctatgatcttggcacaaattgtacatttgagtgtctttgacttggttaaaggaagtttgttcacttcgatgactggatacagaatgaatcccataattgacatgggcgacagtaaaagtgtccccaaagactacactgttgttgaggtggtggtagtgctggtgggtttttgtttaatatttaaacttcttgttgtggaggctgaaaagaaaaaaaataatagaaaggtaaacaaacaaataaatagaaaagatcaacaacccctttggctatctactgagacatgactaggaagaaaacatgactttatcattttgttatagaagctgatatataaggttacacattttcatttatttgtttttctgatttgaaggtataaccttcatgatgaattacttcttcagggtgttaaggcagtgactttagaaacaaatttttttcttgcttttgttttgtttttgagaccgaatctcactctgttgcccaggctggagtgcagtggtgcgatcttggctcactgcaacttctacctccgaggttcaagagattcttgtgcctcagcctcccggatagctgccg

SEQ ID NO: 2118 - DNA, 2609 bp, Homo sapiens
gaataatcaagaagttacaccagggacagcatttcgctgcaggtctgttggagtttgctggaagtccactccagaccctgtttgcctgggtatcaccagtggaggctgcagaacggcaaatattgctgcctgatttttcttctggaagcttcatcccagaggggcatccgcctgtatgagggattaaaatatccaggcatgccaaactttgcgccagatgaaccaggaaaaatcttcttgatggatctgaatgaacaaaacccaagggcacaagcactagaaatcagtggtggatttgacaaagaattatttaatccacatgggatcagtattttcatcgacaaagaacacgacttaatgctctccgagaggtacaacccgtagaacttcctaactgtaatttagttaaaggaatcgaaactggctctgaagacttggagatactgcctaatggactggctttcattagctctggattaaagtatcctggaataaagagcttcaaccccaacagtcctggaaaaatacttctgatggacctgaatgaagaagatccaacagtgttggaattggggatcactggaagtaaatttgatgtatcttcatttaaccctcatgggattagcacattcacagatgaagataatgccatgtacctcctggtggtgaaccatccagatgccaagtccacagtggagttgtttaaatttcaagaagaagaaaaatcgcttttgcatctaaaaaccatcagacataaacttctgcctaatttgaatgatattgttgctgtgggacctgagcacttttatggcacaaatgatcactattttcttgacccctacttacaatcctgggagatgtatttgggtttagcgtggtcgtatgttgtctactatagtccaagtgaagttcgagtggtggcagaaggatttgattttgctaatggaatcaacatttcacccgatggcaagtatgtctatatagctgagttgctggctcataagattcatgtgtatgaaaagcatgctaattggactttaactccattgaagtcccttgactttaataccctcgtggataacatatctgtggatcctgagacaggagacctttgggttggatgccatcccaatggcatgaaaatcttcttctatgactcagagaatcctcctgcatcagaggtgcttcgaatccagaacattctaacagaagaacctaaagtgacacaggtttatgcagaaaatggcacagtgttgcaaggcagtacagttgcctctgtgtacaaagggaaactgctgattggcacagtgtttcacaaagctctttactgtgagctctaacagaccgatttgcacccatgccatagaaactgaggccattatttcaaccgcttgccatattccgaggacccagtgttcttagctgaacaatgaatgctgaccctaaatgtggacatcatgaagcatcaaagcactgtttaactgggagtgatatgatgtgtagggcttttttttgagaatacactatcaaatcagtcttggaatacttgaaaacctcatttaccataaaaatccttctcactaaaatggataaatcagttatgtcaattgtcagatattaaataacagtgtgtgaccccaaaagtacttaccctaaaacatgtgttgcctgaaagcacatgtgtgtatcgctgccttgccatgtcttgttcagaagacacaggggagcagggttagctcacgtgtctttagaactccagtactcacccagggactccagttcacaggccagaaaacatatgcattatgaagttcccctctactccatgcacatagtaagtctgactatggcagtcagacttacttactcccattttcccttcgatatatgactttttctcagtaaatattaacctgaactattccaactccccttgtactcttgctttttcaattctcctgttgcaatgacacataggaaaatcttaaaattcttgggagtgttgtcacacctgaaaattatgagtctctatgatcttggcacaaattgtacatttgagtgtctttgacttggttaaaggaagtttgttcacttcgatgactggatacagaatgaatcccataattgacatgggcgaagctaaaagtgtccccaaagactacactgttgttgaggtggtggtagtgctggtgggtttttgtttaatatttaaacttcttgttgtggaggctgaaaagaaaaaaaataatagaaaggtaaacaaacaaataaatagaaaagatcaacaacccctttggctatctactgagacatgactaggaagaaaacatgactttatcattttgttatagaagctgatatataaaggttacacattttcatttatttgtttttctgatttgaaggtataaccttcatgatgaattacttcttcagggtgttaaggcagtgactttagaaacaaatttttttcttgtttttgttttgtttttgagaccgaatctcactctgttgcccaggctggagtgcagtggtgcgatcttggctcactgcaacttctacctccgaggttcaagagattcttgtgcctcagcctcccggatagctgg

SEQ ID NO: 2119 - DNA, 2748 bp, Homo sapiens
gaataatcaagaagttacaccagggacagcatttcgctgcaggtctgttggagtttgctggaagtccactccagaccctgtttgcctgggtatcaccagtggaggctgcagaacggcaaatattgctgcctgatttttcttctggaagcttcatcccagaggggcatccgcctgtatgagttggaaggagcaaaatgggacttttggctgaaagtgctgagctcctgcggtgggggctgaccgcaagccacgccttctgtgcacctggtcggcccagctagctgcggacccggcggggaggggcggggcgggccaatcggcgctgccccagcagggctgcggctgcaggcaggcagagcctcctagcccgtcggtgtctgcgcccatcgatccctttgtctatccccgaccatggcgaagctgattgcgctcaccctcttggggatgggactggcactcttcaggaaccaccagtcttcttaccaaacacgacttaatgctctccgagaggtacaacccgtagaacttcctaactgtaatttagttaaaggaatcgaaactggctctgaagacttggagatactgcctaatggactggctttcattagctctggattaaagtatcctggaataaagagcttcaaccccaacagtcctggaaaaatacttctgatggacctgaatgaagaagatccaacagtgttggaattggggatcactggaagtaaatttgatgtatcttcatttaaccctcatgggattagcacattcacagatgaagataatgccatgtacctcctggtggtgaaccatccagatgccaagtccacagtggagttgtttaaatttcaagaagaagaaaaatcgcttttgcatctaaaaaccatcagacataaacttctgcctaatttgaatgatattgttgctgtgggacctgagcacttttatggcacaaatgatcactattttcttgacccctacttacaatcctgggagatgtatttgggtttagcgtggtcgtatgttgtctactatagtccaagtgaagttcgagtggtggcagaaggatttgattttgctaatggaatcaacatttcacccgatggcaagtatgtctatatagctgagttgctggctcataagattcatgtgtatgaaaagcatgctaattggactttaactccattgaagtcccttgactttaataccctcgtggataacatatctgtggatcctgagacaggagacctttgggttggatgccatcccaatggcatgaaaatcttcttctatgactcagagaatcctcctgcatcagaggtgcttcgaatccagaacattctaacagaagaacctaaagtgacacaggtttatgcagaaaatggcacagtgttgcaaggcagtacagttgcctctgtgtacaaagggaaactgctgattggcacagtgtttcacaaagctctttactgtgagctctaacagaccgatttgcacccatgccatagaaactgaggccattatttcaaccgcttgccatattccgaggacccagtgttcttagctgaacaatgaatgctgaccctaaatgtggacatcatgaagcatcaaagcactgtttaactgggagtgatatgatgtgtagggcttttttttgagaatacactatcaaatcagtcttggaatacttgaaaacctcatttaccataaaaatccttctcactaaaatggataaatcagttatgtcaattgtcagatattaaataacagtgtgtgaccccaaaagtacttaccctaaaacatgtgttgcctgaaagcacatgtgtgtatcgctgccttgccatgtcttgttcagaagacacaggggagcagggttagctcacgtgtctttagaactccagtactcacccagggactccagttcacaggccagaaaacatatgcattatgaagttcccctctactccatgcacatagtaagtctgactatggcagtcagacttacttactcccattttcccttcgatatatgactttttctcagtaaatattaacctgaactattccaactccccttgtactcttgctttttcaattctcctgttgcaatgacacataggaaaatcttaaaattcttgggagtgttgtcacacctgaaaattatgagtctctatgatcttggcacaaattgtacatttgagtgtctttgacttggttaaaggaagtttgttcacttcgatgactggatacagaatgaatcccataattgacatgggcgaagctaaaagtgtccccaaagactacactgttgttgaggtggtggtagtgctggtgggtttttgtttaatatttaaacttcttgttgtggaggctgaaaagaaaaaaaataatagaaaggtaaacaaacaaataaatagaaaagatcaacaacccctttggctatctactgagacatgactaggaagaaaacatgactttatcattttgttatagaagctgatatataaaggttacacattttcatttatttgtttttctgatttgaaggtataaccttcatgatgaattacttcttcagggtgttaaggcagtgactttagaaacaaatttttttcttgtttttgttttgtttttgagaccgaatctcactctgttgcccaggctggagtgcagtggtgcgatcttggctcactgcaacttctacctccgaggttcaagagattcttgtgcctcagcctcccggatagctgg

SEQ ID NO: 2120 - DNA, 8850 bp, Homo sapiens; identical to SEQ ID NO: 1901

(The sequence listing continues in the following parts.)

That which is claimed is:

1. An isolated protein comprising an amino acid sequence selected from the group consisting of SEQ ID NOS:1-1233 and 2228-2638.

2. A composition comprising the protein of claim 1 and a pharmaceutically acceptable carrier.

3. An isolated nucleic acid molecule comprising a nucleotide sequence selected from the group consisting of:
a) SEQ ID NOS:1234-2227;
b) nucleotide sequences that encode a protein comprising an amino acid sequence selected from the group consisting of SEQ ID NOS:1-1233 and 2228-2638; and
c) nucleotide sequences that are completely complementary to the nucleotide sequences of a) or b).

4. An isolated RNAi or antisense nucleic acid molecule that selectively binds to the nucleic acid molecule of claim 3.

5. An isolated antibody that selectively binds to the protein of claim 1.

6. The antibody of claim 5, wherein the antibody is at least one of a monoclonal, polyclonal, fully human, humanized, chimeric, single-chain, or anti-idiotypic antibody.

7. A cell line, hybridoma, phage, or transgenic organism that produces the antibody of claim 5.

8. The antibody of claim 5, wherein the antibody is coupled to a composition selected from the group consisting of detectable substances and therapeutic agents.

9. A composition comprising the antibody of claim 5 and a pharmaceutically acceptable carrier.

10. An isolated antibody fragment of the antibody of claim 5, wherein the antibody fragment comprises a fragment selected from the group consisting of:
a) an Fab fragment;
b) an F(ab′)₂ fragment; and
c) an Fv fragment.

11. A method of modulating cell proliferation or apoptosis, the method comprising contacting a cell with the antibody of claim 5.

12. The method of claim 11, wherein the method comprises either inhibiting proliferation of colon cancer cells or stimulating apoptosis of colon cancer cells.

13. A method of modulating cell proliferation or apoptosis, the method comprising contacting a cell with the RNAi or antisense nucleic acid molecule of claim 4.

14. A method of detecting the protein of claim 1 in a sample, the method comprising contacting the sample with an isolated antibody that selectively binds to the protein and determining whether the antibody binds to the protein.

15. A method of detecting the nucleic acid molecule of claim 3 in a sample, the method comprising contacting the sample with an oligonucleotide that specifically hybridizes to the nucleic acid molecule and determining whether the oligonucleotide binds to the nucleic acid molecule.

16. A method of diagnosing, prognosing, or determining risk of colon cancer in a subject, the method comprising detecting at least one molecule in a sample, wherein the presence or abundance of the molecule is indicative of colon cancer, and wherein the molecule is selected from the group consisting of:
a) proteins comprising an amino acid sequence selected from the group consisting of SEQ ID NOS:1-1233 and 2228-2638;
b) antibodies that selectively bind to the protein of a);
c) nucleic acid molecules comprising a nucleotide sequence selected from the group consisting of SEQ ID NOS:1234-2227 and nucleotide sequences that encode the protein of a); and
d) nucleic acid molecules comprising a nucleotide sequence that is completely complementary to the nucleic acid molecule of c).

17. A method of treating colon cancer, the method comprising administering a therapeutically effective amount of the antibody of claim 5 to a subject.

18. A method of screening agents, the method comprising contacting the protein of claim 1 or a cell that expresses the protein with an agent, and assaying for whether the agent binds to the protein or modulates the function, activity, or expression of the protein.

19. A composition comprising the agent identified by the method of claim 18 and a pharmaceutically acceptable carrier.

20. A method of determining or predicting the effectiveness of a treatment or selecting a treatment for administration to a subject having colon cancer, the method comprising detecting the presence, abundance, or activity of the protein of claim 1 in a sample and determining or predicting the effectiveness of the treatment or selecting the treatment for administration based on the presence, abundance, or activity of the protein.
